United States Patent Application Publication US 2018/0126003 A1 - sequence listing, part 120

SEQ ID NO: 210143 - DNA, 2538 bp, Artificial Sequence
  derived and/or modified sequence
atggggagttgggctctcctctggccacccctgctctttaccgggctcctggtgcgtccgccagggaccatggcccaggcccagtattgcagcgtaaacaaggacatttttgaggtcgaggagaacactaatgtaactgaacctctggtagatatccatgtgcccgaaggccaggaagtgacattgggtgccctgtcaaccccattcgcctttcgtatccaaggaaatcagctgttcctgaacgtcacccccgattatgaggaaaagagcctccttgaagcccaattgctctgtcagtctggtgggacgctcgttacacagctgagagtgtttgtctccgtactcgatgtgaatgataacgctccggaattcccatttaaaaccaaggagatcagggtcgaggaggatacaaaagtcaatagtacagtgattcctgaaactcaactccaggccgaggacagggataaggatgacattctgttctacaccttgcaggagatgacagctggcgcaagcgattacttctctctggtatccgtgaatcggcctgcactgaggcttgatcgtccactggacttctacgaaaggcctaacatgactttctggctgctagtgcgggacacgccaggcgagaacgtggaaccatctcataccgctactgcaaccctagtgcttaacgtcgtccccgcagacctacgcccaccatggttcctgccctgtacatttagcgatggctacgtttgtatccaggcgcagtatcacggcgctgtccctactggccatattctcccttccccattggtcctgcgaccgggacccatctatgctgaagacggagatcgcggaattaaccagccgatcatctactcaatctttcgtgggaacgtaaacggtacgttcatcattcatcccgacagcgggaatctcacagtggcgaggtccgtgccgtcaccaatgacatttctgcttctcgtgaagggacaacaagctgatttagcaaggtacagcgtcacacaggtgactgttgaagccgttgcagccgctggatctccccctcgttttccccagcgtctctaccggggtacggtagccaggggtgctggagcgggtgtcgtagttaaagacgccgctgctccctcccaaccacttagaatccaagcccaggaccctgagttctccgacctgaactcagcaattacgtatagaatcacaaaccactctcatttcaggatggagggcgaagtggtcctgacaacaacaactctggcccaggcgggagcattttacgcagaggttgaggcccataacaccgttacttcagggacggccacaacagtcattgagatccaagtgtccgagcaggagcctccttctaccgatgttcctccttcacctgaagccggaggtaccacgggtccatggacaagcaccaccagtgaagtccccaggcccccagaaccctcccaggggcctagcaccacctcctccggcggaggcaccggccctcatccccctagcggcaccacactgcgacctccaacatcctccacgccgggaggcccacccggagccgagaacagcacctctcaccaacccgctaccccaggtggggataccgcccagacaccaaagcccggaacgagccaacccatgccccctggcgtcgggacaagcacaagccaccagccagcaactcccagtggaggcactgcgcagacacctgagcctggaacatctcagccgatgcccccatctatgggcacctcaacttctcaccaaccagcaacccccggtgggggaacagctcaaacccccgaggctgggacgtcgcagcctatgccccctggaatgggcactagcacatctcaccaaccaactacacctggcggaggaaccgctcagacacctgagccgggaacatcccagcctatgccactgagcaagtcaactccatcgtcaggcggtggcccttctgaagataagagattctccgtggtggacatggccgctcttggtggagtgctcggagctctgttgctgctggctctgctaggtctggccgtcttggtgcacaaacattacggacctcgactaaaatgttgctgcggtaaggcgccagagccgcagccacagggcttcgacaatcaggcctttctgcccgaccacaaggcaaattgggctccagtgccatccccgactcacgatcctaaaccagcggaggcgcctatgcccgctgaaccagcccctccaggaccagccagtccagggggagcgccagagccacccgcagcagctcgcgctggaggttcccctacggccgtgagaagtattctgacaaaggaacgcaggcccgagggtgggtacaaggccgtgtggttcggcgaggatatcggcacagaggcggacgtggtggtgttgaatgctcccaccctggacgttgatggcgcttcagattccggtagcggtgacgaaggagaaggcgcaggcaggggcggtggaccctatgacgcaccgggaggggacgacagctatatttag

SEQ ID NO: 210144 - DNA, 2538 bp, Artificial Sequence
  derived and/or modified sequence
atggggtcctgggctttgttgtggccacccctgctgttcaccggcctgctggtgcgccctccagggaccatggcgcaggctcagtactgctctgttaataaagacatttttgaagtcgaggagaacaccaatgtgactgaaccattggtggacatacacgtgcccgagggccaggaagttaccctgggagcattatctaccccgttcgcattcagaattcagggcaaccagctgtttctgaacgtcactccggattacgaggagaaaagccttctcgaagcccagcttctgtgtcagtccgggggaactctcgtgacccaactaagggtgtttgtctccgtcctggacgtgaacgataacgcccctgagtttccattcaagacaaaggaaatcagagtcgaggaagacacaaaggtcaacagcactgtgataccagaaacccagttgcaagctgaggatcgcgacaaagatgacatcctcttctacacacttcaggaaatgaccgctggcgcttcggattacttctcattagttagtgttaacagacccgcattgcgcctggacagaccgctggacttttacgaacggccaaacatgactttttggctcctagttagggacaccccaggtgagaacgtggagccttcacacacggcgacagctacactggtattgaacgtggtaccagccgatctcaggcctccttggttcctgccctgtacattcagcgacggctatgtctgtatccaagcgcagtaccatggggctgtccctacggggcatatactcccctcgccactggtcctccggccaggcccaatttacgcagaggacggggatagaggcataaatcaacccataatttattcaattttcaggggaaatgtcaacggcacattcattatacatcccgactcgggtaacttaaccgttgccaggtcagtcccctcccccatgacttttttgttattggtcaagggacaacaggccgacctcgcacgatactccgtgactcaggtgacggtcgaggctgtggccgctgccggttctcctccgagatttcctcagcggctataccggggtactgtggcgcgaggcgctggggcaggcgtcgtagtaaaagacgcggcagcacctagccagccactcaggatacaagcccaggatccagaattcagcgatctgaatagtgccattacatatcgcatcaccaaccactctcattttaggatggagggcgaggttgtgcttacgacaacaaccttggcacaggccggagcattttatgccgaggttgaggctcacaataccgtgacaagcgggacggccacaaccgtcattgagattcaagtgagtgagcaggagccgcctagcaccgatgtccctccttccccggaggccggaggaacaaccggtccctggactagtaccacatctgaagtgccaagaccccctgaaccgtcccagggtccaagcacaaccagcagcggcggagggacaggacctcatcctcccagtggcacaaccctgagacccccaacttcctccactccagggggacctccaggggctgagaactcgacatcacatcagcccgcaacccccggtggggataccgctcagacccctaagcctggcactagtcagcccatgccaccaggggtgggaacatcaacatcccaccagcccgctacgccaagcgggggaaccgcccaaaccccagagcccggaacctctcaaccaatgcctccctctatgggaacatcaacctctcatcagcctgcgacacccggaggaggcactgcccagacccccgaggcaggaacaagccagcctatgccacccggaatgggaacaagcaccagccaccaaccaacgactcccggaggcggaaccgctcagacccctgagccaggtacatcacagcccatgcccctctcaaaaagcacccctagctctggcggtggaccctccgaagacaagcggtttagcgttgtcgatatggcagccctcggcggagtgctcggcgctctcctgctactggccctgctcggactggccgtcttggtacacaagcattatgggccacgcctgaaatgttgttgtggcaaggcccctgagccacaacctcagggcttcgataatcaggcctttctgcctgaccacaaggccaattgggccccagtccccagtcccactcacgaccctaagccagctgaagctcccatgccagcagaacctgctccacctgggccagcctctcctgggggtgcccctgagccacctgccgcagctcgagcgggagggagccccaccgctgtgcgcagtatcctgactaaggagcggagacccgaaggtgggtataaggctgtatggtttggagaggacatcgggaccgaagccgacgttgtcgtactgaacgctccaacacttgacgtggatggagcctcggattccggaagtggcgatgaaggcgagggggctgggcgtggaggcggaccatatgatgcccctgggggtgatgacagctatatctag

SEQ ID NO: 210145 - DNA, 3635 bp, Artificial Sequence
  derived and/or modified sequence
attctggggctcgggggatcccggacaccctctcagctcctgcccgggggcccatgtgtcccttctgccctgtgcctcggtgcctgtgacctgagccccctggttgacccctgcactcagtccaacttgggccaaacgactgcccctccttctggcagtgggctggaccagccggccagcgggagcccccttggcagaagccggtcgtaaaggatcataaactgggcggcgtctggctggggcgaaggtcgctgaggtaggaactgcgccagtcctagacgccagacccgctcagaccctcctgccaggtgacagccgccaagatggggtcttgggccctgctgtggcctcccctgctgttcaccgggctgctcgtccgacccccggggaccatggcccaggcccagtactgctctgtgaacaaggacatctttgaagtagaggagaacacaaatgtcaccgagccgctggtggacatccacgtcccggagggccaggaggtgaccctcggagccttgtccaccccctttgcatttcggatccagggaaaccagctgtttctcaacgtgactcctgattacgaggagaagtcactgcttgaggctcagctgctgtgtcagagcggaggcacattggtgacccagctaagggtgttcgtgtcagtgctggacgtcaatgacaatgcccccgaattcccctttaagaccaaggagataagggtggaggaggacacgaaagtgaactccaccgtcatccccgagacgcaactgcaggctgaggaccgcgacaaggacgacattctgttctacaccctccaggaaatgacagcaggtgccagtgactacttctccctggtgagtgtaaaccgtcccgccctgaggctggaccggcccctggacttctacgagcggccgaacatgaccttctggctgctggtgcgggacactccgggggagaatgtggaacccagccacactgccaccgccacactagtgctgaacgtggtgcccgccgacctgcggcccccgtggttcctgccctgcaccttctcagatggctacgtctgcattcaagctcagtaccacggggctgtccccacggggcacatactgccatctcccctcgtcctgcgtcccggacccatctacgctgaggacggagaccgcggcatcaaccagcccatcatctacagcatctttaggggaaacgtgaatggtacattcatcatccacccagactcgggcaacctcaccgtggccaggagtgtccccagccccatgaccttccttctgctggtgaagggccaacaggccgaccttgcccgctactcagtgacccaggtcaccgtggaggctgtggctgcggccgggagcccgccccgcttcccccagagactgtatcgtggcaccgtggcgcgtggcgctggagcgggcgttgtggtcaaggatgcagctgccccttctcagcctctgaggatccaggctcaggacccggagttctcggacctcaactcggccatcacatatcgaattaccaaccactcacacttccggatggagggagaggttgtgctgaccaccaccacactggcacaggcgggagccttctacgcagaggttgaggcccacaacacggtgacctctggcaccgcaaccacagtcattgagatacaagtttccgaacaggagcccccctccacagatgtccccccatccccagaggctggaggaacaactgggccctggaccagcaccacttccgaggtccccagaccccctgagccctcccagggaccctccacgaccagctctgggggaggcacaggccctcatccaccctctggcacaactctgaggccaccaacctcgtccacacccggggggcccccgggtgcagaaaacagcacctcccaccaaccagccactcccggtggggacacagcacagaccccaaagccaggaacctctcagccgatgccccccggtgtgggaaccagcacctcccaccaaccagccacacccagtgggggcacagcacagaccccagagccaggaacctctcagccgatgccccccagtatgggaaccagcacctcccaccaaccagccacacccggtgggggcacagcacagaccccagaggcaggaacctctcagccgatgccccccggtatgggaaccagcacctcccaccaaccaaccacacccggtgggggcacagcacagaccccagagccaggaacctctcagccgatgcccctcagcaagagcaccccatcttcaggtggcggcccctcggaggacaagcgcttctcggtggtggatatggcggccctgggcggggtgctgggtgcgctgctgctgctggctctccttggcctcgccgtccttgtccacaagcactatggcccccggctcaagtgctgctgtggcaaagctccggagccccagccccaaggctttgacaaccaggcgttcctccctgaccacaaggccaactgggcgcccgtccccagccccacgcacgaccccaagcccgcggaggcaccgatgcccgcagagcccgcaccccccggccctgcctccccaggcggtgcccctgagccccccgcagcggcccgagctggcggaagccccacggcggtgaggtccatcctgaccaaggagcggcggccggagggcgggtacaaggctgtctggtttggcgaggacatcgggacggaggcagacgtggtcgttctcaacgcgcccaccctggacgtggatggcgccagtgactccggcagcggcgatgagggcgagggcgcggggaggggtgggggtccctacgatgcgcccggtggtgatgactcctacatctaagtggcccctccaccctctcccccagccgcacgggcactggaggtctcgctcccccagcctccgacccgaggcagaataaagcaaggctcccgaaacccaggccatggcgtggggcaggcgcgcgggtccatgggggtcccattcactcagtcccctgtcgtcattagcgcttgagcccaggtgtgcagatgaggcggtgggtctggccacgctgtccccaccccaaggctgcagcacttcccgtaaaccacctgcagtgcccgccgccttcccgaggctctgtgccagctagtctgggaagttcctctcccgctctaaccacagcccgaggggggctcccctcccccgacctgcaccggagatctcaggcacccggctcatctcagacctcccgctcccgaccctacacagagattgcctggggaggctgaggagccgatgcaaacccccaaggcgacgcacttgggagccggtggtctcaaacacctgccgggggtcctagtccccttctgaaatctacatgcttgggttggagcgcagcagtaaacaccctgcccagtgacctggactgaggcgcgctgggggtgggtgcgccgtgtggcctgagcaggagccagaccaggaggcctaggggtgagagacacattcccctcgctgctcccaaagccagagcccaggctgggcgcccatgcccagaaccatcaagggatcccttgcggcttgtcagcactttccctaatggaaatacaccattaattcctttccaaatgtttt

SEQ ID NO: 210146 - DNA, 3489 bp, Artificial Sequence
  derived and/or modified sequence
tgggctggaccagccggccagcgggagcccccttggcagaagccggtcgtaaaggatcataaactgggcggcgtctggctggggcgaaggtcgctgaggtaggaactgcgccagtcctagacgccagacccgctcagaccctcctgccaggtgacagccgccaagatggggtcttgggccctgctgtggcctcccctgctgttcaccgggctgctcgtccgacccccggggaccatggcccaggcccagtactgctctgtgaacaaggacatctttgaagtagaggagaacacaaatgtcaccgagccgctggtggacatccacgtcccggagggccaggaggtgaccctcggagccttgtccaccccctttgcatttcggatccagggaaaccagctgtttctcaacgtgactcctgattacgaggagaagtcactgcttgaggctcagctgctgtgtcagagcggaggcacattggtgacccagctaagggtgttcgtgtcagtgctggacgtcaatgacaatgcccccgaattcccctttaagaccaaggagataagggtggaggaggacacgaaagtgaactccaccgtcatccccgagacgcaactgcaggctgaggaccgcgacaaggacgacattctgttctacaccctccaggaaatgacagcaggtgccagtgactacttctccctggtgagtgtaaaccgtcccgccctgaggctggaccggcccctggacttctacgagcggccgaacatgaccttctggctgctggtgcgggacactccgggggagaatgtggaacccagccacactgccaccgccacactagtgctgaacgtggtgcccgccgacctgcggcccccgtggttcctgccctgcaccttctcagatggctacgtctgcattcaagctcagtaccacggggctgtccccacggggcacatactgccatctcccctcgtcctgcgtcccggacccatctacgctgaggacggagaccgcggcatcaaccagcccatcatctacagcatctttaggggaaacgtgaatggtacattcatcatccacccagactcgggcaacctcaccgtggccaggagtgtccccagccccatgaccttccttctgctggtgaagggccaacaggccgaccttgcccgctactcagtgacccaggtcaccgtggaggctgtggctgcggccgggagcccgccccgcttcccccagagactgtatcgtggcaccgtggcgcgtggcgctggagcgggcgttgtggtcaaggatgcagctgccccttctcagcctctgaggatccaggctcaggacccggagttctcggacctcaactcggccatcacatatcgaattaccaaccactcacacttccggatggagggagaggttgtgctgaccaccaccacactggcacaggcgggagccttctacgcagaggttgaggcccacaacacggtgacctctggcaccgcaaccacagtcattgagatacaagtttccgaacaggagcccccctccacagatgtccccccatccccagaggctggaggaacaactgggccctggaccagcaccacttccgaggtccccagaccccctgagccctcccagggaccctccacgaccagctctgggggaggcacaggccctcatccaccctctggcacaactctgaggccaccaacctcgtccacacccggggggcccccgggtgcagaaaacagcacctcccaccaaccagccactcccggtggggacacagcacagaccccaaagccaggaacctctcagccgatgccccccggtgtgggaaccagcacctcccaccaaccagccacacccagtgggggcacagcacagaccccagagccaggaacctctcagccgatgccccccagtatgggaaccagcacctcccaccaaccagccacacccggtgggggcacagcacagaccccagaggcaggaacctctcagccgatgccccccggtatgggaaccagcacctcccaccaaccaaccacacccggtgggggcacagcacagaccccagagccaggaacctctcagccgatgcccctcagcaagagcaccccatcttcaggtggcggcccctcggaggacaagcgcttctcggtggtggatatggcggccctgggcggggtgctgggtgcgctgctgctgctggctctccttggcctcgccgtccttgtccacaagcactatggcccccggctcaagtgctgctgtggcaaagctccggagccccagccccaaggctttgacaaccaggcgttcctccctgaccacaaggccaactgggcgcccgtccccagccccacgcacgaccccaagcccgcggaggcaccgatgcccgcagagcccgcaccccccggccctgcctccccaggcggtgcccctgagccccccgcagcggcccgagctggcggaagccccacggcggtgaggtccatcctgaccaaggagcggcggccggagggcgggtacaaggctgtctggtttggcgaggacatcgggacggaggcagacgtggtcgttctcaacgcgcccaccctggacgtggatggcgccagtgactccggcagcggcgatgagggcgagggcgcggggaggggtgggggtccctacgatgcgcccggtggtgatgactcctacatctaagtggcccctccaccctctcccccagccgcacgggcactggaggtctcgctcccccagcctccgacccgaggcagaataaagcaaggctcccgaaacccaggccatggcgtggggcaggcgcgcgggtccatgggggtcccattcactcagtcccctgtcgtcattagcgcttgagcccaggtgtgcagatgaggcggtgggtctggccacgctgtccccaccccaaggctgcagcacttcccgtaaaccacctgcagtgcccgccgccttcccgaggctctgtgccagctagtctgggaagttcctctcccgctctaaccacagcccgaggggggctcccctcccccgacctgcaccggagatctcaggcacccggctcatctcagacctcccgctcccgaccctacacagagattgcctggggaggctgaggagccgatgcaaacccccaaggcgacgcacttgggagccggtggtctcaaacacctgccgggggtcctagtccccttctgaaatctacatgcttgggttggagcgcagcagtaaacaccctgcccagtgacctggactgaggcgcgctgggggtgggtgcgccgtgtggcctgagcaggagccagaccaggaggcctaggggtgagagacacattcccctcgctgctcccaaagccagagcccaggctgggcgcccatgcccagaaccatcaagggatcccttgcggcttgtcagcactttccctaatggaaatacaccattaattcctttccaaatgttttaattgtgagagt

SEQ ID NO: 210147 - DNA, 2538 bp, Artificial Sequence
  derived and/or modified sequence
atgggcagctgggccctgctgtggccccccctgctgttcaccggcctgctggtgagaccccccggcaccatggcccaggcccagtactgcagcgtgaacaaggacatcttcgaggtggaggagaacaccaacgtgaccgagcccctggtggacatccacgtgcccgagggccaggaggtgaccctgggcgccctgagcacccccttcgccttcagaatccagggcaaccagctgttcctgaacgtgacccccgactacgaggagaagagcctgctggaggcccagctgctgtgccagagcggcggcaccctggtgacccagctgagagtgttcgtgagcgtgctggacgtgaacgacaacgcccccgagttccccttcaagaccaaggagatcagagtggaggaggacaccaaggtgaacagcaccgtgatccccgagacccagctgcaggccgaggacagagacaaggacgacatcctgttctacaccctgcaggagatgaccgccggcgccagcgactacttcagcctggtgagcgtgaacagacccgccctgagactggacagacccctggacttctacgagagacccaacatgaccttctggctgctggtgagagacacccccggcgagaacgtggagcccagccacaccgccaccgccaccctggtgctgaacgtggtgcccgccgacctgagacccccctggttcctgccctgcaccttcagcgacggctacgtgtgcatccaggcccagtaccacggcgccgtgcccaccggccacatcctgcccagccccctggtgctgagacccggccccatctacgccgaggacggcgacagaggcatcaaccagcccatcatctacagcatcttcagaggcaacgtgaacggcaccttcatcatccaccccgacagcggcaacctgaccgtggccagaagcgtgcccagccccatgaccttcctgctgctggtgaagggccagcaggccgacctggccagatacagcgtgacccaggtgaccgtggaggccgtggccgccgccggcagcccccccagattcccccagagactgtacagaggcaccgtggccagaggcgccggcgccggcgtggtggtgaaggacgccgccgcccccagccagcccctgagaatccaggcccaggaccccgagttcagcgacctgaacagcgccatcacctacagaatcaccaaccacagccacttcagaatggagggcgaggtggtgctgaccaccaccaccctggcccaggccggcgccttctacgccgaggtggaggcccacaacaccgtgaccagcggcaccgccaccaccgtgatcgagatccaggtgagcgagcaggagccccccagcaccgacgtgccccccagccccgaggccggcggcaccaccggcccctggaccagcaccaccagcgaggtgcccagaccccccgagcccagccagggccccagcaccaccagcagcggcggcggcaccggcccccacccccccagcggcaccaccctgagaccccccaccagcagcacccccggcggcccccccggcgccgagaacagcaccagccaccagcccgccacccccggcggcgacaccgcccagacccccaagcccggcaccagccagcccatgccccccggcgtgggcaccagcaccagccaccagcccgccacccccagcggcggcaccgcccagacccccgagcccggcaccagccagcccatgccccccagcatgggcaccagcaccagccaccagcccgccacccccggcggcggcaccgcccagacccccgaggccggcaccagccagcccatgccccccggcatgggcaccagcaccagccaccagcccaccacccccggcggcggcaccgcccagacccccgagcccggcaccagccagcccatgcccctgagcaagagcacccccagcagcggcggcggccccagcgaggacaagagattcagcgtggtggacatggccgccctgggcggcgtgctgggcgccctgctgctgctggccctgctgggcctggccgtgctggtgcacaagcactacggccccagactgaagtgctgctgcggcaaggcccccgagccccagccccagggcttcgacaaccaggccttcctgcccgaccacaaggccaactgggcccccgtgcccagccccacccacgaccccaagcccgccgaggcccccatgcccgccgagcccgccccccccggccccgccagccccggcggcgcccccgagccccccgccgccgccagagccggcggcagccccaccgccgtgagaagcatcctgaccaaggagagaagacccgagggcggctacaaggccgtgtggttcggcgaggacatcggcaccgaggccgacgtggtggtgctgaacgcccccaccctggacgtggacggcgccagcgacagcggcagcggcgacgagggcgagggcgccggcagaggcggcggcccctacgacgcccccggcggcgacgacagctacatctag

SEQ ID NO: 210148 - protein, 325 aa, Artificial Sequence
  derived and/or modified sequence
MDSELKEEIPVHEEFILCGGAETQVLKCGPWTDLFHDQSVKRPKLLIFIIPGNPGFSAFYVPFAKALYSLTNRRFPVWTISHAGHALAPKDKKILTTSEDSNAQEIKDIYGLNGQIEHKLAFLRTHVPKDMKLVLIGHSIGSYFTLQMLKRVPELPVIRAFLLFPTIERMSESPNGRIATPLLCWFRYVLYVTGYLLLKPCPETIKSLLIRRGLQVMNLENEFSPLNILEPFCLANAAYLGGQEMMEVVKRDDETIKEHLCKLTFYYGTIDPWCPKEYYEDIKKDFPEGDIRLCEKNIPHAFITHFNQEMADMIADSLKDDLSKM

SEQ ID NO: 210149 - DNA, 2903 bp, Artificial Sequence
  derived and/or modified sequence
acctgaggggggcacttccggtctcgtgccgccttcccaggaccctcagggagagcgggcagccttccaggtggacagaaatggactcagaactcaaggaagaaattcctgtgcatgaggaattcattttgtgtggtggagccgaaacccaggttctaaaatgtgggccctggacagacctctttcatgatcaaagtgtcaaaaggcctaagctgcttattttcattattcctggtaacccaggtttttctgccttttatgtgccatttgcaaaggctttatactctttgacaaacagacgctttccagtttggactatcagtcatgctgggcatgcgttggctcccaaagacaagaagattcttacaacatcagaggattcaaacgctcaagaaattaaggacatttatggactaaatggacaaatagagcacaaactagctttcctgagaactcatgtgccaaaggacatgaaacttgtgctcattggccattcaataggcagctatttcacacttcagatgctgaagcgagtccctgagctcccggtaattcgtgcctttctgctctttccaacaattgaacgaatgtctgagtcacccaatggcagaattgccactccacttttgtgctggtttcgatatgttctctatgttactggctacttattattgaaaccgtgtcctgagacaatcaagtccttgctaatcagaaggggccttcaagtaatgaacctagagaatgaattttcaccattgaatatattagaaccattctgccttgctaatgctgcctaccttgggggccaagaaatgatggaggtggtgaagagagatgacgaaaccataaaggagcatttatgtaagcttacattttattatggtactatagatccttggtgtccaaaagagtactatgaagacattaagaaggattttccagaaggagacattcgactctgtgagaaaaacatacctcatgctttcatcacccattttaaccaggaaatggcagacatgattgctgactccctaaaggatgacttgtccaaaatgtaaattggcctgaggaacaagcccccactgccagtacatggaggcagtcagtgtactagacttagtaggtaaatgtttaattttgaagactgatattagaaatgaagaaagtgagaacctttgtcttacaaaccaactctccgctcgccatgttataggctgaagtaaacacagttgatgaatcattccataggtttaaccatacattttccaagactcagggaacacagtgatctacacagagtcttgtgtttgcacaagatgcccagtggcaccatatggtttattttggtaggcaggatctttgcagatgaaaaaaaaatctacatgtacttgattttaattgagttacattgtagaataggctcctctggaggaaattatgaaatacctactagaaaatgtaaaataaatcagtgaatgttaagagtatagttagatatgtgaagtgtatgagattatgacaaggatacactcatgttccaggagcaggaagtgaacctgggtctcctgtaagacagaagatgaagatgagcccaggctaacttagcacagatcttggctgagatcatcaatgtgacgtctaatgtacctgcactagacagagaataaagttcaccagacattactctggtcagctaaccagataaagaattgttgaaggaccccaactgtgcctcctgccacaggacaaccagcaagttctatgctgagccttagcctcccaggttataagctccctgcaggctcctcctctccagagccaggatggagaggcactgggctgtcccaaagcaggcttggatgtgccaacgtacagttgctccttctgtaattcttgcactaaaactccattaaagaccatcaatgagccaaatagtgtgctagccattgaggatggagttcttagctacttaatgattcttttcttctggaaatcttctagtgaataatttttaaaagcttcttttaaactgctcagtaaaacattgccatacattaactctccatttctgcattaacttcatttgctggaaagaaattattttgttaatgaaccaaacccagccattaagttatgtgaattcaccttctctagacacattgaggtatggcagagaagacacatattccctggcctagagtgggctgacaatattgctgcctcccctaaattgactcaatcttgagaaccacatactgcagtgacagttgatcatggatcagaaatattcctttttctcctagaggaaatccctcatggcattatcattccctaaggacaatgagatgtccctccgctcaaatcctaaagccccctgatgaaagatttggctctgatttgctgccaacttattggtaagtgctgaatgagttactgtgctttggcatagcttctacatcacagcaagtgacttctcagaggggaaaagccaagctccagacaaggagtgctgttagcccaaggggaagagctaatagatacataggccgtaagcacagggctgtacacagatcctttattggcatctgcatgagaggcctagaaatcggatgttagaagctaggaatcatggctctgagcgccttgcatacaggagatactcactgatactaaatcaaggcatgtaaacaatactgggtaaatcatacctaccagaataaagagtaacattcagagcttttcttttatctgttattttaaatgttactccatatttcaaaagtctgcacgtatgaaattgtgtcttatttctggtttttagagcctaagaaagatactcattcttaattcctatttatcatctgaaaaccaaatgaatttttgaaataaatgttttaccagca

SEQ ID NO: 210150 - DNA, 973 bp, Artificial Sequence
  derived and/or modified sequence
gtgccgccttcccaggaccctcagggagagcgggcagccttccaggtggacaggtaacccaggtttttctgccttttatgtgccatttgcaaaggctttatactctttgacaaacagacgctttccagtttggactatcagtcatgctgggcatgcgttggctcccaaagacaagaagattcttacaacatcagaggattcaaacgctcaagaaattaaggacatttatggactaaatggacaaatagagcacaaactagctttcctgagaactcatgtgccaaaggacatgaaacttgtgctcattggccattcaataggcagctatttcacacttcagatgctgaagcgagtccctgagctcccggtaattcgtgcctttctgctctttccaacaattgaacgaatgtctgagtcacccaatggcagaattgccactccacttttgtgctggtttcgatatgttctctatgttactggctacttattattgaaaccgtgtcctgagacaatcaagtccttgctaatcagaaggggccttcaagtaatgaacctagagaatgaattttcaccattgaatatattagaaccattctgccttgctaatgctgcctaccttgggggccaagaaatgatggaggtggtgaagagagatgacgaaaccataaaggagcatttatgtaagcttacattttattatggtactatagatccttggtgtccaaaagagtactatgaagacattaagaaggattttccagaaggagacattcgactctgtgagaaaaacatacctcatgctttcatcacccattttaaccaggaaatggcagacatgattgctgactccctaaaggatgacttgtccaaaatgtaaattggcctgaggaacaagcccccactgccagtacatggaggcagtcagtgtactagacttagtaggtaaatgtttaattttgaagactgatattag

SEQ ID NO: 210151 - DNA, 978 bp, Artificial Sequence
  derived and/or modified sequence
atggacagcgagctgaaggaggagatccccgtgcacgaggagttcatcctgtgcggcggcgccgagacccaggtgctgaagtgcggcccctggaccgacctgttccacgaccagagcgtgaagagacccaagctgctgatcttcatcatccccggcaaccccggcttcagcgccttctacgtgcccttcgccaaggccctgtacagcctgaccaacagaagattccccgtgtggaccatcagccacgccggccacgccctggcccccaaggacaagaagatcctgaccaccagcgaggacagcaacgcccaggagatcaaggacatctacggcctgaacggccagatcgagcacaagctggccttcctgagaacccacgtgcccaaggacatgaagctggtgctgatcggccacagcatcggcagctacttcaccctgcagatgctgaagagagtgcccgagctgcccgtgatcagagccttcctgctgttccccaccatcgagagaatgagcgagagccccaacggcagaatcgccacccccctgctgtgctggttcagatacgtgctgtacgtgaccggctacctgctgctgaagccctgccccgagaccatcaagagcctgctgatcagaagaggcctgcaggtgatgaacctggagaacgagttcagccccctgaacatcctggagcccttctgcctggccaacgccgcctacctgggcggccaggagatgatggaggtggtgaagagagacgacgagaccatcaaggagcacctgtgcaagctgaccttctactacggcaccatcgacccctggtgccccaaggagtactacgaggacatcaagaaggacttccccgagggcgacatcagactgtgcgagaagaacatcccccacgccttcatcacccacttcaaccaggagatggccgacatgatcgccgacagcctgaaggacgacctgagcaagatgtag

SEQ ID NO: 210152 - DNA, 978 bp, Artificial Sequence
  derived and/or modified sequence
atggatagcgagcttaaagaggagatccctgttcacgaggaattcattctgtgtggaggcgccgagactcaggtgttaaagtgcggtccctggactgacctgtttcacgatcagagtgtaaaacgaccaaaattgctaatttttatcattcccgggaatccaggattctccgctttctacgttccgtttgccaaagctctgtactcattgactaataggcgattccctgtgtggactatcagccacgccggtcacgctctggctcctaaagacaaaaaaattctcacgacctccgaggactcgaatgcacaggagatcaaggatatctacggtctgaacggtcagatagagcacaaactcgcattcctgcggacccacgtcccaaaggatatgaaactcgtcctgatcggacactcaatcggctcatactttactctccaaatgctaaaaagagtgcctgaactgcctgttattagagcttttctgctgtttcctaccatcgagcgcatgtcagagagtccaaatgggcgcatcgcaacccccctcctgtgttggttcagatatgtgctctacgtaacggggtatctcttactgaagccgtgtcctgagaccattaaatcactcttgatccgacgcgggttgcaggtgatgaatctggagaacgaatttagtcctcttaacattctggagcccttctgtctggctaatgcagcgtatttaggaggacaagaaatgatggaggtggtgaaacgggacgacgagactatcaaggaacatctgtgtaaactcactttttattatgggaccatagacccttggtgccctaaggagtactacgaagacatcaaaaaggattttccagaaggagacataagactgtgcgagaagaacatccctcatgcgtttattacacacttcaatcaggaaatggccgatatgatcgcagacagtttgaaagacgatttatctaagatgtag

SEQ ID NO: 210153 - DNA, 978 bp, Artificial Sequence
  derived and/or modified sequence
atggattctgagctgaaggaggagatccctgtgcatgaggagttcatcctgtgtggcggcgctgagacccaggtgctgaagtgtggcccctggacagacctcttccatgaccagagcgtgaagaggcccaagctgctgatcttcatcatccctggcaaccctggcttcagcgccttctacgtgccctttgccaaggccctgtacagcctgaccaacagacgcttccctgtgtggaccatcagccatgctggccacgccctggcccccaaggacaagaagatcctgaccaccagcgaggacagcaatgcccaggagatcaaggacatctacggcctgaatggccagatcgagcacaagctggccttcctgcggacccacgtgcccaaggacatgaagctggtgctgattggccacagcatcggcagctacttcaccctgcagatgctgaagagggtgcctgagctgcccgtcatccgggccttcctgctcttccccaccattgaaagaatgtctgagagccccaacggccgcatcgccacccccctgctgtgctggttccgctacgtgctgtatgtgacaggctacctgctgctgaagccctgcccagagaccatcaagagcctgctgatcagaagaggcctgcaggtgatgaacctggagaatgagttcagccccctgaacatcctggagcccttctgcctggccaatgctgcctacctgggcggccaggagatgatggaggtggtgaagagagatgatgagaccatcaaggagcacctgtgcaagctgaccttctactacggcaccatcgacccctggtgccccaaggagtactatgaggacatcaagaaggacttccctgagggggacatccggctgtgtgagaagaacatcccccacgccttcatcacccacttcaaccaggagatggctgacatgattgctgacagcctgaaggatgacctgagcaagatgtag

SEQ ID NO: 210154 - DNA, 978 bp, Artificial Sequence
  derived and/or modified sequence
atggacagcgagctgaaggaggagatccccgtgcacgaggagttcatactctgtgggggggctgaaactcaggtgctcaaatgtggcccctggaccgatctcttccatgaccagagtgtgaagcggccgaagctgctgatcttcatcattcccggaaaccccgggttctccgccttttacgtcccattcgccaaagcactttacagtctcaccaacaggagatttcccgtctggacaatttcccacgcaggccatgccctggctcccaaagataaaaagatcctgactaccagtgaggatagcaacgcccaggagattaaggatatttatggtttaaatggacagattgagcataaacttgccttcctcaggacgcacgtgcccaaggacatgaaattagtactcatcggacactccatcggcagctacttcacgctgcagatgttgaagcgtgtgcccgagctgcccgttattagagcttttcttctatttccgactattgaacggatgtccgagagtccaaacggtcggatagctacacctctcctgtgctggttcagatacgtgttatatgttacagggtacttgctcctgaagccatgtcccgagacaattaaatctttgcttatccgccgaggtctgcaggtgatgaatctggagaatgaattttctccactgaatattttggagcctttttgtttagccaatgccgcttatctgggcgggcaggaaatgatggaggtggttaaacgcgacgatgagacaatcaaagagcacctgtgtaagctgacattctattacggcacaatcgacccttggtgccccaaggagtattacgaggatattaagaaggactttccagagggagatatacggctgtgtgagaagaatatcccccacgctttcattacacattttaatcaggagatggctgacatgatcgccgattcactgaaagacgacctttcaaaaatgtag

SEQ ID NO: 210155 - DNA, 978 bp, Artificial Sequence
  derived and/or modified sequence
atggactctgaactaaaggaggagattcccgtgcacgaggagtttatactttgtggtggggctgaaactcaggtgctgaaatgtggcccttggaccgacctattccatgatcaatccgttaagagaccaaaactgcttatcttcattatacccggaaaccccggatttagtgctttctacgtgccattcgctaaggcactgtatagcctgaccaatcgtcgcttccccgtgtggaccatttcccacgctgggcatgctctagctcccaaagataagaagatcctgacgactagcgaggactccaacgcccaggagataaaggatatttacggcttaaatggccagatcgagcataaactggcattcctgcggactcatgtacccaaagatatgaagctcgtccttataggacacagtatcggcagctattttactctccaaatgctaaaaagagttcccgagctgcctgtgatcagggcattcttgctcttccctacgatagagcggatgtccgagtctccgaatggccgtatcgctaccccactgttatgttggttcagatacgtgctttatgtgaccgggtaccttttgctgaaaccttgtcccgagacaattaagagtctgctgatccgaagaggactgcaagtgatgaatctggagaacgaattctctccacttaacatcctcgaaccgttctgcttagcaaatgcggcttatcttggtggacaagagatgatggaagtggtcaagcgggatgacgaaactatcaaggaacacctttgcaagctcacattctactacggtacaatcgatccgtggtgcccgaaggaatactacgaggatatcaagaaggattttcctgagggcgacattagactgtgtgagaagaacatcccacacgcgtttatcacccactttaaccaggagatggcagatatgattgctgacagcctgaaagacgatctgtcaaagatgtag

SEQ ID NO: 210156 - protein, 411 aa, Artificial Sequence
  derived and/or modified sequence
MNAETCVSYCESPAAAMDAYYSPVSQSREGSSPFRAFPGGDKFGTTFLSAAAKAQGFGDAKSRARYGAGQQDLATPLESGAGARGSFNKFQPQPSTPQPQPPPQPQPQQQQPQPQPPAQPHLYLQRGACKTPPDGSLKLQEGSSGHSAALQVPCYAKESSLGEPELPPDSDTVGMDSSYLSVKEAGVKGPQDRASSDLPSPLEKADSESNKGKKRRNRTTFTSYQLEELEKVFQKTHYPDVYAREQLAMRTDLTEARVQVWFQNRRAKWRKRERFGQMQQVRTHFSTAYELPLLTRAENYAQIQNPSWLGNNGAASPVPACVVPCDPVPACMSPHAHPPGSGASSVTDFLSVSGAGSHVGQTHMGSLFGAASLSPGLNGYELNGEPDRKTSSIAALRMKAKEHSAAISWAT

SEQ ID NO: 210157 - DNA, 1236 bp, Artificial Sequence
  derived and/or modified sequence
atgaatgcggaaacatgtgtcagctactgcgagtctcccgcagcggccatggacgcctactactctccagtgagccagtcaagggagggctcgagccccttccgagccttcccgggcggggataagtttggaacgacgttcctcagtgcagctgcgaaggcccagggatttggagacgcgaagagccgagcgcggtacggagctggacagcaggatctcgcaaccccactggagagtggtgccggcgcaaggggtagtttcaataaattccagccacaaccttcgaccccccagccccagccacctcctcaacctcagcctcaacaacagcagcctcagccccagcctccagcacagccccatttgtatctccagagaggggcttgcaaaacaccaccagatggctccctcaaattgcaggagggctcgtcggggcacagcgccgccctgcaggtgccatgctatgctaaagagtcttccctgggggaacctgaactcccgcccgattctgataccgttggtatggacagctcctacctgtcggtaaaagaagcgggcgttaaggggccccaggacagggccagctcagacttgccgagtcctttggagaaagcggactcggagagcaacaagggcaagaagagaaggaaccgcacgactttcacctcataccagctggaagagctggagaaggtctttcagaagacccactatcctgacgtctatgccagggagcagctggccatgcggacagatctgaccgaggccagagtgcaggtctggttccagaaccgccgagctaagtggcgtaagcgggagcggttcgggcagatgcagcaggtgcggacacatttttctactgcttatgaactgcctcttctgactagagccgaaaactatgcccagatacagaacccgtcatggctgggtaacaacggggctgcctctccagtgccagcctgcgtcgtgccatgcgatcctgtcccagcgtgcatgtccccccacgcccacccccctggatcaggtgcctcctccgtgacagacttcttgtcagtgtccggagccggtagccatgtgggccagactcacatgggatctctgttcggggccgcatctctctcacccggcctgaatggctacgagctgaacggagaaccagaccggaaaacaagctccatcgccgctttaagaatgaaggctaaagagcacagtgccgcgatcagttgggcaacttag

SEQ ID NO: 210158 - DNA, 1236 bp, Artificial Sequence
  derived and/or modified sequence
atgaatgctgagacctgtgtgtcctactgtgagagccctgctgctgccatggatgcctactacagccctgtgtcccagagccgggagggcagcagccccttccgggccttccctggaggagacaagtttggcaccaccttcctgtctgctgctgccaaggcccagggctttggagatgccaagagccgggcccgctacggggccggccagcaggacctggccacccccctggagagcggggccggggcccggggcagcttcaacaagttccagccccagcccagcaccccccagccccagcccccaccccagccccagccccagcagcagcagccccagccccagcccccagcccagccccacctgtacctgcagagaggagcctgcaagaccccaccagatggcagcctgaagctgcaggagggcagcagcggccacagcgctgccctgcaggtgccctgctacgccaaggagagcagcctgggggagcctgagctgcccccagacagcgacacagtgggcatggacagcagctacctgtctgtgaaggaggccggcgtgaagggcccccaggaccgggccagcagtgacctgcccagccccctggagaaggctgacagcgagagcaacaagggcaagaagagaagaaacagaaccaccttcaccagctaccagctggaggagctggagaaggtgttccagaagacccactacccagatgtgtatgcccgggagcagctggccatgaggacagacctgacagaggcccgggtgcaggtgtggttccagaacagaagagccaagtggaggaagcgggagagatttggccagatgcagcaggtgaggacccacttcagcacagcctatgagctgcccctgctgaccagggctgagaactatgcccagatccagaaccccagctggctgggcaacaacggggccgccagccctgtgcctgcctgtgtggtgccctgtgaccctgtgcctgcctgcatgagcccccacgcccaccccccaggcagcggggccagctctgtgacagacttcctgtctgtgtctggagctggcagccacgtgggccagacccacatgggcagcctgtttggagctgccagcctgagccctggcctgaatggctatgagctgaatggagagccagacaggaagaccagcagcattgctgccctgaggatgaaggccaaggagcacagcgctgccatctcctgggccacctag

SEQ ID NO: 210159 - DNA, 5750 bp, Artificial Sequence
  derived and/or modified sequence
gcacagccacagcctcctcgcctccccaaactcccagccaaggcgcgcggtggcgtcctcgcgccctcgctcgcgtccccgcccgccgcctgcgcaagccaggcatgaatgctgagacttgcgtctcttactgcgagtcgccggccgctgccatggacgcctactacagcccggtgtcgcagagtcgggagggctcgtcgccttttagggcatttcccggaggcgacaagttcggcacaactttcctgtcggccgccgccaaagcacagggattcggggacgccaagagccgggcccgttacggcgctgggcagcaggacctggcgacacccctggagagtggagctggggcgcggggctcctttaacaagttccagccccagccgtcgaccccgcagccccagccgccgccgcagccgcagccgcagcagcagcagccgcagccccagccgcccgcgcaaccgcatctttacttgcagcgaggcgcctgcaagacgcccccggacggcagcctcaaactccaggaaggcagcagcggccacagcgcggccttgcaggttccctgctacgctaaagagagctccctgggtgagccagagttaccccctgactctgacactgtggggatggacagcagctacctgagtgtcaaggaggctggggtgaaggggccccaggaccgggccagctcagacctccccagcccattggagaaggccgactcagagagcaacaagggcaagaagcggcggaaccggaccaccttcaccagctaccagctggaggagctggagaaggtcttccagaagacccactacccagacgtgtatgcgcgggaacagctggccatgaggacagacctcactgaggcccgcgtgcaggtctggttccagaaccgaagggccaagtggaggaagcgggagcgttttgggcagatgcagcaggttcgaacccacttctccactgcatatgagctgcccctcctcacccgagctgagaactacgcccagattcagaacccgtcctggctcggcaacaacggggctgcctcaccagtgccagcctgcgtggtcccctgcgacccggtgcctgcctgcatgtcccctcatgcccacccccctggctctggggccagcagcgtcaccgacttcctgagtgtgtctggggctggcagtcacgtgggccagacgcacatgggcagcctgtttggagcagccagcctcagcccaggcctcaatggctacgagctcaacggcgagccggaccgcaagacctcgagcatcgcggccctccgcatgaaggccaaggagcacagtgcggccatttcctgggccacatgacagggcacccctgccccgtccccacctcgggacaccatgggccacgcccatgttttccaggcccccagcctcccactcgactttcctcttaggaacctggcctgggccaggggcctgaccctcagcactttcagccgccccaagtctgaggccccgtggactgctgggagggagggggcagcaggcccctggcccctccctggcactgaggccctgacccctgctcccggccacaggcagtggagaaagccaggtggccacgtttttcagcttcgcatccatgataagctgaaagcgctttcttgctcccgcccactcctctgctctgcctagttgaccatgagtcaatgctagatttccatgcagacccagcagcctcaccagcccagtcttgtccatccttcccgctcctagtggggtcccctggtcaccaggccggtggctgtgtgtctgaagcacaggctgccctgcagagccagcctcctgccctcccatctttctctccctgaaagcacacggaatccgacctgctggggccaaggcgccagcctccacctccccccgaacagtgacgagtctgacagagcctggctgactgcatcctggctgtcccctaggctggatacacctggagagagtgggcagaggatgacaggagctggagccgaggacccctgctgccatctagcaatgccagtccccaggggagacacgggccagcccctcactggacactataggggaggagccagacctgagggaggctgagaacacagatgccacaagggctcccatggtgctagaagaaggaaaggtcctgggagagggggaggcatccgggtggggcgtgggcccgggcagtcctcccgctctccggcctgcctggcatctggtacagcggggaggtctgggcagctttgttctccatccagagcccagtcaggttccctccaggaggatgcggaggggctcgtctcttccctgccctaccctggcccctccctggggctgctcagcagtgtcccggcatggaaggactcacaacttcggaacacataagctagagcttgggggccgggtggcagagggtcaaaagctgcgtgcaggctttgctagaggacgtgtggccatgctcggcctccaggccctgctatggcctcaaactgactgtcctccctgccatatctgtcagtgtcatcgctgcccagagccttccacggcagatgggggctctgtgtccctccaggcactaggaggtgttgctcttctccacacagctttccacactccgtccttacacttcttccacagggaccaggactctctgccctctctccagcctgcggaagggctcctggcctgggctcctcggtgtggctttgctattgcaaatggggctgtcaggatgccctcctgaaaccaggcttcctgcctccaggaagcggggctctgtgcctgcctgcccgacccctgtagcttgggtctggccctgagccccagccctcacctcagctgggagtacacagtaaccgtccagaggcaggcctgtcagaccccaggtggggggtccctccagcaggcagcgccccgcattgaagcgctcgccttttctaccttctcccttgattcctgtcatggagtagggccaggcccactatgctcagggtcgtggacacagaaaggcctcctgggttgggcggagggtaaacttggtgttgttgaatgagggtctctggggttgggggtgacagtctcccgcctgcctggtgttctcatctgctctagaaaccaggctgaggaagggtctggctgtggcctcccttaatgagtcagacctctttgtgaaccgtagctctaaaatggatcttatagaggtgaaagggtcttggacattgaattaaatgttcttggaggcttggctttaagtgtttcaaatatttgaggatttggagtgacttttgggaagttttttctagttctgaggttcgctgaaatgacccagactcccccaaaatctagccagggaaaggaagaacttaaggctgggaacagtttccccatttctcccccctttccttctgaaatgctcatggctgaggaaggatggggaaggaaggaactttcaccttgggtctttctcacccatgagagaatcaggacaaagaggaggagagccaggtagctccagagtgggccaggagggagagcaagggaatcaggacaaagaggaggacagacaggtagctccagagcaggcagggagggagagtgagagctttaagggggctcttccgcagtggcccccggcactcagttcctccatgcgtctgctctctggctgggctagacccaagtcaggcaaatttcaacccaaaagcttgagaagaaaaggcgtctattagaagactctgtggctatggctgcctgtcccaacacacccaggaagtgtctaggattaaacatgccaatgtgaaacattcctgttcatctcgtcaaaggcagccacgtaccccaggcctgtcctctgtggcttggcccagcccttgggggccacctaaccacactaagtatgataggaccaccgagttgggaggaagcttagaaaccctctagttagtccagtcccttcacaacagagaagaccctggcccagagtggagacatgactgccctgacctgtacttgccctgagactaggctgagagaggagcctgggacgtgccacccagggtgtgagggcctgggcttcgttggcaccaggggcggccggtgctgcatggagctcccctctccaatgcctcatgggcattcactcagcagctcagttctccagaagagaaccttggggcccagtcccttccaagacaggtggctaggcccaaccttctgcactgcagagcagggggccactgccgtgtcagctcctaggatgactgagcaagtcagggcagctgcccaaggccatctggagctaaagctcatgaaggcaggtggagagaagcatctacctgccacgtggttcattgctatgcgaataagctaagagaggtgaggatttcctttggatacctgcctaagatctcaacagagatggcaacttaaaaataaagtcgtgggtagccggcagatggatgggcagcctccccacactgacagcctccagtccctgctgggcacaggtctcagcatggcaaggcttgacactaaggtgctgctactgccctccagatgccagcactactcctggggcatgggagcgagggctctggggggcacacagagaggcttgtctccaaggctgaaatagcacttggaggacatgggcttttagaactttccttgaattcttttaactatacttgattctcagcgctcactaccgtgcctccagcttcgggaagcacggtggccaggttagctcaaagacactgcgatggggtaggtgcagcaagtgtggggtgggtccccagcacacacagctgtgatcacactggacccagctccgtgccccatctcctgtcatttcggctgggcagacgagggacgcttccatgaaaactacgtaccctgcttatgcagtcattccctccctgggctagacagtggggggccatcttcgagaacctgaaagacacgcgggggttcctggtctgtttcatggcccttactgtccagtgcaaaggcaaacaggcctagctgggggaggatggttggtaaactggcccccaggataatactctgtgactatccagttaaaaaataagaaggtgacaatgacccatcaaccccacttcacttctttcaggatgctgtagggaggaaaggtgcttccatgacctaacctcggcctctcctttcttccctcttcactcacacacatagagctaggcctttatactactgattttgaaggacagttttcaatgtctaatcatctgtttaggtgtgcagtggttgaaaaaagaaagctgagtgctagaaggaacatgaacctcaaccgttacttattgttctcattgtaagatattttaaccctgtataaatgcaacttttcctttagcttaatggcctggggtggaatattaaaaatatatattaaaaatacagtaaaaatccagaaaaatgtaaaaaaaaaaatgaggtcggttccataaagttttactgcctataccaccatgtaactacattatagcaaaatattaaaagaaacgttcttgccttttaaagtaagttattgcacttacatcttttttgggagaggaggaacacggatgggaaggagatgtaggggcccaggcatggggcaaaatggagtgcagaggtagccgggcactcccagaacaccctttgctggcccagcccaaactgtttggttgttgttatttgcaataaactccttctccttcctcc

SEQ ID NO: 210160 - DNA, 1236 bp, Artificial Sequence
  derived and/or modified sequence
atgaacgccgagacctgcgtgagctactgcgagagccccgccgccgcaatggatgcctattactctcccgtaagccagagccgtgagggcagctcacctttccgcgcttttcccggtggggataagttcggtaccacgttcctctctgctgccgccaaagctcagggtttcggtgatgccaagtctcgcgcaaggtacggcgcagggcagcaggatctcgctactcctttagagagcggggccggtgcccgaggcagcttcaacaagttccagccgcagccctcaaccccccaaccgcagcctccccctcagccccagccccagcagcagcagcctcagccacagccacctgctcagcctcatctctacctgcagcgtggcgcgtgtaagactccccctgacgggtcactcaagctccaggaaggatcttccgggcactcagcagcactacaagtgccgtgctatgctaaagagagctcattgggagagccagaactgcctccagactcagataccgtcggtatggacagctcatatctctctgtaaaggaagccggagtcaagggcccccaggacagggcctcctctgaccttccgagccccctcgagaaggccgattctgagagcaataagggaaagaaacgtcgcaacaggacaacattcaccagttatcagctggaggagctggagaaagtattccagaaaactcactacccagacgtttacgccagagagcagttggccatgcggaccgatctcacagaggctcgcgtccaggtttggtttcagaacagaagagctaaatggcggaagcgggaaagattcggtcagatgcagcaggtccggacccacttttccacagcctacgagctccctttgctgaccagagctgagaactatgctcagatccagaacccatcctggcttgggaacaacggcgccgcctcccccgttcccgcctgcgtcgtgccttgtgatcccgtccccgcatgtatgtctccccatgctcatccaccagggtccggggcttcttccgtcacagattttctgtctgtgtctggggctgggtcccatgttggccaaacgcatatggggagcctctttggagccgcttcgctttcgcccgggcttaacggatatgaactgaacggcgaaccagatagaaagacctcctctatagccgctttgagaatgaaagctaaagagcacagcgctgcaattagctgggcaacctag

SEQ ID NO: 210161 - DNA, 1236 bp, Artificial Sequence
  derived and/or modified sequence
atgaatgctgagacttgcgtgtcctactgtgagagcccagctgccgctatggatgcctactacagcccagtgagccagagtagggagggttccagtccattcagggccttcccaggcggagataaattcggcaccaccttcctgtctgcggctgcgaaagctcagggatttggagatgccaagagccgagctcggtacggcgcagggcagcaagacctagctacacctctggagtctggcgcaggggctaggggtagcttcaataaattccagcctcagccgtcaaccccacaaccgcagcctccaccacagccacaaccacagcagcaacagcctcagccacaaccaccggcacaaccccatttgtacctgcagcgcggagcctgtaaaacgccccctgacggctcactgaagctacaggaaggatcatccgggcactccgcggcactacaggttccttgctatgctaaagagtcttccctgggcgaacctgagcttcctcccgattccgatacagtgggcatggattctagttatctctctgtaaaggaggctggtgtgaaggggccacaggacagggccagcagcgatttgcccagcccactcgagaaggccgattcggaaagcaacaaaggaaagaaacgcagaaatcgtacgactttcacgagctaccaattggaagaattggagaaagtcttccagaaaacccactatccggacgtttacgcacgagagcagctcgcgatgcggaccgatctgactgaggctagggtgcaggtgtggttccagaatagaagagcaaagtggcggaaaagggaaaggtttggccaaatgcagcaggttcggacgcactttagcacagcatatgaactccctttactgacccgggctgagaattatgcgcagattcagaacccttcttggctgggcaacaacggcgcagcctcccctgtgccagcttgcgtggtgccctgtgaccccgtgcccgcttgcatgtccccccacgcacaccctccaggatctggagcttccagtgttactgacttcttgtcagtgtcaggggctggctcacacgtagggcagacccacatgggatctctcttcggagctgctagcctgtctccaggacttaatggatacgaactgaacggcgaaccagaccgcaagacaagttcaatcgccgcactgcgcatgaaagccaaagaacacagtgcggctatctcttgggcaacgtag

SEQ ID NO: 210162 - DNA, 1236 bp, Artificial Sequence
  derived and/or modified sequence
atgaacgccgagacctgcgtgagctactgcgagagccccgccgccgccatggacgcctactacagccccgtgagccagagcagagagggcagcagccccttcagagccttccccggcggcgacaagttcggcaccaccttcctgagcgccgccgccaaggcccagggcttcggcgacgccaagagcagagccagatacggcgccggccagcaggacctggccacccccctggagagcggcgccggcgccagaggcagcttcaacaagttccagccccagcccagcaccccccagccccagccccccccccagccccagccccagcagcagcagccccagccccagccccccgcccagccccacctgtacctgcagagaggcgcctgcaagaccccccccgacggcagcctgaagctgcaggagggcagcagcggccacagcgccgccctgcaggtgccctgctacgccaaggagagcagcctgggcgagcccgagctgccccccgacagcgacaccgtgggcatggacagcagctacctgagcgtgaaggaggccggcgtgaagggcccccaggacagagccagcagcgacctgcccagccccctggagaaggccgacagcgagagcaacaagggcaagaagagaagaaacagaaccaccttcaccagctaccagctggaggagctggagaaggtgttccagaagacccactaccccgacgtgtacgccagagagcagctggccatgagaaccgacctgaccgaggccagagtgcaggtgtggttccagaacagaagagccaagtggagaaagagagagagattcggccagatgcagcaggtgagaacccacttcagcaccgcctacgagctgcccctgctgaccagagccgagaactacgcccagatccagaaccccagctggctgggcaacaacggcgccgccagccccgtgcccgcctgcgtggtgccctgcgaccccgtgcccgcctgcatgagcccccacgcccacccccccggcagcggcgccagcagcgtgaccgacttcctgagcgtgagcggcgccggcagccacgtgggccagacccacatgggcagcctgttcggcgccgccagcctgagccccggcctgaacggctacgagctgaacggcgagcccgacagaaagaccagcagcatcgccgccctgagaatgaaggccaaggagcacagcgccgccatcagctgggccacctag

SEQ ID NO: 210163 - protein, 180 aa, Artificial Sequence
  derived and/or modified sequence
MNTVLSRANSLFAFSLSVMAALTFGCFITTAFKDRSVPVRLHVSRIMLKNVEDFTGPRERSDLGFITFDITADLENIFDWNVKQLFLYLSAEYSTKNNALNQVVLWDKIVLRGDNPKLLLKDMKTKYFFFDDGNGLKGNRNVTLTLSWNVVPNAGILPLVTGSGHVSVPFPDTYEITKSY

SEQ ID NO: 210164 - DNA, 543 bp, Artificial Sequence
  derived and/or modified sequence
atgaacaccgtgctgagcagagccaacagcctgttcgccttcagcctgagcgtgatggccgccctgaccttcggctgcttcatcaccaccgccttcaaggacagaagcgtgcccgtgagactgcacgtgagcagaatcatgctgaagaacgtggaggacttcaccggccccagagagagaagcgacctgggcttcatcaccttcgacatcaccgccgacctggagaacatcttcgactggaacgtgaagcagctgttcctgtacctgagcgccgagtacagcaccaagaacaacgccctgaaccaggtggtgctgtgggacaagatcgtgctgagaggcgacaaccccaagctgctgctgaaggacatgaagaccaagtacttcttcttcgacgacggcaacggcctgaagggcaacagaaacgtgaccctgaccctgagctggaacgtggtgcccaacgccggcatcctgcccctggtgaccggcagcggccacgtgagcgtgcccttccccgacacctacgagatcaccaagagctactag

SEQ ID NO: 210165 - DNA, 543 bp, Artificial Sequence
  derived and/or modified sequence
atgaataccgtactttcaagagccaacagtttgtttgctttctctctgtcagtgatggccgcgctaaccttcgggtgctttatcacaacagcattcaaggatcgttccgttcccgtgaggctgcacgtgtcccgcattatgttgaagaacgttgaagacttcaccggccctagggaacgctccgatttaggatttattacattcgatattaccgccgatctcgaaaacatcttcgattggaacgtaaagcagctctttttatacctctcggctgaatattctacaaagaacaacgccctgaaccaagtggtcctatgggacaagatcgtcttgcggggtgacaatcctaagctccttctgaaagatatgaaaaccaagtacttcttcttcgatgatggaaacggactgaaagggaatcgaaacgtgacgctgaccctgtcttggaatgtggttcctaatgccggcatccttccgctggtgaccgggtccggtcacgttagcgtgcccttcccagacacttatgagatcaccaagtcatactag

SEQ ID NO: 210166 - DNA, 543 bp, Artificial Sequence
  derived and/or modified sequence
atgaacacagtgctgagccgggccaacagcctgtttgccttcagcctgtctgtgatggccgccctgaccttcggctgcttcatcaccacagccttcaaggacagatctgtgcctgtgcggctgcacgtgagccgcatcatgctgaagaatgtggaggacttcaccggcccccgggagaggagtgacctgggcttcatcacctttgacatcacagctgacctggagaacatctttgactggaatgtgaagcagctgttcctgtacctgtctgctgagtacagcaccaagaacaatgccctgaaccaggtggtgctgtgggacaagatcgtgctgcggggggacaaccccaagctgctgctgaaggacatgaagaccaagtacttcttctttgatgatggaaatggcctgaagggcaacagaaatgtgaccctgaccctgtcctggaatgtggtgcccaatgccggcatcctgcccctggtgactggaagtggccacgtgtctgtgcccttcccagacacctatgagatcaccaagagctactag

SEQ ID NO: 210167 - DNA, 543 bp, Artificial Sequence
  derived and/or modified sequence
atgaacaccgtgctgagccgggccaacagcctgttcgccttcagcctgtcggtcatggcggccctcacattcggatgcttcatcaccaccgctttcaaagaccggagcgtgccagttaggcttcacgtctcaaggatcatgctcaagaacgtggaggatttcactggccccagagaaaggtcggaccttggctttatcacatttgatatcacagccgacctggagaacatatttgattggaatgttaagcagctgtttctgtacttatcggctgaatacagcacaaaaaataacgccctaaatcaagtggtgctctgggacaagatcgttctaaggggcgataacccgaaactcctgctgaaggacatgaaaacaaagtactttttcttcgacgatggaaacgggcttaaggggaaccgcaatgtaaccctgaccctctcttggaacgtcgtgcctaacgccggcattttgcctctggtgacaggcagcggtcatgtcagcgtgccctttccagatacctacgaaatcacaaagtcctactag

SEQ ID NO: 210168 - DNA, 543 bp, Artificial Sequence
  derived and/or modified sequence
atgaacacagtattaagccgagcaaacagcctgttcgccttctcactctccgttatggcagccttgactttcggatgtttcataactaccgccttcaaggatagaagcgtgcccgtcaggctgcatgttagccggattatgctgaagaatgttgaagacttcacaggtccaagggagcggagcgatctcggattcatcactttcgatataacagccgacctggagaacattttcgactggaatgtaaagcagttatttctgtacctaagcgctgagtatagcacgaagaacaacgctctcaatcaggttgtgctctgggacaaaatcgtgctgagaggtgataacccaaaacttctactgaaagatatgaaaaccaagtacttcttctttgatgatggcaacggcctgaaaggcaaccgcaatgtgacattgaccttatcatggaatgtggttcccaatgccggaattctcccccttgtaacgggaagcggacatgtgtcagtgccttttccagatacctatgagatcaccaaaagttattag

SEQ ID NO: 210169 - DNA, 4571 bp, Artificial Sequence
  derived and/or modified sequence
gcgctcccggaacgcgcgcaccgcagacggcgcggatcgcagggagccggtccgccgccggaacgggagcctgggtgtgcgtgtggagtccggactcgtgggagacgatcgcgatgaacacggtgctgtcgcgggcgaactcactgttcgccttctcgctgagcgtgatggcggcgctcaccttcggctgcttcatcaccaccgccttcaaagacaggagcgtcccggtgcggctgcacgtctcgcggatcatgctaaaaaatgtagaagatttcactggacctagagaaagaagtgatctgggatttatcacatttgatataactgctgatctagagaatatatttgattggaatgttaagcagttgtttctttatttatcagcagaatattcaacaaaaaataatgctctgaaccaagttgtcctatgggacaagattgttttgagaggtgataatccgaagctgctgctgaaagatatgaaaacaaaatattttttctttgacgatggaaatggtctcaagggaaacaggaatgtcactttgaccctgtcttggaacgtcgtaccaaatgctggaattctacctcttgtgacaggatcaggacacgtatctgtcccatttccagatacatatgaaataacgaagagttattaaattattctgaatttgaaacaacatatttttatacttaatgaattgtatctcattaatctcttcccttacatcttcatgtattgttggtttgttttttggttttgggtttttttttttttttttttggtataagaactaacatcaaaaggcctgtttaaagggaaaggttaatgggctacttaatattatgaacaaaacaaaaaaacaaggctgccacagtggaatattatcttacaagaataagaactacataaaacagatttgtaaaaaatacatatttgaagtattccctgtatttccattattctttatggaatataaagtaagcatgaaaggtagttaaaactttcaggtgcctgtagagtcataataactgtattttatgccttgcattcacgcaaattcacattggatgtgatttaaaagtagacattctctttttcctcttttaggatatgtttgattactggaaaattaatatggttatttgttagaagtctggtttataaaaaagccaaaagtgatggaatttattccatttgtcttaggaaggcccataatacttgtttttcttacatgtgactagcaactttctccacttaaagactaaatacctctttatatgatgtaaattattctaattcattttaaaatcttttaggtcagcaaaatgtgtgtcttcagtgctttctctaaaaacgttcctttatagctttgtacttttttttttagcgttgccattgaaagttaaaatgtttgcatggtttaccctctgagttatgtttcttctagtgagcatgcctgctgtcactaagtgaattatttactactttttgtaggtctatattttaataattattgggataataataattgtggtatgctttccatttacaaaccactcatatactttagtgtatgtcatcctcaataatctaatgaggtaagtagtataagtgttagctctttgcagataagaaactgaaacccagaagtttattgaattgcttcattgttacctagccagcaaggagtggaattaaaacttgaactcagatcttctaattttctgagctcatcctttctcttatacctcagattgcagactaatcaaattttacttaaaaccttcctgatatttttgttaccctggacaccctttctattctagaaaaggtttcccattttatatggaagtgactaattttcaagctgccaacaacttatatcgaggtaatattttattctctgaataaattcatttcacttatattaaaagcataaggaaatctacatgtatgtaaaaataacttagaaattcagtacataatacatgattgaatacatgatcgtatttaacatgttttttttttctgcagtggacaaataaacatcctcaaagtagcaactgcaaatcagttacccttagaaaagcaagaccaaacactgtagttacactattagcagtgaccaaaaagggctaatattttctaagaatagtttaaattacagacatttgttatatttaccttatgtgaaatacatcactatttaattacattaattttaacatctgttgtgtggagttgtatagttcatgcaaaagcctgtgggtatgggtttttcaaaccagcagaaaggtcaaaggtacctgaatgctaaactgcctggctcccagctttttcattaaacttttcagggtcttggtttctttatctgtaaaatgacagagttggaccagttaactttaatggccatccttttacaccacacaagttgataaaatttatctgttcagcaaagagattgaacaaaaaagcacgttagtaatatgaagacaggaaaacgaatgaaagtctaacacataactcatattgatttactttatttctgttagattttacactctgaaaatttcacctcatttagtttgtacaaatactagacatggaaacttaaaatgtgcaggtgtcaaagcttaaaaatcaggtgtgtcctctttaaaggcatgtgcgataagcctgcagtcttaaccagacctggtaccagtttaacagttcatgatacttctgtgatgagtggatctgttagtctggtagagattaatgttgaaatttacttgaattacagttatttgacaagcccactttttttggagtttggtgaggaagataagtaaaaatgcccaactagtacaatgtggagaaagttttctgtttgcttgactaagggaaattgctcagaaaaagaatgctccaacatgggaataaggaccttcagtctcaggaactcatttttgggtgcagtttctacatttaaaaaattgacttgtgttcagtttgataaccagttcatttgctttagtctcagtgttttaaagaagtctcataatgttctacaaagacacaaagcttcaggcttatacaaaactgagtatgattagaaatacctgagcccagaaatgattctgagaaaagagaataatttgaagacacttatttaaaagtaattatggttagaaatgaattaatttaaaaatgtgttcacatatccctttctctaacagtttaacctagacaaacatctgtatcagtatttttttattcccctgattgattacatttggtttctttattctgaaaggaaaataacaaaaacttcagaaattcctaagggtgtaataagaaagtgggttttgagtttcctttcctggaattattttacagttctttggtgggtctcgtcagccaattcatagctgggctttaagattatcatcttagagatgatagatgggctttttaaagatttcatcttagagatgaaaagctgggctttttctctaagatgataatcttaaagcccagctattaattgataatgaacatttttcactatttttttttctatctgaagcttagagatctagagctttggatctttcgggtatatgtcaatggaggtattattttataatactttgcattgacatgaagtgggttcatgggggaaaaccatgagctgtgaacattggtagcaaacaagcatatattcatttcaaaactttccttgcttttagcagagagaagcctgtatatgttacatgtgtgactttcagtagtttaaagagatgtttcaaaaaattgttgcatgtttttgatgcaatttgggaaattgtttacttcacaatgtagtcattcataaaaaaattcatgaaaatactgaacatatgtttgaggatttttcttttcctttttaaatttttttattttttctgagacggagatctgctcttacgcccaggctagagtgaagtggcgcgatcttggcttactgcaacctccaccccccaggttcaagcgattctcctgcctcagcctccggagtagctgggattacaggcgcccgccaccacgtccggctaatttttgtattttcagtagagacggggttttgctatgttggccaggctggtctcaaactcctgacctcaagtgatccacctgcctcggcctcccaaagtgttaggataacaggtgtgagccaccgtgcccggctgaagatttttcttaattgcaataaatattcagcattttttctaatgaaaatgaattttgtttaccagtaaaagtatgcattttaaaagactttcagatttatgctttttacgtgaagctgctaaactaaaagtaaatggaagaaaccaagtctagtaggttttttctttttttttgtgggggtgggatgggggaggttagttacacttaaaatatcttctccagagactgtatgctcctatactagactgtaagctctttgagggcagtctgtcagatttatctttgtatcttccccagcgcctagtgtagtgccttgcacataataggcgcccaataaatattgatgaagaatgaa

SEQ ID NO: 210170 - protein, 792 aa, Artificial Sequence
  derived and/or modified sequence
MLPAGEIGASPAAPCCSESGDERKNLEEKSDINVTVLIGSKQVSEGTDNGDLPSYVSAFIEKEVGNDLKSLKKLDKLIEQRTVSKMQLEEQVLTISSEIPKRIRSALKNAEESKQFLNQFLEQETHLFSAINSHLLTAQPWMDDLGTMISQIEEIERHLAYLKWISQIEELSDNIQQYLMTNNVPEAASTLVSMAELDIKLQESSCTHLLGFMRATVKFWHKILKDKLTSDFEEILAQLHWPFIAPPQSQTVGLSRPASAPEIYSYLETLFCQLLKLQTSDELLTEPKQLPEKYSLPASPSVILPIQVMLTPLQKRFRYHFRGNRQTNVLSKPEWYLAQVLMWIGNHTEFLDEKIQPILDKVGSLVNARLEFSRGLMMLVLEKLATDIPCLLYDDNLFCHLVDEVLLFERELHSVHGYPGTFASCMHILSEETCFQRWLTVERKFALQKMDSMLSSEAAWVSQYKDITDVDEMKVPDCAETFMTLLLVITDRYKNLPTASRKLQFLELQKDLVDDFRIRLTQVMKEETRASLGFRYCAILNAVNYISTVLADWADNVFFLQLQQAALEVFAENNTLSKLQLGQLASMESSVFDDMINLLERLKHDMLTRQVDHVFREVKDAAKLYKKERWLSLPSQSEQAVMSLSSSACPLLLTLRDHLLQLEQQLCFSLFKIFWQMLVEKLDVYIYQEIILANHFNEGGAAQLQFDMTRNLFPLFSHYCKRPENYFKHIKEACIVLNLNVGSALLLKDVLQSASGQLPATAALNEVGIYKLAQQDVEILLNLRTNWPNTGK

SEQ ID NO: 210171 - DNA, 2379 bp, Artificial Sequence
  derived and/or modified sequence
atgttaccagccggcgaaatcggagcctccccagccgccccatgttgcagcgagtcgggagatgaaaggaagaacttggaagagaagtcggatatcaatgtaacagtcttaattggaagtaaacaagtctcagaagggacagataacggcgatctgccgtcctacgtcagcgctttcatcgagaaagaagttggaaatgaccttaagtctctcaagaaactggataaactcatagagcagcgtacagtctcaaagatgcagctcgaggagcaagttttaacaatctcgagtgagatcccgaaacgaatcagatcagcccttaagaatgccgaagaaagtaaacaattcctgaaccagtttctggagcaggagacacacctgttctctgcgatcaattcacatctgctgactgctcagccctggatggacgatttaggtactatgatctcccagatcgaggaaattgaaagacacctggcatacctcaagtggataagtcagattgaagagctgtccgataatatccagcagtaccttatgacaaacaatgtgccggaagcggcctctactttggttagcatggctgagctagacattaaactgcaagagtcatcttgtactcacctgctgggcttcatgagggcaaccgtaaaattctggcataaaatcctgaaggataaacttactagcgactttgaagagatcctggctcagctccactggccatttattgctccacctcaatctcagacagttggcctaagccgaccagcgtcagctccagagatatattcctatctcgagactctgttttgtcaactcctgaagctgcaaacaagtgacgaactgctgaccgaacctaagcagttgcctgagaaatactctctgcctgcttcacctagtgtgattctcccaatccaggtgatgctcaccccgctccagaagagatttcgctaccactttcggggtaacagacagaccaatgtcttgtcgaaacccgagtggtatctggcccaggtcctcatgtggataggtaaccacaccgagttcctcgacgagaaaatacagcccatccttgataaggttgggtccctggtcaatgccagacttgaattctctagggggctgatgatgctggttcttgagaagctggccacagacatcccctgtttgctgtacgacgataacctgttctgccatctggtggatgaagtgcttctgtttgagagggagctgcactctgtgcatgggtatccaggaaccttcgcctcctgcatgcatatactgtccgaggagacatgcttccagaggtggcttaccgttgaaagaaagttcgcgcttcagaaaatggattctatgctgtcgagtgaggcggcttgggtcagtcagtataaggatataaccgacgttgacgagatgaaagtaccagactgcgcggaaaccttcatgaccctcctgctcgtaatcacagatagatacaaaaatttacctacagcatcacgaaaactgcagtttcttgaattgcagaaagatctggtggatgatttccgaattcgtctcactcaggttatgaaggaggaaactagggctagcctaggattcagatattgtgcaattcttaacgcagttaattacatctcgactgtactggctgactgggcagacaatgtgttttttctgcagctgcagcaagctgcactggaagtgttcgccgaaaataacactctttccaaactccagctgggccagctcgcaagcatggaaagctccgtttttgatgatatgatcaatctgctggaacggctgaaacatgatatgctaacgaggcaggtagaccatgtattccgcgaggtcaaagacgccgccaagctgtacaaaaaagaaagatggctgtcactgccctcacaatccgagcaggccgtgatgtcattgtcgagcagtgcttgtcctcttctgctgactctgagggaccacctgctgcagctcgaacagcagctgtgcttctcactcttcaaaatcttttggcaaatgctggtggaaaaattggatgtgtacatctatcaagaaatcatactggctaaccacttcaacgaagggggggcagcacagctccagtttgatatgaccagaaatctgttcccgctttttagccattactgcaagcgtccagagaactacttcaagcatattaaggaggcctgcatcgtcctaaatctgaatgtcggttcggccctgctcctgaaagatgtcttacagtccgcaagtggtcagctgccagccactgcagccctgaatgaggtcggcatctacaaactggcccagcaggatgtggagatcttgctgaatcttagaaccaattggcctaacaccggtaaatag

SEQ ID NO: 210172 - DNA, 2379 bp, Artificial Sequence
  derived and/or modified sequence
atgctgcctgctggggagattggagccagccctgctgccccctgctgcagcgagagcggagatgagaggaagaacctggaggagaagagtgacatcaacgtgacagtgctgattggcagcaagcaggtgtctgagggcacagacaatggagacctgcccagctatgtgtctgccttcatcgagaaggaggtgggcaatgacctgaagagcctgaagaagctggacaagctgattgagcagaggacagtgtccaagatgcagctggaggagcaggtgctgaccatcagcagcgagatccccaagaggatccgcagcgccctgaagaatgctgaggagagcaagcagttcctgaaccagttcctggagcaggagacccacctgttcagcgccatcaacagccacctgctgacagcccagccctggatggatgacctgggcaccatgatcagccagatcgaggagattgagcggcacctggcctacctgaagtggatcagccagatcgaggagctgagtgacaacatccagcagtacctgatgaccaacaacgtgcctgaggccgccagcaccctggtgtccatggccgagctggacatcaagctgcaggagagcagctgcacccacctgctgggcttcatgagggccaccgtgaagttctggcacaagatcctgaaggacaagctgaccagtgactttgaggagatcctggcccagctgcactggcccttcatcgccccaccccagagccagacagtgggcctgagcaggcctgccagcgcccctgagatctacagctacctggagaccctcttctgccagctgctgaagctgcagaccagtgatgagctgctgacagagcccaagcagctgcctgagaagtacagcctgcctgccagccccagcgtcatcctgcccatccaggtgatgctgacccccctgcagaagcgcttccgctaccacttccggggcaaccggcagaccaacgtgctgagcaagccagagtggtacctggcccaggtgctgatgtggattggcaaccacacagagttcctggatgagaagatccagcccatcctggacaaggtgggcagcctggtgaatgcccggctggagttcagccggggcctgatgatgctggtgctggagaagctggccacagacatcccctgcctgctgtatgatgacaacctcttctgccacctggtggatgaggtgctgctgtttgagcgggagctgcacagcgtgcacggctacccaggcacctttgccagctgcatgcacatcctgtctgaggagacctgcttccagcgctggctgactgtggagaggaagtttgccctgcagaagatggacagcatgctgagcagcgaggccgcctgggtgtcccagtacaaggacatcacagatgtggatgagatgaaggtgcctgactgtgccgagaccttcatgaccctgctgctggtgatcacagaccgctacaagaacctgcccacagccagcaggaagctgcagttcctggagctgcagaaggacctggtggatgacttccgcatccggctgacccaggtgatgaaggaggagacccgggccagcctgggcttccgctactgtgccatcctgaatgctgtgaactacatcagcacagtgctggccgactgggccgacaacgtgttcttcctgcagctgcagcaggccgccctggaggtgtttgctgagaacaacaccctgagcaagctgcagctgggccagctggcctccatggagagctctgtgtttgatgacatgatcaacctgctggagcggctgaagcatgacatgctgacccggcaggtggaccacgtgttccgggaggtgaaggatgctgccaagctgtacaagaaggagcgctggctgagcctgcccagccagagcgagcaggccgtgatgagcctgagcagcagcgcctgccccctgctgctgaccctgcgggaccacctgctgcagctggagcagcagctgtgcttcagcctcttcaagatcttctggcagatgctggtggagaagctggatgtgtacatctaccaggagatcatcctggccaaccacttcaatgaaggaggagctgcccagctgcagtttgacatgaccaggaacctcttccccctcttcagccactactgcaagaggcctgagaactacttcaagcacatcaaggaggcctgcatcgtgctgaacctgaatgtgggcagcgccctgctgctgaaggatgtgctgcagagcgccagcggccagctgcctgccacagctgccctgaatgaggtgggcatctacaagctggcccagcaggatgtggagatcctgctgaacctgcggaccaactggcccaacacaggcaagtag

SEQ ID NO: 210173 - DNA, 2379 bp, Artificial Sequence
  derived and/or modified sequence
atgctgcccgccggcgagatcggcgccagccccgccgccccctgctgttcagaaagtggcgacgagaggaagaacctggaggaaaagagcgatataaacgtgacagtgctcattggctcaaaacaggtgagtgagggtactgacaatggggatcttccctcttacgtgtccgcattcattgaaaaggaagtggggaacgacctgaaatccctgaaaaaactggacaagctgatagaacagagaacagtgtccaagatgcagctggaggaacaggttttaactatttcgtcagagatccccaagagaatccgctccgctctcaaaaacgccgaagaatccaagcagttcctcaaccagtttttggagcaggaaactcaccttttctctgccatcaactctcatctccttaccgcccagccctggatggacgatcttggaacaatgatatcccagatagaagagatcgaacggcatctagcgtatctcaagtggatctctcaaatagaggagctttccgacaatatacaacaatacctgatgaccaacaacgtacccgaagctgcttcaacacttgtctcgatggccgaacttgacatcaagttacaggaatcgtcatgtacccacttactcgggtttatgcgcgctacggttaaattttggcataagattttaaaggacaagctcacttcagatttcgaagaaatcttagcccagttgcactggccattcatcgctcccccccagagtcagacggtgggtttgtcaaggcctgcctccgcaccggaaatttactcttacctggagacattgttctgccagcttctaaagttacagacatcagatgagcttttgactgaacctaagcagctcccagagaagtattctctcccggccagcccttccgtaatcttgccaatacaagttatgttgactcctctgcaaaagcgttttagatatcatttccggggcaatcgacagaccaatgttctgagcaaacctgaatggtacctcgcccaagtactgatgtggatcggcaaccacaccgagttcctggatgagaaaattcagcccattttggataaggtgggctcactggttaatgctaggctagagttcagccggggcctgatgatgctggtcctcgagaagcttgccactgacatcccttgcctgctgtacgatgacaatttgttctgtcacttggtagatgaggtgctcctgtttgagagggagctgcattccgttcatggctacccggggaccttcgcatcttgtatgcatattctcagtgaggagacatgcttccagagatggctgacggtcgaaaggaaattcgctctgcaaaaaatggacagcatgctgagtagtgaggccgcttgggtgtcccagtataaggatatcactgacgtcgacgagatgaaagtgcccgattgtgctgagaccttcatgactctgctcctggtaatcactgatcggtataagaatctccccacagcctctcgaaagttgcagttcctcgagttgcagaaagacctagtggacgatttcaggatcagactcacccaggtcatgaaagaggaaacccgagcctctctaggatttcggtactgcgctattctgaatgccgtcaattacatctccacagtgctcgccgactgggctgataacgtgttctttctgcagttacagcaggctgccctggaggttttcgccgagaataatacattatccaagctacaacttggccaactggcctcaatggagagttccgtgttcgacgatatgatcaatctgttagagaggctgaaacacgacatgttgacccgccaggtagatcatgtgttccgcgaagttaaagacgccgcaaagctgtacaagaaggaacgatggctcagtttgccatctcagtctgagcaggctgtgatgagtctgtcctcctccgcttgccctttgctcctaactctgcgggatcatctgctccagttggaacagcagctttgctttagcctgttcaaaatcttctggcagatgctggtcgaaaagctggacgtgtacatctaccaagagatcatcctcgctaaccactttaatgaaggaggggccgcccagctgcagttcgatatgacaaggaatctgtttccactgttctcccattattgtaaacgccccgaaaactacttcaaacatataaaagaagcttgtatcgtactcaacctcaatgtagggtccgctttactgctgaaggatgttcttcagagtgctagcggccaactgcctgcgactgccgctttgaacgaggtggggatctataaactagctcagcaggatgtggagatcttgctgaacctgcgcacaaattggcccaacacaggcaaatag

SEQ ID NO: 210174 - DNA, 2379 bp, Artificial Sequence
  derived and/or modified sequence
atgctgcccgctggcgaaatcggggctagccctgccgctccctgttgttctgagagtggtgacgaacgaaagaacctggaagaaaagagcgacattaatgtgaccgtcctgattggttctaaacaggtgtcggagggcactgataacggagacttgccatcatacgtttccgcatttatcgagaaagaggtgggcaacgacctgaaatccctgaaaaagctagacaagctgatcgaacagcgcaccgtatccaagatgcagttggaggagcaggtactgaccatctcaagtgagatccctaaacgaatccggagcgcccttaaaaacgccgaggaatccaagcaatttctgaaccagttcctcgaacaggaaactcatctgttcagtgcgatcaactcacatcttttgacagcacagccctggatggatgatctcgggacaatgatttcacagatcgaagagattgagaggcatttagcgtacctgaaatggataagtcaaatcgaagagctcagcgacaacatccagcaatacctgatgacgaataacgtccctgaggcagcctcaaccctagtgtcaatggcagagctcgacatcaagttacaggaaagttcatgtacacacctacttggattcatgagagcaactgtgaaattctggcacaaaatactcaaggataaattgacttcagattttgaagaaatcctagcccagctccactggccatttattgcccctccacagagtcagaccgtggggctgtccagacccgcaagcgcccctgagatctactcatatttggaaactctcttctgtcagttgctaaaactccagacaagtgatgaactgttgaccgagcctaagcagctccccgagaagtatagcctccccgctagcccaagcgtgattttgccaattcaggtaatgttgacacctctccaaaaacgatttcggtaccattttcggggaaacagacagactaatgttttaagtaaacccgagtggtatctggctcaggtgctcatgtggatcggaaaccataccgaatttcttgacgagaagatccagcccattctcgacaaggtggggtcccttgtcaatgcacgcctggagttctcacgcggactgatgatgctcgtgttggagaagctagctactgacattccatgccttctctacgacgacaatcttttctgtcacctcgtggacgaggtgttgttattcgaaagagaacttcatagcgttcacggttatccaggcactttcgcatcttgtatgcacattctgtccgaggagacatgcttccaacggtggctaacagttgagcgcaagtttgctctgcagaagatggattccatgctgtcctcggaggctgcatgggtgtctcagtacaaggacattaccgacgtggacgagatgaaggtgcctgactgtgcggaaacattcatgactctactgcttgtcatcactgacagatataagaacctgcccaccgccagtaggaagttacagtttcttgaattacagaaggacctggtggatgattttcggattcgcctgacccaagtgatgaaggaggagacaagggcgagcttgggattccggtactgcgccatacttaacgcagtcaattatatctccaccgtcctggctgactgggccgataacgtcttctttctgcaacttcagcaggccgcattagaagtgtttgcagagaataataccttgagcaaactgcagcttggtcagttagcatcgatggagagctccgtttttgatgatatgattaacctgctggaacgcctgaaacacgatatgctgacacggcaggtggaccacgtcttccgcgaggtcaaggatgccgctaagctatacaagaaggagaggtggttaagcttgccttcacagagcgagcaggccgtgatgtcccttagcagttctgcctgccctttactgctgaccctccgcgaccatcttctgcaattagaacagcagctgtgtttcagcctgttcaaaatattttggcagatgctggtggagaagcttgacgtctacatctaccaggagatcatcttagcaaatcatttcaatgaaggaggggcagcgcagttgcaatttgatatgacccgcaacttgttccccctcttcagccactattgcaagcggccagagaattactttaagcacatcaaagaggcctgcattgtgctcaacctcaatgtagggtcggctctgctactgaaagacgtgttacagtctgctagtggccagctgcctgccacagcggctctgaacgaggttgggatttacaagctggcgcagcaggacgtggaaatcttgttgaacttaagaacaaattggccaaacacaggcaagtag

SEQ ID NO: 210175 - DNA, 2976 bp, Artificial Sequence
  derived and/or modified sequence
ggccgttccgacctccggtcaggagggggaggaacagagcacggccggcggctgcacgggcagggcctctctgggctgagaggaagaaaccagtgagacatcgagaggaagtcgctgtggcactcagtcctacggcctccgaggctgggtagtgagtgtgtcgctggccttagccagactccacaggccacgctggctgcgaatggagccgaggactcgcgcggaggcgagatgctaccagccggcgagatcggcgcctctcctgcagccccgtgctgctctgaaagtggtgacgaaaggaagaacctcgaggagaaaagtgacataaatgttacagttcttattggaagtaaacaagtcagtgaaggtacagataatggtgatctcccttcttatgtgtctgcattcatagaaaaggaagttggaaatgaccttaaatctttaaagaaacttgataaactcatagaacagaggacagtaagtaaaatgcagttagaagaacaggtacttacaatttcatcagaaattcctaaaagaattcgaagtgccttaaaaaatgcagaagaatcaaagcaatttcttaatcagtttctggagcaggaaactcatctcttcagcgccattaacagccatttgctgactgcgcaaccttggatggacgatcttggaaccatgattagccagattgaagagatcgaacgtcatcttgcttaccttaaatggatttcacaaattgaagaactaagtgataacattcagcaatatctgatgaccaataatgtaccggaggcagcctccactctagtgtctatggcagaacttgacattaaacttcaggaatcatcttgtactcatcttcttggtttcatgagagccacagttaaattctggcataaaattctcaaggacaagcttacaagtgattttgaggaaattttagcacagcttcattggccattcatcgcaccccctcaatcacaaactgttggcttaagtcgacctgccagtgccccggagatatacagttacctggagacactgttttgtcagcttttgaaactacaaacctcagatgaattacttactgagccaaagcaactcccagaaaaatactctcttcctgcctccccttctgtcatcctgcccatccaggttatgctgactcctcttcagaagaggttcaggtatcacttcagagggaaccggcagactaatgtgttaagcaagccagaatggtacttggctcaagtacttatgtggattggaaaccatactgaatttctggatgagaagattcagccaatattagacaaagtaggctctttggtaaacgcaaggcttgaattttctcggggccttatgatgctggttcttgagaagttagccactgatattccttgtctgctatatgatgacaatctcttctgtcatttggtggatgaagtactcttgtttgaaagggagctacacagtgttcatggctatcctggcacttttgctagttgtatgcatattctatcagaggaaacctgttttcagagatggttgacggtggagagaaaatttgctcttcaaaaaatggactcaatgctttcctcagaagctgcctgggtatcgcaatataaggatatcactgacgtggatgaaatgaaagttccagattgtgcagaaacttttatgactctactcttggttataactgacaggtataaaaatcttcccacagcttcccgaaagcttcagttcctggagttacagaaggacttagtagatgattttaggatacgattaacacaagtgatgaaagaagagactagagcttcccttggctttcgatactgtgcaattcttaatgctgtgaactacatctcaacagtactagcagattgggctgacaatgttttctttctacaacttcaacaggctgcactggaggtgtttgcagagaataatactctgagtaaattgcagctaggacagctagcctctatggagagctctgtctttgatgacatgattaacctcttagaacgtttaaagcatgatatgttgacccgtcaagtagaccacgtttttagagaagttaaagatgctgcaaaattgtataaaaaagaaagatggttgtccttgccatctcagtcagagcaggcagtgatgtccctgtccagttcggcttgcccgttgctgctgacgttacgagaccatttacttcagttggagcagcagctttgtttctccttatttaaaattttctggcaaatgcttgtagagaagctggatgtatacatctaccaagaaataattcttgctaatcacttcaatgaaggaggagcagcccagctgcagtttgatatgactcggaatcttttccctttgttttctcactattgcaagagaccagaaaattattttaaacatataaaagaagcctgtattgttttgaatttgaacgtcggttctgcactactgctgaaagatgtactgcagtcagcttcagggcagcttcctgccacagcagcattaaatgaagttggaatttacaaactggctcaacaagatgttgagattctacttaatttgaggacaaattggcctaatactggaaaataatgtctttcagaaaaaggtttctttggtttttgtttctaagaaagaggaagccaattggatttcaagttatatgatgaaattctgaattaatgaaactggaaaactttatagaattacttattatcttggatttatggtgttattaaaatgctgaccatatttccttcatcctcttgttcctaaggaaacaaaaacagaaaacgaaacaatgaaaactcaattctatttacaagtataaatgctgagtatgtctgttgaagacgagcagagatattaaattataaccaactttcaatttcctgtgctaattaagggaaattctgttgtggataatcaaacatagccaataaatttttttaaaactcc

SEQ ID NO: 210176 - DNA, 2379 bp, Artificial Sequence
  derived and/or modified sequence
atgctgcccgccggcgagatcggcgccagccccgccgccccctgctgcagcgagagcggcgacgagagaaagaacctggaggagaagagcgacatcaacgtgaccgtgctgatcggcagcaagcaggtgagcgagggcaccgacaacggcgacctgcccagctacgtgagcgccttcatcgagaaggaggtgggcaacgacctgaagagcctgaagaagctggacaagctgatcgagcagagaaccgtgagcaagatgcagctggaggagcaggtgctgaccatcagcagcgagatccccaagagaatcagaagcgccctgaagaacgccgaggagagcaagcagttcctgaaccagttcctggagcaggagacccacctgttcagcgccatcaacagccacctgctgaccgcccagccctggatggacgacctgggcaccatgatcagccagatcgaggagatcgagagacacctggcctacctgaagtggatcagccagatcgaggagctgagcgacaacatccagcagtacctgatgaccaacaacgtgcccgaggccgccagcaccctggtgagcatggccgagctggacatcaagctgcaggagagcagctgcacccacctgctgggcttcatgagagccaccgtgaagttctggcacaagatcctgaaggacaagctgaccagcgacttcgaggagatcctggcccagctgcactggcccttcatcgcccccccccagagccagaccgtgggcctgagcagacccgccagcgcccccgagatctacagctacctggagaccctgttctgccagctgctgaagctgcagaccagcgacgagctgctgaccgagcccaagcagctgcccgagaagtacagcctgcccgccagccccagcgtgatcctgcccatccaggtgatgctgacccccctgcagaagagattcagataccacttcagaggcaacagacagaccaacgtgctgagcaagcccgagtggtacctggcccaggtgctgatgtggatcggcaaccacaccgagttcctggacgagaagatccagcccatcctggacaaggtgggcagcctggtgaacgccagactggagttcagcagaggcctgatgatgctggtgctggagaagctggccaccgacatcccctgcctgctgtacgacgacaacctgttctgccacctggtggacgaggtgctgctgttcgagagagagctgcacagcgtgcacggctaccccggcaccttcgccagctgcatgcacatcctgagcgaggagacctgcttccagagatggctgaccgtggagagaaagttcgccctgcagaagatggacagcatgctgagcagcgaggccgcctgggtgagccagtacaaggacatcaccgacgtggacgagatgaaggtgcccgactgcgccgagaccttcatgaccctgctgctggtgatcaccgacagatacaagaacctgcccaccgccagcagaaagctgcagttcctggagctgcagaaggacctggtggacgacttcagaatcagactgacccaggtgatgaaggaggagaccagagccagcctgggcttcagatactgcgccatcctgaacgccgtgaactacatcagcaccgtgctggccgactgggccgacaacgtgttcttcctgcagctgcagcaggccgccctggaggtgttcgccgagaacaacaccctgagcaagctgcagctgggccagctggccagcatggagagcagcgtgttcgacgacatgatcaacctgctggagagactgaagcacgacatgctgaccagacaggtggaccacgtgttcagagaggtgaaggacgccgccaagctgtacaagaaggagagatggctgagcctgcccagccagagcgagcaggccgtgatgagcctgagcagcagcgcctgccccctgctgctgaccctgagagaccacctgctgcagctggagcagcagctgtgcttcagcctgttcaagatcttctggcagatgctggtggagaagctggacgtgtacatctaccaggagatcatcctggccaaccacttcaacgagggcggcgccgcccagctgcagttcgacatgaccagaaacctgttccccctgttcagccactactgcaagagacccgagaactacttcaagcacatcaaggaggcctgcatcgtgctgaacctgaacgtgggcagcgccctgctgctgaaggacgtgctgcagagcgccagcggccagctgcccgccaccgccgccctgaacgaggtgggcatctacaagctggcccagcaggacgtggagatcctgctgaacctgagaaccaactggcccaacaccggcaagtag

SEQ ID NO: 210177 - protein, 108 aa, Artificial Sequence
  derived and/or modified sequence
MRSLCCAPLLLLLLLPPLLLTPRAGDAAVITGACDKDSQCGGGMCCAVSIWVKSIRICTPMGKLGDSCHPLTRKVPFFGRRMHHTCPCLPGLACLRTSFNRFICLAQK

SEQ ID NO: 210178 - DNA, 327 bp, Artificial Sequence
  derived and/or modified sequence
atgcgatcactgtgctgtgctccactcttgttacttctgctgctcccgcccctgctgctgacgcccagggcaggcgatgccgccgtcataacaggcgcctgtgacaaagatagccagtgcgggggagggatgtgctgcgccgtctccatctgggtgaaatctattcggatctgcactccgatgggcaaactcggtgattcctgccaccccctgacccgtaaagtcccattctttggccgacgcatgcaccatacctgcccttgtctgcctggcctcgcttgccttcgcacttcttttaatcgttttatttgcctcgcccagaaatag

SEQ ID NO: 210179 - DNA, 327 bp, Artificial Sequence
  derived and/or modified sequence
atgaggagcctgtgctgtgcccccctgctgctgctgctgctgctgccccccctgctgctgacccccagggctggagatgctgctgtgatcactggagcctgtgacaaggacagccagtgtggcggcggcatgtgctgtgctgtgtccatctgggtgaagagcatccgcatctgcacccccatgggcaagctgggggacagctgccaccccctgaccaggaaggtgcccttcttcggccgcaggatgcaccacacctgcccctgcctgcccggcctggcctgcctgcggaccagcttcaaccgcttcatctgcctggcccagaagtag

SEQ ID NO: 210180 - DNA, 327 bp, Artificial Sequence
  derived and/or modified sequence
atgcggagcctgtgctgcgcccccctgctgctgctgctgctgctgcccccactcttattgacgccaagagctggagatgctgcagtgattacaggcgcatgcgacaaagatagccaatgtggcggaggcatgtgttgcgcagtcagcatttgggtgaagtctatcagaatttgtacaccaatgggcaagcttggtgactcctgccaccccctcactagaaaggttcccttttttgggagaagaatgcatcatacgtgtccatgtcttccaggactcgcttgtctgagaacaagcttcaacagatttatttgcctcgcccaaaagtag

SEQ ID NO: 210181 - DNA, 327 bp, Artificial Sequence
  derived and/or modified sequence
atgaggagcctgtgctgcgcaccattactgctgctgctgttactgccacccctgctgctgacgcccagagcaggcgacgcagctgtgatcacgggtgcttgcgataaggattcacagtgtggaggaggcatgtgctgtgctgtgtccatctgggtgaagtctattaggatttgtacacccatgggcaaactcggagactcatgtcacccactgacccggaaagtgccctttttcggcagacgtatgcaccatacatgcccttgtctccctgggctagcctgcctgagaacatcgttcaatagatttatctgtctagcacagaagtag

SEQ ID NO: 210182 - DNA, 1549 bp, Artificial Sequence
  derived and/or modified sequence
gccggcgtgagtcacggcggggctagcctttataacggcccggaggctcgcgggagccgccgcgcccgtccgcccgccgctccgcgctccacccagcgcacccgggccccgcgcccccaactgcctccggcggccgcccagtcccgagggcgccatgaggagcctgtgctgcgccccactcctgctcctcttgctgctgccgccgctgctgctcacgccccgcgctggggacgccgccgtgatcaccggggcttgtgacaaggactcccaatgtggtggaggcatgtgctgtgctgtcagtatctgggtcaagagcataaggatttgcacacctatgggcaaactgggagacagctgccatccactgactcgtaaagttccattttttgggcggaggatgcatcacacttgcccatgtctgccaggcttggcctgtttacggacttcatttaaccgatttatttgtttagcccaaaagtaatcgctctggagtagaaaccaaatgtgaatagccacatcttacctgtaaagtcttacttgtgattgtgccaaacaaaaaatgtgccagaaagaaatgctcttgcttcctcaactttccaagtaacatttttatctttgatttgtaaatgatttttttttttttttatcgaaagagaattttacttttggatagaaatatgaagtgtaaggcattatggaactggttcttatttccctgtttgtgttttggtttgatttggcttttttcttaaatgtcaaaaacgtacccattttcacaaaaatgaggaaaataagaatttgatattttgttagaaaaacttttttttttttttctcaccaccccaagccccatttgtgccctgccacacaaatacacctacagcttttggtcccttgcctcttccacctcaaagaatttcaaggctcttaccttactttatttttgtccatttctcttccctcctcttgcattttaaagtggagggtttgtctctttgagtttgatggcagaatcactgatgggaatccagctttttgctggcatttaaatagtgaaaagagtgtatatgtgaacttgacactccaaactcctgtcatggcacggaagctaggagtgctgctggacccttcctaaacctgtcactcaagaggacttcagctctgctgttgggctggtgtgtggacagaaggaatggaaagccaaattaatttagtccagatttctaggtttgggtttttctaaaaataaaagattacatttacttcttttactttttataaagttttttttccttagtctcctacttagagatattctagaaaatgtcacttgaagaggaagtatttattttaatctggcacaacactaattaccatttttaaagcagtattaagttgtaatttaaaccttgtttgtaactgaaaggtcgattgtaatggattgccgtttgtacctgtatcagtattgctgtgtaaaaattctgtatcagaataataacagtactgtatatcatttgatttattttaatattatatccttatttttgtc

SEQ ID NO: 210183 - DNA, 327 bp, Artificial Sequence
  derived and/or modified sequence
atgagaagcctgtgctgcgcccccctgctgctgctgctgctgctgccccccctgctgctgacccccagagccggcgacgccgccgtgatcaccggcgcctgcgacaaggacagccagtgcggcggcggcatgtgctgcgccgtgagcatctgggtgaagagcatcagaatctgcacccccatgggcaagctgggcgacagctgccaccccctgaccagaaaggtgcccttcttcggcagaagaatgcaccacacctgcccctgcctgcccggcctggcctgcctgagaaccagcttcaacagattcatctgcctggcccagaagtag

SEQ ID NO: 210184 - protein, 827 aa, Artificial Sequence
  derived and/or modified sequence
MMCLKILRISLAILAGWALCSANSELGWTRKKSLVEREHLNQVLLEGERCWLGAKVRRPRASPQHHLFGVYPSRAGNYLRPYPVGEQEIHHTGRSKPDTEGNAVSLVPPDLTENPAGLRGAVEEPAAPWVGDSPIGQSELLGDDDAYLGNQRSKESLGEAGIQKGSAMAATTTTAIFTTLNEPKPETQRRGWAKSRQRRQVWKRRAEDGQGDSGISSHFQPWPKHSLKHRVKKSPPEESNQNGGEGSYREAETFNSQVGLPILYFSGRRERLLLRPEVLAEIPREAFTVEAWVKPEGGQNNPAIIAGVFDNCSHTVSDKGWALGIRSGKDKGKRDARFFFSLCTDRVKKATILISHSRYQPGTWTHVAATYDGRHMALYVDGTQVASSLDQSGPLNSPFMASCRSLLLGGDSSEDGHYFRGHLGTLVFWSTALPQSHFQHSSQHSSGEEEATDLVLTASFEPVNTEWVPFRDEKYPRLEVLQGFEPEPEILSPLQPPLCGQTVCDNVELISQYNGYWPLRGEKVIRYQVVNICDDEGLNPIVSEEQIRLQHEALNEAFSRYNISWQLSVHQVHNSTLRHRVVLVNCEPSKIGNDHCDPECEHPLTGYDGGDCRLQGRCYSWNRRDGLCHVECNNMLNDFDDGDCCDPQVADVRKTCFDPDSPKRAYMSVKELKEALQLNSTHFLNIYFASSVREDLAGAATWPWDKDAVTHLGGIVLSPAYYGMPGHTDTMIHEVGHVLGLYHVFKGVSERESCNDPCKETVPSMETGDLCADTAPTPKSELCREPEPTSDTCGFTRFPGAPFTNYMSYTGITTVLFCFLLRIHGGL

SEQ ID NO: 210185 - DNA, 2484 bp, Artificial Sequence
  derived and/or modified sequence
atgatgtgcctgaagattttgagaatttcacttgcaattctggctggctgggccctgtgctccgccaacagcgagctgggctggacgcgcaaaaaaagcctggtagaacgcgaacatctcaatcaggtactacttgaaggtgagcgctgctggctcggagcaaaggttaggcgcccaagagcatctccccagcaccacctctttggagtgtatccttccagggctggtaactatctcaggccataccccgttggcgaacaagagattcatcacactggcagaagcaaacccgatactgaaggcaacgctgtgagcctggtgccaccggacctgacagaaaatcccgctggactgaggggagccgttgaggagccagcagcgccttgggtgggggatagccctatcggtcagtcagaactcctcggggatgatgacgcctacctgggaaatcagcgctcaaaggaatctctgggggaggcgggtatccagaagggttcagcaatggcggcaacaacaaccactgcaatttttaccactctgaatgagcccaagccagaaacacagaggcggggatgggccaaatcaagacaaaggaggcaggtgtggaaacgtcgcgctgaagacgggcaaggcgatagtgggatcagtagtcacttccagccatggccaaagcactccttgaaacatcgggtcaagaaatccccgcctgaagagagtaaccagaatgggggagagggaagttacagagaagcagaaaccttcaacagccaggtcggcctgccaatcctctatttttcgggtagacgagagaggctgttgctgagacccgaagtgctcgcggagattccgcgagaggcgttcactgtggaagcttgggtaaaacctgagggaggccagaacaaccccgctatcatcgctggagtctttgacaattgctctcatactgtgtcagataagggctgggcacttggaatcagatcaggaaaggacaagggcaagcgagacgccaggttttttttctccctctgtactgatagagttaagaaagcaaccattttaattagccatagccgatatcagcctgggacgtggacacatgtggccgcaacttacgatggtcggcacatggcgctttacgtggacggaacccaggttgcgtctagtctcgatcagagcggtccgctcaattcaccattcatggcttcctgccggtctctgctcctgggcggagactctagtgaggatgggcactacttccggggacatctgggaactcttgtattctggagcacggctctcccccagtcacatttccagcatagctctcaacattcctctggagaagaggaggccaccgacctggttctgacagcatcattcgagcccgtaaatactgaatgggtcccattcagggacgagaagtatcctcggctggaggtgctgcagggatttgaacccgagccagaaatcctgtcccccttacaaccgcctctgtgcggccaaacagtttgcgacaatgtcgaactcatctcccagtacaacgggtattggccgctgaggggtgagaaagtcatcaggtaccaggtagtgaatatatgcgacgatgaaggcctgaatcccatagtcagtgaggagcaaatacggctccagcacgaagccctgaacgaagcgttttccagatacaacattagctggcagctcagtgtgcatcaagttcacaactccaccctgagacacagggtagtgctcgtcaattgtgaacctagtaagatcggaaatgaccattgcgatcctgagtgtgagcatccgttgacaggttacgatggaggggactgccgactccaaggcaggtgttattcctggaacaggcgggatggcctctgccatgttgaatgtaataatatgcttaatgatttcgacgatggggattgttgcgatccccaggtcgccgacgtaaggaaaacatgctttgatccagattctcctaaaagggcatatatgtccgtaaaggaactcaaagaagccctccagctgaacagcacccattttctaaatatttattttgcctcgagcgtccgggaagatctcgccggagcagccacctggccatgggacaaagacgcagtgacgcacctcggtgggatcgttctgtcaccagcatactacgggatgcccggtcatacagatactatgattcacgaagttggccacgtccttggactataccacgtattcaaaggagtgtctgaacgtgaatcttgcaatgacccttgcaaggaaacagtgccctcaatggagacaggcgacctgtgcgctgatactgcacccacccctaagtcagagctgtgtcgcgagcctgagcctacaagtgacacttgtgggttcacaaggttccctggcgcaccgttcacaaattacatgtcttacacaggtatcaccaccgtattgttttgttttttgctacgaatccatggcggtctctag

SEQ ID NO: 210186 - DNA, 2484 bp, Artificial Sequence
  derived and/or modified sequence
atgatgtgcctgaaaatcctgcgtattagtcttgctattctagccggctgggcactgtgctccgccaattcggagcttgggtggaccagaaagaagagtttagtggagcgcgagcatctgaatcaggtcctgctggagggggaaagatgttggctcggcgccaaggttcgcagaccacgcgcatcgccccagcaccacctgttcggggtctacccctccagagccggaaattacctcagaccatatccagtcggagaacaagagatccaccatacgggccgatctaaaccagatacagaaggcaatgccgtgtcccttgtcccacccgatctcacagaaaatcctgccggtctgcggggcgctgtggaggagcctgcggcaccatgggtgggtgattcacctatcggccaaagcgagcttttgggcgacgacgacgcttatcttgggaaccagaggagcaaagagtcactgggagaggcgggtatccagaaaggatccgcgatggcggctactacaacaactgccatattcactaccttaaatgagccaaagccagagacacagcgccggggatgggccaaatcaagacagcggcggcaggtgtggaagagaagagctgaagacggccagggagactccggaatctcgagccactttcagccttggcccaagcatagtctgaaacaccgcgttaaaaagtcaccacctgaggaatccaatcagaacgggggtgagggatcataccgggaagccgagacatttaattcccaggtcggactgcccattctctactttagtggccgtcgtgagcgcctgcttctgcgacccgaagtgctggccgagatcccccgagaggccttcaccgttgaggcctgggtgaagcctgaaggaggacaaaacaatcccgccatcatcgctggtgtgttcgataattgttcgcacaccgttagcgacaaagggtgggctctcggaatcagaagcgggaaagacaagggcaaaagggatgcccgttttttcttcagtctttgcacagaccgggttaagaaagcgaccattttgatctcacattctagatatcaacctggtacatggacccatgtggcagccacctacgacggccgccacatggcactgtatgtcgacggtactcaggtcgcctcctctttagaccagtccggcccgctgaacagccccttcatggcgtcgtgccgctcactgctgttgggaggagatagcagcgaggatggccattacttcagggggcatctcggaactttagtgttttggtcaacggctctaccccagtcacacttccagcactcttcacagcactcgagcggcgaagaggaggctactgacctagtgctgacagcatcatttgaacccgtcaacaccgaatgggtccctttccgcgatgaaaaataccctcggttagaagtgctgcagggattcgagcccgaaccggagatcttgagcccactgcagccgccactttgtggacagacagtctgcgataatgtcgagctcatatcccaatataacggctattggcccctgagaggcgagaaagtcatcagataccaggtggtgaacatatgtgacgacgagggtctaaatcctattgtctcggaggaacagataaggctgcagcatgaggctttaaatgaggctttttcccgctataacatctcctggcagctgtcagtgcatcaggttcataacagtacgcttagacaccgcgtcgtgctcgtgaattgtgagccatccaaaatcgggaatgaccattgcgatcctgagtgtgagcatcctttgacagggtacgatggtggcgactgcaggctccagggaaggtgctactcctggaaccgccgggatggtctgtgccatgtcgagtgcaataacatgcttaacgatttcgacgatggcgattgctgcgaccctcaggtagcagatgtgcgcaaaacctgtttcgaccccgattctccgaaaagagcatatatgtctgtcaaggagctgaaggaagcactgcaattgaactcaacacattttctcaacatctacttcgcctcctccgttagagaggatctcgctggcgctgcaacctggccatgggataaagatgcggtcactcaccttggaggcattgtgctttctccagcatactacggaatgcccggacatacagatacaatgattcacgaggtaggtcatgtgctcggtctgtatcatgtattcaagggtgtctccgagagagaatcctgtaacgacccttgtaaagaaacagtcccctcgatggagactggggacctttgtgccgacaccgccccaacccctaaatcagagctctgcagagaaccagagccaacatcagacacttgcggtttcacacggttccctggggcaccattcactaattatatgtcttacaccggcatcacgaccgtgctgttttgttttttgctgcggatccacggtgggctttag

SEQ ID NO: 210187 - DNA, 2484 bp, Artificial Sequence
  derived and/or modified sequence
atgatgtgccttaaaattcttcggatttcgttagccatcctcgccggctgggctttatgtagcgcaaattccgagcttggctggacaagaaagaaatcgctagttgaacgcgagcacttgaaccaagttctgctggaaggcgaacgatgttggttaggggccaaggtccgccggcccagggcttctcctcagcaccatctatttggcgtgtatccatctagagctggaaattacctgcgcccttaccccgtcggtgaacaagagatccatcacaccggcagaagcaaacccgatacagaaggcaacgcagtgtcattagtgcctcctgatttaaccgaaaatcccgctggcctgaggggcgctgtggaagagccagctgctccatgggtaggtgatagccctataggccagagcgaattgcttggcgacgacgatgcttaccttggtaaccagaggagcaaggaaagcctgggtgaggcgggaatccagaaaggctctgcaatggcggccactacaactacagccatcttcacgactctcaacgagcctaaaccagaaacccaacgcagaggatgggcaaaaagccgtcagcgacgacaggtatggaagcgtagagctgaggacgggcagggggacagcggaatctcatcacattttcagccatggcccaaacatagcctaaaacatagagtcaagaaaagtccccctgaagagagtaatcagaatggcggcgagggatcatatcgggaagctgaaacgttcaactcccaggtgggtctcccgattctttacttttccggacgcagggagaggctcctcctaagaccagaggtgctggcagaaataccccgggaggcgttcacggtcgaggcctgggtgaaaccagaagggggacagaataaccctgcaatcatcgctggcgtattcgacaattgttcccacactgtgagtgataagggatgggccttaggaatcagatccggtaaggataagggaaagagagacgcgcgattcttcttctccttatgcactgacagagtaaagaaggccaccattcttataagccactcccgataccaacccggcacttggactcacgtggccgcaacatacgacggccggcacatggcactctatgtcgacgggacacaggtcgcttcctctcttgaccaaagcggcccactgaactccccatttatggcctcttgtcgcagtctgctcctggggggcgattcatcagaggacgggcactattttcgaggccatcttgggacccttgttttctggagtacagctctgccccaatctcatttccagcattctagccagcatagctccggggaggaggaggccaccgatcttgtgttgaccgcatcttttgaacctgtgaatactgaatgggtgccattcagagatgagaaatatccacgacttgaagtgttacaggggttcgaaccagaacccgagattttgtctccactccaacctcccctttgtgggcagaccgtgtgcgataatgtcgaacttatctctcaatacaacgggtattggccactccgaggcgagaaagtgatcaggtaccaggtagtcaacatatgcgacgatgaaggcctgaatcccatcgtttccgaagaacagatccgtctccaacacgaagctcttaacgaggcttttagtcgctataatatatcatggcaattgagtgtgcaccaagtccataactccacgctgaggcacagagtcgtgctggtgaattgtgaacctagcaagattggaaacgaccactgtgaccctgaatgtgaacatccattgactggttacgacggaggcgactgtagactccaggggcgctgttacagctggaaccgccgcgacggactttgtcacgtggagtgtaacaacatgctgaatgactttgacgacggtgattgctgcgacccccaagtggcagacgtgaggaagacttgttttgatccggattctccaaaaagagcttacatgtccgtgaaggagctgaaggaggccttgcaattaaactcaacacactttttaaacatctacttcgcttccagcgttcgagaagatctcgccggagcagccacctggccatgggataaagatgcggtcactcaccttggaggcattgtgctttctccagcatactacggaatgcccggacatacagatacaatgattcacgaggtaggtcatgtgctcggtctgtatcatgtattcaagggtgtctccgagagagaatcctgtaacgacccttgtaaagaaacagtcccctcgatggagactggggacctttgtgccgacaccgccccaacccctaaatcagagctctgcagagaaccagagccaacatcagacacttgcggtttcacacggttccctggggctccattcacaaattatatgtcttataccggaatcacaaccgtgctcttctgcttccttcttcgcatccacggcggattgtag

SEQ ID NO: 210188 - DNA, 2484 bp, Artificial Sequence
  derived and/or modified sequence
atgatgtgcctgaagatcctgagaatcagcctggccatcctggccggctgggccctgtgcagcgccaacagcgagctgggctggaccagaaagaagagcctggtggagagagagcacctgaaccaggtgctgctggagggcgagagatgctggctgggcgccaaggtgagaagacccagagccagcccccagcaccacctgttcggcgtgtaccccagcagagccggcaactacctgagaccctaccccgtgggcgagcaggagatccaccacaccggcagaagcaagcccgacaccgagggcaacgccgtgagcctggtgccccccgacctgaccgagaaccccgccggcctgagaggcgccgtggaggagcccgccgccccctgggtgggcgacagccccatcggccagagcgagctgctgggcgacgacgacgcctacctgggcaaccagagaagcaaggagagcctgggcgaggccggcatccagaagggcagcgccatggccgccaccaccaccaccgccatcttcaccaccctgaacgagcccaagcccgagacccagagaagaggctgggccaagagcagacagagaagacaggtgtggaagagaagagccgaggacggccagggcgacagcggcatcagcagccacttccagccctggcccaagcacagcctgaagcacagagtgaagaagagcccccccgaggagagcaaccagaacggcggcgagggcagctacagagaggccgagaccttcaacagccaggtgggcctgcccatcctgtacttcagcggcagaagagagagactgctgctgagacccgaggtgctggccgagatccccagagaggccttcaccgtggaggcctgggtgaagcccgagggcggccagaacaaccccgccatcatcgccggcgtgttcgacaactgcagccacaccgtgagcgacaagggctgggccctgggcatcagaagcggcaaggacaagggcaagagagacgccagattcttcttcagcctgtgcaccgacagagtgaagaaggccaccatcctgatcagccacagcagataccagcccggcacctggacccacgtggccgccacctacgacggcagacacatggccctgtacgtggacggcacccaggtggccagcagcctggaccagagcggccccctgaacagccccttcatggccagctgcagaagcctgctgctgggcggcgacagcagcgaggacggccactacttcagaggccacctgggcaccctggtgttctggagcaccgccctgccccagagccacttccagcacagcagccagcacagcagcggcgaggaggaggccaccgacctggtgctgaccgccagcttcgagcccgtgaacaccgagtgggtgcccttcagagacgagaagtaccccagactggaggtgctgcagggcttcgagcccgagcccgagatcctgagccccctgcagccccccctgtgcggccagaccgtgtgcgacaacgtggagctgatcagccagtacaacggctactggcccctgagaggcgagaaggtgatcagataccaggtggtgaacatctgcgacgacgagggcctgaaccccatcgtgagcgaggagcagatcagactgcagcacgaggccctgaacgaggccttcagcagatacaacatcagctggcagctgagcgtgcaccaggtgcacaacagcaccctgagacacagagtggtgctggtgaactgcgagcccagcaagatcggcaacgaccactgcgaccccgagtgcgagcaccccctgaccggctacgacggcggcgactgcagactgcagggcagatgctacagctggaacagaagagacggcctgtgccacgtggagtgcaacaacatgctgaacgacttcgacgacggcgactgctgcgacccccaggtggccgacgtgagaaagacctgcttcgaccccgacagccccaagagagcctacatgagcgtgaaggagctgaaggaggccctgcagctgaacagcacccacttcctgaacatctacttcgccagcagcgtgagagaggacctggccggcgccgccacctggccctgggacaaggacgccgtgacccacctgggcggcatcgtgctgagccccgcctactacggcatgcccggccacaccgacaccatgatccacgaggtgggccacgtgctgggcctgtaccacgtgttcaagggcgtgagcgagagagagagctgcaacgacccctgcaaggagaccgtgcccagcatggagaccggcgacctgtgcgccgacaccgcccccacccccaagagcgagctgtgcagagagcccgagcccaccagcgacacctgcggcttcaccagattccccggcgcccccttcaccaactacatgagctacaccggcatcaccaccgtgctgttctgcttcctgctgagaatccacggcggcctgtag

SEQ ID NO: 210189 - DNA, 2484 bp, Artificial Sequence
  derived and/or modified sequence
atgatgtgtttaaagatcctcagaatcagcctcgccatcttagccgggtgggccctctgtagcgccaattcggagttggggtggacgcggaagaagtcgctggtggagcgtgagcatttaaaccaggttctgctcgaaggggaaagatgctggctcggggctaaagtacgtcggcctcgcgctagccctcagcaccacttattcggagtgtatcccagccgagctggcaattaccttcggccttatcctgtgggagaacaggaaatccaccacacaggacgatcaaagccggacaccgaggggaatgccgtgagtttggtaccccccgatcttacagagaacccagctgggctcagaggagcggtggaggaacctgcagcaccttgggtgggggattcgcccattggccaatctgaactgctgggtgacgacgatgcttacctgggtaaccagagatcaaaggagtctctgggcgaggccggaatacagaagggctctgccatggccgccacaacaacaacggccatattcaccaccctgaacgaacccaagcctgagacacagcggaggggctgggctaagtctcggcaacggcgacaggtctggaagaggcgcgctgaggatggtcaaggggacagtggtattagtagtcatttccagccctggccgaaacactctctgaaacatagagtgaaaaagagtcctccggaggaaagcaatcagaacggcggcgaggggagttaccgagaggccgaaactttcaacagccaggtcgggttgcccattctgtacttctcaggacgaagagagagactgctgctgaggcccgaagtcctggcggaaatcccccgcgaggcttttacagtggaagcatgggttaaaccagaagggggacaaaataacccggcgatcatagcaggtgtgtttgacaactgctcacatactgtttctgacaagggctgggctcttggaatccgttctgggaaggacaaggggaagcgcgacgcccgctttttcttttcgctgtgtaccgatagagtaaagaaagccaccatcctgatcagccatagtcggtaccagccggggacttggacccacgtagctgctacatatgacggaagacacatggcattatacgtggacggaacccaggtcgcgtcatccctggatcagtccgggccgctgaacagccctttcatggccagttgtaggagcctgctgctgggaggtgacagctcagaagatggacactacttcaggggccacttagggactctggttttctggtccactgcgttgcctcaatcacatttccagcattcatcccagcactccagtggtgaggaagaagccaccgaccttgtgttgacagcgagttttgagcctgtgaacactgagtgggtccctttccgcgatgaaaaatatcctcggcttgaagttctccaaggctttgagccagagccggaaatcctgtccccgttgcagcctccattgtgtggacagaccgtctgcgacaacgtggagctgatcagccagtacaacggatactggccccttaggggcgagaaagtaatccgttaccaggtggtgaacatttgtgacgacgaaggactaaacccgattgtgtcagaggaacagatacggctacagcatgaagccttgaatgaggcgtttagtaggtataacatcagttggcagctgagtgtgcaccaggtgcataactcaacccttcgtcatagggtggttctcgtgaactgtgagcctagcaaaatagggaatgaccactgtgaccctgaatgcgaacatccattaaccggctacgacgggggtgactgcaggctccagggcaggtgctactcctggaaccgccgcgacggactatgccacgtggagtgtaataatatgctgaacgacttcgatgacggtgactgctgtgacccccaggtagccgacgtgcgcaaaacatgtttcgacccagattctcccaaacgagcgtatatgagcgtgaaagagctcaaagaagctctccagctgaattcaacacatttcttgaatatctacttcgcctcgtctgtcagagaagatcttgcaggggcggcaacatggccctgggataaagacgcagttacccatttgggcgggatcgtgttaagcccagcctactatggaatgccggggcataccgacaccatgatccatgaggtgggccacgtccttgggctttatcacgtatttaagggagtctctgagagagagtcatgcaacgacccttgtaaggagaccgtgcctagcatggaaactggggatttatgtgcggacacagcgcctaccccaaagtccgagctatgccgcgaaccagagcctacatccgatacctgcgggttcaccaggttccctggtgcccctttcactaactacatgagctatactggcataaccaccgtgctattctgtttcctcctccgcatccatggggggctgtag

SEQ ID NO: 210190 - DNA, 4369 bp, Artificial Sequence
  derived and/or modified sequence
gggcatgactctctctcttgagtaggcacacactcccttttctcgggtgtgtactttttgctttgtgatacatctctgcactttcagtattttccaactcatccttaaattccttctcacaacagtgtcaagagcctggacgccagccaggattgaggtcctacgggtgtttggggacctccccaagcccacgagtatcaatggcagtatcaattgtctgtgacagtgattaaggagcaaaacacttggaacccacaagactcccagaaggtgaagttaagagctcccagactcataaggttattagaacagcaaactggcaccccaaagaactttacggagacttgcaacctatcaacaagttggatgagggattaaaagccttcaacaaccaacaaccccaagcatcaaactgaaggaaacattctaaccttcacagacagactggaggctggatggggacctggctgaagacatctggagaatgaaagttaagtaccagcttgcatttttgtgcccctagattatttttgcattttaaaataagaagcatcaaattgcgtgtctctgtgtaaaagttctagcaatttgttttaaggtgaacttattttggcttagggactacaaaaagagaaggtaattcctagggaaggaagaagagaaagaaatgaaaattagagaataagattattttgaatgacttcaggtagcgaggagtgtgtgtttgtgagtgtgtatttgagagacttggctcatgcctgtgggtcttctcttctagtatcagtgaggggagggattactgaagaagaaggggggaaaaaaaaagaaagaaatctgagctttctgggaggaaattcaaaggaaccaagagaaattaacttcgttctgcaaggactaaagtacagcaagaggagagaggtcaagcgagaagcgtgcgggaagcacatgccctggggaggcatagaagccacactggcagagcggccagcacaggtagccagcagaggcattcttggggctatttgaaaaagtttggtctgtgaacaaaacagtttccctggtgactgcaaatccattgctagctgcctctttctcgtctgcccatcactctggtgtggtacccagaagttgacttctggttctgtagaaagagctaggggaggtatgatgtgcttaaagatcctaagaataagcctggcgattttggctgggtgggcactctgttctgccaactctgagctgggctggacacgcaagaaatccttggttgagagggaacacctgaatcaggtgctgttggaaggagaacgttgttggctgggggccaaggttcgaagacccagagcttctccacagcatcacctctttggagtctaccccagcagggctgggaactacctaaggccctaccccgtgggggagcaagaaatccatcatacaggacgcagcaaaccagacactgaaggaaatgctgtgagccttgttcccccagacctgactgaaaatccagcaggactgaggggtgcagttgaagagccggctgccccatgggtaggggatagtcctattgggcaatctgagctgctgggagatgatgacgcttatctcggcaatcaaagatccaaggagtctctaggtgaggccgggattcagaaaggctcagccatggctgccactactaccaccgccattttcacaaccctgaacgaacccaaaccagagacccaaaggaggggctgggccaagtccaggcagcgtcgccaagtgtggaagaggcgggcggaagatgggcagggagactccggtatctcttcacatttccaaccttggcccaagcattcccttaaacacagggtcaaaaagagtccaccggaggaaagcaaccaaaatggtggagagggctcctaccgagaagcagagacctttaactcccaagtaggactgcccatcttatacttctctgggaggcgggagcggctgctgctgcgtccagaagtgctggctgagattccccgggaggcgttcacagtggaagcctgggttaaaccggagggaggacagaacaacccagccatcatcgcaggtgtgtttgataactgctcccacactgtcagtgacaaaggctgggccctggggatccgctcagggaaggacaagggaaagcgggatgctcgcttcttcttctccctctgcaccgaccgcgtgaagaaagccaccatcttgattagccacagtcgctaccaaccaggcacatggacccatgtggcagccacttacgatggacggcacatggccctgtatgtggatggcactcaggtggctagcagtctagaccagtctggtcccctgaacagccccttcatggcatcttgccgctctttgctcctggggggagacagctctgaggatgggcactatttccgtggacacctgggcacactggttttctggtcgaccgccctgccacaaagccattttcagcacagttctcagcattcaagtggggaggaggaagcgactgacttggtcctgacagcgagctttgagcctgtgaacacagagtgggttccctttagagatgagaagtacccacgacttgaggttctccagggctttgagccagagcctgagattctgtcgcctttgcagcccccactctgtgggcaaacagtctgtgacaatgtggaattgatctcccagtacaatggatactggccccttcggggagagaaggtgatacgctaccaggtggtgaacatctgtgatgatgagggcctaaaccccattgtgagtgaggagcagattcgtctgcagcacgaggcactgaatgaggccttcagccgctacaacatcagctggcagctgagcgtccaccaggtccacaattccaccctgcgacaccgggttgtgcttgtgaactgtgagcccagcaagattggcaatgaccattgtgaccccgagtgtgagcacccactcacaggctatgatgggggtgactgccgcctgcagggccgctgctactcctggaaccgcagggatgggctctgtcacgtggagtgtaacaacatgctgaacgactttgacgacggagactgctgcgacccccaggtggctgatgtgcgcaagacctgctttgaccctgactcacccaagagggcatacatgagtgtgaaggagctgaaggaggccctgcagctgaacagtactcacttcctcaacatctactttgccagctcagtgcgggaagaccttgcaggtgctgccacctggccttgggacaaggacgctgtcactcacctgggtggcattgtcctcagcccagcatattatgggatgcctggccacaccgacaccatgatccatgaagtgggacatgttctgggactctaccatgtctttaaaggagtcagtgaaagagaatcctgcaatgacccctgcaaggagacagtgccatccatggaaacgggagacctctgtgccgacaccgcccccactcccaagagtgagctgtgccgggaaccagagcccactagtgacacctgtggcttcactcgcttcccaggggctccgttcaccaactacatgagctacacgggtatcaccactgtcttgttttgttttctgttaagaatacatgggggcctttgagagctgggagggtggaggtgtgggagctgatgggagaatgattaagtggtcatttgtgtcggagagttgaagtgtatttattataaggtattattattttttcatgtctttgaagaacttgaagaaatactgacatattaaggtactttgttcactgaattctcctctactagatattttaaaatatacttctatcctcgatagtaaaaaaggcacagagccaaaagccctcttgtgatccccttgacttctagaatgtggttattcttatttttgcccgcattcttagacatttactctgaagaagagtccaatggaaataaaggaaaagagtttatgggtcaaggtggcccattgtactgtttttgaagttggtcaacaaggtggcttggttaatttaggctcagcatgttttactgtatgttactaaaaaaaaaaaaaaaaaaaatcagattctctttttccagcactagtcaagcacaaattcttagctgcctaccaccctttccccaccaaaaggtgacatctaattttaaaaaaatggcatcttcctggccctcggaaaaacttgtcatctggtctttcttgccttaattcagcttctgtattattcttcgctgtctctcacgccttccttgtttcttgtgaaaagtaatagtgactggtttcctataatggactcaaagttatccctaaaattaaagacttatttgatgaccta

SEQ ID NO: 210191 - DNA, 2484 bp, Artificial Sequence
  derived and/or modified sequence
atgatgtgcctgaagatcctgcgcatcagcctggccatcctggccggctgggccctgtgcagcgccaacagcgagctgggctggaccaggaagaagagcctggtggagcgggagcacctgaaccaggtgctgctggagggggagcgctgctggctgggcgccaaggtgagaagaccccgggccagcccccagcaccacctgtttggagtgtaccccagcagagctggcaactacctgcggccctaccctgtgggggagcaggagatccaccacacaggccgcagcaagccagacacagagggcaatgctgtgtccctggtgcccccagacctgacagaaaatcctgctggcctgcggggagctgtggaggagcctgctgccccctgggtgggggacagccccatcggccagagcgagctgctgggagatgatgatgcctacctgggcaaccagaggagcaaggagagcctgggggaggccggcatccagaagggcagcgccatggccgccaccaccaccacagccatcttcaccaccctgaatgagcccaagccagagacccagaggcggggctgggccaagagccggcagaggcggcaggtgtggaagagaagagcagaagatggccagggcgacagcggcatcagcagccacttccagccctggcccaagcacagcctgaagcaccgggtgaagaagagccccccagaggagagcaaccagaatggaggagagggcagctaccgggaggccgagaccttcaacagccaggtgggcctgcccatcctgtacttcagcggccggcgggagcggctgctgctgcggcctgaggtgctggccgagatcccccgggaggccttcaccgtggaggcctgggtgaagccagagggcggccagaacaacccagccatcatcgccggcgtgtttgacaactgcagccacacagtgtctgacaagggctgggccctgggcatccgcagcggcaaggacaagggcaagagagatgcccgcttcttcttcagcctgtgcacagacagagtgaagaaggccaccatcctgatcagccacagccgctaccagcccggcacctggacccacgtggccgccacctatgatggccgccacatggccctgtatgtggatggcacccaggtggccagcagcctggaccagagcggccccctgaacagccccttcatggccagctgccgcagcctgctgctgggcggggacagcagtgaagatggccactacttccggggccacctgggcaccctggtgttctggagcacagccctgccccagagccacttccagcacagcagccagcacagcagcggggaggaggaggccacagacctggtgctgacagccagctttgagcctgtgaacacagagtgggtgcccttcagagatgagaagtacccccggctggaggtgctgcagggctttgagcctgagcctgagatcctgagccccctgcagccccccctgtgtggccagacagtgtgtgacaacgtggagctgatcagccagtacaacggctactggcccctgcggggggagaaggtgatccgctaccaggtggtgaacatctgtgatgatgagggcctgaaccccatcgtgtctgaggagcagatccggctgcagcacgaggccctgaatgaggccttcagccgctacaacatctcctggcagctgtctgtgcaccaggtgcacaacagcaccctgcggcaccgggtggtgctggtgaactgtgagcccagcaagattggaaatgaccactgtgaccctgaatgtgagcaccccctgaccggctatgatggaggagactgccgcctgcagggccgctgctacagctggaacagaagagatggcctgtgccacgtggagtgcaacaacatgctgaatgactttgatgatggagactgctgtgacccccaggtggctgatgtgaggaagacctgctttgatcctgacagccccaagagggcctacatgtctgtgaaggagctgaaggaggccctgcagctgaacagcacccacttcctgaacatctactttgccagctctgtgcgggaggacctggccggggccgccacctggccctgggacaaggatgctgtgacccacctgggcggcatcgtgctgagccctgcctactacggcatgcctggccacacagacaccatgattcatgaggtgggccacgtgctgggcctgtaccacgtgttcaagggcgtgtctgagcgggagagctgcaatgacccctgcaaggagaccgtgcccagcatggagactggagacctgtgtgccgacacagcccccacccccaagtctgagctgtgccgggagcctgagcccaccagtgacacctgtggcttcacccgcttccctggggcccccttcaccaactacatgagctacacaggcatcaccaccgtgctcttctgcttcctgctgcgcatccacggcggcctgtag

SEQ ID NO: 210192 - DNA, 2484 bp, Artificial Sequence
  derived and/or modified sequence
atgatgtgcctgaagatcctgcggatcagcctggccatcctggccggctgggcactctgctccgctaattctgaattgggttggacccgcaagaaatccctggttgaaagagagcacctcaatcaagtcctgttggagggtgaacgatgctggctcggcgcaaaagtacgccgcccccgggcatcaccgcagcatcaccttttcggcgtgtatccatccagggccggcaattacctgagaccatatcctgtgggcgaacaagaaattcatcacaccgggcggtcaaagcctgacactgaaggcaacgccgttagcttagtgccaccggatctgaccgagaaccccgctggcctccgaggagctgtcgaagagcctgcagccccgtgggttggtgacagtcctatcggccagagcgaattgcttggcgatgacgatgcttatctgggcaaccagcgcagtaaagagtctttgggagaagctgggattcagaaggggtctgccatggcggcaaccactacaactgcaatttttacaaccttgaatgaaccaaaaccggaaacgcagcggcgcggttgggcgaagagtcgccagagaagacaggtctggaagcggcgcgctgaagacggtcagggggattctggcataagcagccatttccagccttggcctaaacactcactcaaacaccgtgtgaagaaatctccgcccgaggaatccaaccagaacgggggcgaaggatcctaccgcgaagccgaaacattcaatagccaggtgggactacctattctgtatttttcgggacggcgggaacgactactcctgagacccgaagtactcgccgaaattcccagagaggcctttaccgtggaggcttgggtaaaacctgaaggtgggcaaaataaccccgccatcattgctggggttttcgataactgtagtcacacagtttcagacaagggttgggctctgggaatacgatctggcaaagacaaaggtaagagagacgctcgcttttttttcagcttatgcacagacagagttaagaaggccacaattctgatttcacacagcaggtatcaacctggcacatggacccacgtagcagcaacttacgacgggcgccacatggctctgtatgtggatggcactcaggtggcatcaagtctggaccagtctggacctctgaacagcccctttatggctagctgccggagtctgcttctggggggcgacagttctgaggacgggcactatttcagagggcacttaggcacccttgtcttttggtcaaccgcgctgcctcagtcccactttcagcactcaagccagcactcctctggcgaggaagaagccacagatctggttttgacggcctctttcgaacccgtgaatactgagtgggtccctttcagagacgagaaatacccccggctcgaagttctccagggcttcgaacctgagcccgaaattctgtcacctttgcagccccccttatgcgggcagaccgtctgcgacaatgtggagctgatatcacagtacaacggatattggccactccgtggagagaaagtcataaggtatcaagtggtgaatatttgtgatgacgagggcctcaaccctatagtctctgaggaacaaataagactacaacatgaagccttgaacgaggcattctcaaggtacaacatttcctggcagctttcagttcaccaagtgcacaactctaccctgcgtcaccgcgtggtgcttgtcaactgtgaaccttccaaaatcggtaatgatcattgtgatcccgagtgcgagcaccctctcaccggatacgatggaggtgactgcaggctgcaagggcggtgttattcctggaatcgccgggacgggttatgtcatgtggaatgtaacaacatgctgaatgactttgacgacggcgattgctgcgacccccaggtggcggacgtgagaaagacatgtttcgatcctgactctcccaagcgggcttacatgtctgtgaaagaactgaaggaggccctccagctgaacagtactcacttcctgaacatttattttgccagctctgtacgagaggatctcgctggcgctgctacctggccctgggataaagatgcagtcacccaccttgggggcatcgttctgagccctgcatattacgggatgcctggccacaccgacaccatgattcacgaggtcggccacgtgctgggactgtatcatgtgtttaaaggagtgtctgaacgtgaaagttgtaatgatccttgtaaagagaccgtcccttccatggagaccggagatctatgcgctgacaccgcgcccacccccaagagcgaactatgcagagaacccgagccgacaagtgacacatgtggttttacgaggttccccggcgctccgtttaccaactacatgtcatacactgggattaccacagttcttttctgttttctacttagaatccacgggggtctctag

SEQ ID NO: 210193 - RNA, 2484 nt, Artificial Sequence
  derived and/or modified sequence
augaugugccugaaaauccugcguauuagucuugcuauucuagccggcugggcacugugcuccgccaauucggagcuuggguggaccagaaagaagaguuuaguggagcgcgagcaucugaaucagguccugcuggagggggaaagauguuggcucggcgccaagguucgcagaccacgcgcaucgccccagcaccaccuguucggggucuaccccuccagagccggaaauuaccucagaccauauccagucggagaacaagagauccaccauacgggccgaucuaaaccagauacagaaggcaaugccgugucccuugucccacccgaucucacagaaaauccugccggucugcggggcgcuguggaggagccugcggcaccaugggugggugauucaccuaucggccaaagcgagcuuuugggcgacgacgacgcuuaucuugggaaccagaggagcaaagagucacugggagaggcggguauccagaaaggauccgcgauggcggcuacuacaacaacugccauauucacuaccuuaaaugagccaaagccagagacacagcgccggggaugggccaaaucaagacagcggcggcagguguggaagagaagagcugaagacggccagggagacuccggaaucucgagccacuuucagccuuggcccaagcauagucugaaacaccgcguuaaaaagucaccaccugaggaauccaaucagaacgggggugagggaucauaccgggaagccgagacauuuaauucccaggucggacugcccauucucuacuuuaguggccgucgugagcgccugcuucugcgacccgaagugcuggccgagaucccccgagaggccuucaccguugaggccugggugaagccugaaggaggacaaaacaaucccgccaucaucgcugguguguucgauaauuguucgcacaccguuagcgacaaagggugggcucucggaaucagaagcgggaaagacaagggcaaaagggaugcccguuuuuucuucagucuuugcacagaccggguuaagaaagcgaccauuuugaucucacauucuagauaucaaccugguacauggacccauguggcagccaccuacgacggccgccacauggcacuguaugucgacgguacucaggucgccuccucuuuagaccaguccggcccgcugaacagccccuucauggcgucgugccgcucacugcuguugggaggagauagcagcgaggauggccauuacuucagggggcaucucggaacuuuaguguuuuggucaacggcucuaccccagucacacuuccagcacucuucacagcacucgagcggcgaagaggaggcuacugaccuagugcugacagcaucauuugaacccgucaacaccgaaugggucccuuuccgcgaugaaaaauacccucgguuagaagugcugcagggauucgagcccgaaccggagaucuugagcccacugcagccgccacuuuguggacagacagucugcgauaaugucgagcucauaucccaauauaacggcuauuggccccugagaggcgagaaagucaucagauaccagguggugaacauaugugacgacgagggucuaaauccuauugucucggaggaacagauaaggcugcagcaugaggcuuuaaaugaggcuuuuucccgcuauaacaucuccuggcagcugucagugcaucagguucauaacaguacgcuuagacaccgcgucgugcucgugaauugugagccauccaaaaucgggaaugaccauugcgauccugagugugagcauccuuugacaggguacgaugguggcgacugcaggcuccagggaaggugcuacuccuggaaccgccgggauggucugugccaugucgagugcaauaacaugcuuaacgauuucgacgauggcgauugcugcgacccucagguagcagaugugcgcaaaaccuguuucgaccccgauucuccgaaaagagcauauaugucugucaaggagcugaaggaagcacugcaauugaacucaacacauuuucucaacaucuacuucgccuccuccguuagagaggaucucgcuggcgcugcaaccuggccaugggauaaagaugcggucacucaccuuggaggcauugugcuuucuccagcauacuacggaaugcccggacauacagauacaaugauucacgagguaggucaugugcucggucuguaucauguauucaagggugucuccgagagagaauccuguaacgacccuuguaaagaaacaguccccucgauggagacuggggaccuuugugccgacaccgccccaaccccuaaaucagagcucugcagagaaccagagccaacaucagacacuugcgguuucacacgguucccuggggcaccauucacuaauuauaugucuuacaccggcaucacgaccgugcuguuuuguuuuuugcugcggauccacggugggcuuuag

SEQ ID NO: 210194 - RNA, 2484 nt, Artificial Sequence
  derived and/or modified sequence
augaugugccuuaaaauucuucggauuucguuagccauccucgccggcugggcuuuauguagcgcaaauuccgagcuuggcuggacaagaaagaaaucgcuaguugaacgcgagcacuugaaccaaguucugcuggaaggcgaacgauguugguuaggggccaagguccgccggcccagggcuucuccucagcaccaucuauuuggcguguauccaucuagagcuggaaauuaccugcgcccuuaccccgucggugaacaagagauccaucacaccggcagaagcaaacccgauacagaaggcaacgcagugucauuagugccuccugauuuaaccgaaaaucccgcuggccugaggggcgcuguggaagagccagcugcuccauggguaggugauagcccuauaggccagagcgaauugcuuggcgacgacgaugcuuaccuugguaaccagaggagcaaggaaagccugggugaggcgggaauccagaaaggcucugcaauggcggccacuacaacuacagccaucuucacgacucucaacgagccuaaaccagaaacccaacgcagaggaugggcaaaaagccgucagcgacgacagguauggaagcguagagcugaggacgggcagggggacagcggaaucucaucacauuuucagccauggcccaaacauagccuaaaacauagagucaagaaaagucccccugaagagaguaaucagaauggcggcgagggaucauaucgggaagcugaaacguucaacucccaggugggucucccgauucuuuacuuuuccggacgcagggagaggcuccuccuaagaccagaggugcuggcagaaauaccccgggaggcguucacggucgaggccugggugaaaccagaagggggacagaauaacccugcaaucaucgcuggcguauucgacaauuguucccacacugugagugauaagggaugggccuuaggaaucagauccgguaaggauaagggaaagagagacgcgcgauucuucuucuccuuaugcacugacagaguaaagaaggccaccauucuuauaagccacucccgauaccaacccggcacuuggacucacguggccgcaacauacgacggccggcacauggcacucuaugucgacgggacacaggucgcuuccucucuugaccaaagcggcccacugaacuccccauuuauggccucuugucgcagucugcuccuggggggcgauucaucagaggacgggcacuauuuucgaggccaucuugggacccuuguuuucuggaguacagcucugccccaaucucauuuccagcauucuagccagcauagcuccggggaggaggaggccaccgaucuuguguugaccgcaucuuuugaaccugugaauacugaaugggugccauucagagaugagaaauauccacgacuugaaguguuacagggguucgaaccagaacccgagauuuugucuccacuccaaccuccccuuugugggcagaccgugugcgauaaugucgaacuuaucucucaauacaacggguauuggccacuccgaggcgagaaagugaucagguaccagguagucaacauaugcgacgaugaaggccugaaucccaucguuuccgaagaacagauccgucuccaacacgaagcucuuaacgaggcuuuuagucgcuauaauauaucauggcaauugagugugcaccaaguccauaacuccacgcugaggcacagagucgugcuggugaauugugaaccuagcaagauuggaaacgaccacugugacccugaaugugaacauccauugacugguuacgacggaggcgacuguagacuccaggggcgcuguuacagcuggaaccgccgcgacggacuuugucacguggaguguaacaacaugcugaaugacuuugacgacggugauugcugcgacccccaaguggcagacgugaggaagacuuguuuugauccggauucuccaaaaagagcuuacauguccgugaaggagcugaaggaggccuugcaauuaaacucaacacacuuuuuaaacaucuacuucgcuuccagcguucgagaagaucucgccggagcagccaccuggccaugggauaaagaugcggucacucaccuuggaggcauugugcuuucuccagcauacuacggaaugcccggacauacagauacaaugauucacgagguaggucaugugcucggucuguaucauguauucaagggugucuccgagagagaauccuguaacgacccuuguaaagaaacaguccccucgauggagacuggggaccuuugugccgacaccgccccaaccccuaaaucagagcucugcagagaaccagagccaacaucagacacuugcgguuucacacgguucccuggggcuccauucacaaauuauaugucuuauaccggaaucacaaccgugcucuucugcuuccuucuucgcauccacggcggauuguag

SEQ ID NO: 210195 - protein, 596 aa, Artificial Sequence
  derived and/or modified sequence
MAGRRVNVNVGVLGHIDSGKTALARALSTTASTAAFDKQPQSRERGITLDLGFSCFSVPLPARLRSSLPEFQAAPEAEPEPGEPLLQVTLVDCPGHASLIRTIIGGAQIIDLMMLVIDVTKGMQTQSAECLVIGQIACQKLVVVLNKIDLLPEGKRQAAIDKMTKKMQKTLENTKFRGAPIIPVAAKPGGPEAPETEAPQGIPELIELLTSQISIPTRDPSGPFLMSVDHCFSIKGQGTVMTGTILSGSISLGDSVEIPALKVVKKVKSMQMFHMPITSAMQGDRLGICVTQFDPKLLERGLVCAPESLHTVHAALISVEKIPYFRGPLQTKAKFHITVGHETVMGRLMFFSPAPDNFDQEPILDSFNFSQEYLFQEQYLSKDLTPAVTDNDEADKKAGQATEGHCPRQQWALVEFEKPVTCPRLCLVIGSRLDADIHTNTCRLAFHGILLHGLEDRNYADSFLPRLKVYKLKHKHGLVERAMDDYSVIGRSLFKKETNIQLFVGLKVHLSTGELGIIDSAFGQSGKFKIHIPGGLSPESKKILTPALKKRARAGRGEATRQEESAERSEPSQHVVLSLTFKRYVFDTHKRMVQSP

SEQ ID NO: 210196 - DNA, 1791 bp, Artificial Sequence
  derived and/or modified sequence
atggccggcagaagagtgaacgtgaacgtgggcgtgctgggccacatcgacagcggcaagaccgccctggccagagccctgagcaccaccgccagcaccgccgccttcgacaagcagccccagagcagagagagaggcatcaccctggacctgggcttcagctgcttcagcgtgcccctgcccgccagactgagaagcagcctgcccgagttccaggccgcccccgaggccgagcccgagcccggcgagcccctgctgcaggtgaccctggtggactgccccggccacgccagcctgatcagaaccatcatcggcggcgcccagatcatcgacctgatgatgctggtgatcgacgtgaccaagggcatgcagacccagagcgccgagtgcctggtgatcggccagatcgcctgccagaagctggtggtggtgctgaacaagatcgacctgctgcccgagggcaagagacaggccgccatcgacaagatgaccaagaagatgcagaagaccctggagaacaccaagttcagaggcgcccccatcatccccgtggccgccaagcccggcggccccgaggcccccgagaccgaggccccccagggcatccccgagctgatcgagctgctgaccagccagatcagcatccccaccagagaccccagcggccccttcctgatgagcgtggaccactgcttcagcatcaagggccagggcaccgtgatgaccggcaccatcctgagcggcagcatcagcctgggcgacagcgtggagatccccgccctgaaggtggtgaagaaggtgaagagcatgcagatgttccacatgcccatcaccagcgccatgcagggcgacagactgggcatctgcgtgacccagttcgaccccaagctgctggagagaggcctggtgtgcgcccccgagagcctgcacaccgtgcacgccgccctgatcagcgtggagaagatcccctacttcagaggccccctgcagaccaaggccaagttccacatcaccgtgggccacgagaccgtgatgggcagactgatgttcttcagccccgcccccgacaacttcgaccaggagcccatcctggacagcttcaacttcagccaggagtacctgttccaggagcagtacctgagcaaggacctgacccccgccgtgaccgacaacgacgaggccgacaagaaggccggccaggccaccgagggccactgccccagacagcagtgggccctggtggagttcgagaagcccgtgacctgccccagactgtgcctggtgatcggcagcagactggacgccgacatccacaccaacacctgcagactggccttccacggcatcctgctgcacggcctggaggacagaaactacgccgacagcttcctgcccagactgaaggtgtacaagctgaagcacaagcacggcctggtggagagagccatggacgactacagcgtgatcggcagaagcctgttcaagaaggagaccaacatccagctgttcgtgggcctgaaggtgcacctgagcaccggcgagctgggcatcatcgacagcgccttcggccagagcggcaagttcaagatccacatccccggcggcctgagccccgagagcaagaagatcctgacccccgccctgaagaagagagccagagccggcagaggcgaggccaccagacaggaggagagcgccgagagaagcgagcccagccagcacgtggtgctgagcctgaccttcaagagatacgtgttcgacacccacaagagaatggtgcagagcccctag

SEQ ID NO: 210197 - DNA, 1791 bp, Artificial Sequence
  derived and/or modified sequence
atggccggtcggagggtgaatgtgaacgtgggcgtgctcgggcacatcgattctgggaagacagctcttgcgcgagccctgtctacaaccgcctcaacagctgcattcgacaagcaacctcaatcccgagaacgcggaataacgctcgatctgggtttttcctgtttctcagtaccgttgccagcccgactgcgttctagcctcccagaatttcaggctgccccagaagccgaaccagagcctggcgagccattgctacaggtgacattagtggactgtccaggtcacgctagtttgattcgaaccatcatcgggggcgcacagattatcgacctcatgatgctggttattgacgtcacaaagggcatgcagacccagtccgccgagtgcctggtgattgggcagattgcatgtcagaaactggtcgtggtcctgaataaaatcgacctgctgcctgaaggcaagaggcaagcagccatcgacaagatgacaaagaaaatgcagaaaaccttagaaaacaccaaattccgaggcgcccccattatcccggtcgctgcaaaacctgggggccctgaggccccagaaaccgaggctccacagggcatccctgaactgatcgagctcctgacatcccagatcagcatacctaccagagatccaagcgggccatttctcatgtccgtggatcactgtttcagcataaaagggcagggtacagtaatgacaggtacaatcctgagtggctccatatctctgggtgatagcgttgagatccccgcgctgaaagtcgtaaagaaggtcaaatctatgcagatgtttcacatgccaatcaccagtgccatgcagggagacagacttggcatctgtgtcacccaattcgatcccaaactcctggagagagggctcgtgtgtgctccggaaagcctacacacagtccacgccgcgctcatatccgtcgaaaagatcccctactttagggggcccctacagaccaaagcgaagttccatattactgtgggccatgagacggtcatggggcggctgatgttcttttccccagcacccgataacttcgaccaggaacccatcttagactcttttaactttagtcaggagtaccttttccaggagcagtacctatccaaagatttaacgcccgccgtcaccgataacgacgaggctgacaagaaggccggtcaggcgactgaagggcactgtcctagacagcaatgggcattagtagagttcgaaaaaccagtgacatgtcctagactgtgtctggtgattggtagcaggctggatgccgacatccacactaacacgtgtcgcctagcctttcacgggatcttgcttcacggattggaagataggaactatgcagacagctttctacctcgactgaaagtgtacaagctaaagcataagcacgggctggtagaacgtgccatggatgattattccgtgattggtagaagcttatttaagaaagagacgaacatacaactgtttgtcggccttaaggtgcacctgtcaaccggggagctggggatcattgacagcgccttcggacagtctggtaaatttaaaatccacatcccaggcgggctgtctcccgaatccaaaaaaatattaacgcctgcgctaaagaagcgggctcgagccggtcggggggaagctaccaggcaggaggaatcagcagaacgaagcgagccttcacagcacgtagtccttagtttgacattcaagaggtacgtgttcgatacccacaaacgaatggtgcagtcaccatag

SEQ ID NO: 210198 - DNA, 2228 bp, Artificial Sequence
  derived and/or modified sequence
taccgagggaggtgaggggcgggccgggcgggtgtccgaggcggcggcggcggcatggcagggcggcgggtgaacgtgaacgtgggcgtgctgggccacatcgacagcggcaagacggcgctggcgcgggcgctaagcaccacagcctccaccgccgcctttgacaagcagccgcagagccgcgagcgcggcatcacgctcgatctgggcttctcgtgcttctcggtgccgctgcccgcgcgcctgcggtcgtctttgcccgagttccaggcagcgcccgaggccgagcccgagcccggcgagccactgcttcaggtcacgctggtcgactgccccgggcacgcctccctcatccggaccatcatcggcggggcccagatcattgatctgatgatgctggtcatcgatgtgaccaaggggatgcagacccagtcagcggaatgccttgtgatcggccagattgcctgccagaagctggtcgtggtgctgaacaaaatagacctcttacctgaaggaaagagacaggcagcaattgataaaatgaccaagaaaatgcagaagaccctagagaacaccaagttccgaggtgcaccgattatacccgtggcggccaagccggggggaccagaggcccccgaaactgaagctccacagggcattccagagctcattgagctcctgacgtcccagatttccatcccaacgagagatccctcgggaccgttcctcatgtctgtggaccactgtttctccatcaaaggccaaggcactgtgatgacagggaccatcctttcaggctccatcagcctcggtgacagtgtggagatccctgccctcaaggtggtgaagaaggtgaagtccatgcagatgttccacatgcccatcacttcagccatgcaaggagaccggctgggcatctgcgtcacccagtttgaccctaagctgctggagcgcgggttggtgtgtgcccccgagtccctgcacactgtccatgcggccctcatctctgtggaaaagataccgtatttccgggggcccctgcaaaccaaggccaagttccacattacagtgggccatgaaacagtcatgggccggttgatgttcttcagtcctgctccagataactttgaccaggagcctatactggactctttcaacttctctcaagaataccttttccaggagcagtacctgtccaaggatttgacaccagcagtgacagacaatgatgaggccgacaagaaggccggccaggccacagagggccattgtcctcggcagcagtgggccctggtggagtttgagaagcccgtcacctgccctcggctgtgcctggtgattggctccaggctagatgcggacattcacaccaacacgtgccggctagccttccatggcatcctgctccacgggctagaggacaggaactacgccgacagcttcctgcccaggctgaaggtgtacaagctgaagcacaagcatggccttgtggagcgggcgatggatgactacagtgtgatcggccgctccctgttcaaaaaggaaaccaacatccagctcttcgtggggctcaaggtgcacttgtccactggggaactgggcatcatcgacagtgccttcggccagagcggcaagttcaagatccacatcccaggtggcctcagccccgagtccaagaagatcctgacacccgccctcaagaagcgggcccgggctggccgtggggaggccaccaggcaggaggagagcgccgagcggagcgagccctcacagcatgtggtgctcagcctgactttcaagcgttatgtcttcgacacccacaagcgcatggttcagtctccctgagtgtccggtgacctcccccagggcctccttgcccagcccagtccaggctgctgtgccaaatcccaaccagccacgcctcagcctctcccagtctctccctgcagtcctgcagcagcagcccccacccccaagcttggtgctgagccctggtgaggagctgagggggatgggttgctggggccaggagggtctctcctccagcccctgcacactcccacccaggacagcccccagcccaactaggaaagggccatgggcagagggctggtagccagtatcttccactgccccatctgttggccacctgcaggccagtctcaaccctcccccaggtgggcaggcacttgatggctacaaataaatgtcccgtggccccagcccac

SEQ ID NO: 210199 - DNA, 1791 bp, Artificial Sequence
  derived and/or modified sequence
atggccggccggcgggtgaatgtgaatgtgggcgtgctgggccacatcgacagcggcaagacagccctggcccgggccctgagcaccacagccagcacagctgcctttgacaagcagccccagagccgggagcggggcatcaccctggacctgggcttcagctgcttctctgtgcccctgcctgcccggctgcggagcagcctgcctgagttccaggccgcccctgaggccgagcctgagcctggagagcccctgctgcaggtgaccctggtggactgccccggccacgccagcctcatccgcaccatcatcggcggggcccagatcatcgacctgatgatgctggtgattgatgtgaccaagggcatgcagacccagagcgcagaatgtctggtgattggccagatcgcctgccagaagctggtggtggtgctgaacaagattgacctgctgcctgagggcaagaggcaggccgccatcgacaagatgaccaagaagatgcagaagaccctggagaacaccaagttccggggggcccccatcatccctgtggccgccaagccaggcggccctgaggcccctgagacagaggccccccagggcatccctgagctgattgagctgctgaccagccagatcagcatccccacccgggaccccagcggccccttcctgatgtctgtggaccactgcttcagcatcaagggccagggcaccgtgatgacaggcaccatcctgagcggcagcatcagcctgggggacagcgtggagatcccagccctgaaggtggtgaagaaggtgaagtccatgcagatgttccacatgcccatcaccagcgccatgcagggcgaccggctgggcatctgtgtgacccagtttgaccccaagctgctggagcggggcctggtgtgtgcccctgagagcctgcacacagtgcacgccgccctgatctctgtggagaagatcccctacttccggggccccctgcagaccaaggccaagttccacatcaccgtgggccatgaaacagtgatgggccgcctgatgttcttctccccagccccagacaactttgaccaggagcccatcctggacagcttcaacttcagccaggagtacctgttccaggagcagtacctgagcaaggacctgaccccagctgtgacagacaatgatgaggccgacaagaaggccggccaggccacagagggccactgcccccggcagcagtgggccctggtggagtttgagaagcctgtgacctgcccccggctgtgcctggtgattggcagccggctggatgctgacatccacaccaacacctgccgcctggccttccacggcatcctgctgcacggcctggaggacagaaattatgctgacagcttcctgccccggctgaaggtgtacaagctgaagcacaagcacggcctggtggagcgggccatggatgactacagcgtgattggccgcagcctcttcaagaaggagaccaacatccagctgtttgtgggcctgaaggtgcacctgagcactggagagctgggcatcatcgacagcgccttcggccagagcggcaagttcaagatccacatccctgggggcctgagccctgagagcaagaagatcctgaccccagccctgaagaagagggcccgggccggccgcggggaggccacccggcaggaggagagcgctgagaggtctgagcccagccagcacgtggtgctgagcctgaccttcaagcgctacgtgtttgacacccacaagaggatggtgcagagcccctag

SEQ ID NO: 210200 - DNA, 1791 bp, Artificial Sequence
  derived and/or modified sequence
atggccggccggcgggtgaacgtgaacgtgggcgtgctgggccacatcgacagcggcaagaccgctcttgcccgtgctttgtctacgactgcttctaccgctgctttcgacaaacagccccagagccgagagcggggaataacacttgacctaggatttagctgctttagtgtgcctctccccgccaggctgcgctcctcccttcctgagtttcaagcagctcccgaagcggagcctgagcctggcgagcctctcctacaagtgacgttggtggattgcccaggccacgcctcattgatccgtacaatcatcggtggcgcccagatcatagatctgatgatgctggtcatcgatgtcactaaaggaatgcagacccaatctgctgagtgcctagttattggtcagatcgcctgccagaaactcgtggtcgtgttaaacaagatagaccttttacctgagggcaagaggcaagcagctatcgacaaaatgacaaagaagatgcagaagacactggagaatactaaatttcggggtgcccctatcatacctgtcgctgcgaagcccgggggccctgaggccccagagactgaggcgccccagggaatccctgaacttatcgagctcttgactagtcagatttctattcccactagggacccatcgggccccttcctcatgtccgtggaccactgcttctctatcaagggacagggaaccgtgatgacaggaacaattcttagcggtagcatctccctaggagactcagtcgaaattccggccctcaaggtagtgaaaaaggttaaaagcatgcaaatgtttcacatgcctattacctcggctatgcaaggtgataggcttggcatctgcgtcacccaattcgatccgaagctattggagcgcggactggtgtgtgctcccgagtccctgcataccgttcatgcagctctcatatctgtggagaaaattccatattttaggggccccctccagacaaaggcaaagtttcacatcactgtcggtcacgaaacagtgatggggcgcctcatgttcttttcacctgcacctgataacttcgatcaagagcccatcctggactcgttcaacttttcgcaggaatacctgttccaagaacaatatctgagcaaagatttgacaccagcagtgacagataacgacgaggcggacaaaaaggcgggacaagccactgaaggtcactgtcctaggcagcaatgggccctggtggaatttgaaaagccggtcacatgcccccgtctatgcctggtaataggtagtcgattagatgctgacatccatacgaatacgtgtagactggcctttcacggcatactgctgcacggcctggaggatcgcaactatgccgatagctttctgcctcgactcaaggtgtacaaactgaagcataagcacggtctagttgagcgcgctatggatgattatagcgtgatcggtagaagcctgtttaagaaggaaaccaacatccagctctttgtcgggttaaaagtgcacttgtccaccggtgagctaggcattatcgattccgccttcggccaatcaggcaaattcaaaatacacatccctgggggcctgagtcctgaaagtaagaaaatcctcactcccgccctcaaaaaaagggcgcgggcgggaagaggagaggccaccagacaggaggaaagcgcagagagaagtgagccgagccagcatgtggtactttctctgacatttaaacggtatgtttttgacacacacaagcggatggttcagtcaccgtag

SEQ ID NO: 210201 - DNA, 1791 bp, Artificial Sequence
  derived and/or modified sequence
atggcaggaaggcgtgttaacgtcaatgtgggagtcctcggtcatattgattccgggaagaccgcactggccagagccttatcaactacagcgtccacggctgcgttcgacaagcaaccccagtcacgcgagcggggtatcaccctcgacctgggattctcctgtttttccgtccccctgcccgctcgactgcgcagtagcttacccgagtttcaggcagcgcctgaggcggaacctgagcctggagagccgctgctccaggtgactctggtggactgtcctgggcacgcctctcttattcgaactataatcggcggagcgcagatcatcgacctcatgatgctggttattgacgtgaccaaaggaatgcaaactcaaagcgccgagtgtctggtaataggacagatcgcctgtcagaaattggtggtagttcttaacaaaatagacctcctgccagaaggtaagcgccaggctgccattgacaagatgaccaagaaaatgcaaaaaaccctggagaataccaaatttcgcggagcacccatcatccctgttgcagccaaacctggcggtccagaggcgcctgaaaccgaagcaccccagggaatccctgaactgattgaattactgacatcccaaatctcaattcccactagagacccctcgggcccattcctcatgagtgttgaccactgctttagcattaaggggcagggcaccgtgatgacgggaaccattctgtccggctccatttctctgggagattctgtggagatcccagcgttgaaagtagtgaaaaaagttaaaagcatgcaaatgttccatatgcccattactagtgcgatgcagggggacagattgggtatttgcgtgactcaatttgacccaaagctgctggaaagaggcctggtatgtgctcctgagtccctgcataccgtacacgcggcactcatttctgtggagaaaataccatattttcgaggaccccttcagaccaaagccaagttccacatcaccgtggggcatgagactgtcatggggcgtcttatgtttttttctccagctccagacaacttcgatcaggaacctattttggattctttcaacttctcccaggagtacctgtttcaagaacagtacttgtcaaaggatcttacccctgccgtcaccgacaacgatgaggccgataaaaaggcaggacaggctacagagggccactgcccccgacagcagtgggccttggtggagtttgaaaagcccgtcacctgtcctcgcctatgtttggtgattggatcaagactggatgcggatatacataccaatacttgccgcctcgccttccatgggatcctgctgcacggtctcgaagaccggaattatgcagattcatttttgcctaggcttaaggtctacaagctgaaacacaaacatggtctggtggaacgagcgatggatgactatagcgtcatagggaggtcactgttcaaaaaggagaccaacatccagctgttcgtcggcttgaaagttcatctgtcaacgggcgagctaggaatcatcgatagcgcctttggccaatctggtaagttcaagatccacataccaggaggcctgagtcccgaatccaaaaagatcctgacacctgctttgaaaaaacgagctagggccggtcggggtgaagctacgagacaagaggagtccgccgagcgttctgagccctctcagcatgtagtcctgagtctcacatttaagaggtacgtgttcgatacgcataagaggatggtccaaagcccttag

SEQ ID NO: 210202 - protein, 470 aa, Artificial Sequence
  derived and/or modified sequence
MFPAGPPSHSLLRLPLLQLLLLVVQAVGRGLGRASPAGGPLEDVVIERYHIPRACPREVQMGDFVRYHYNGTFEDGKKFDSSYDRNTLVAIVVGVGRLITGMDRGLMGMCVNERRRLIVPPHLGYGSIGLAGLIPPDATLYFDVVLLDVWNKEDTVQVSTLLRPPHCPRMVQDGDFVRYHYNGTLLDGTSFDTSYSRNHTYNTYIGQGYIIPGMDQGLQGACMGERRRITIPPHLAYGENGTGDKIPGSAVLIFNVHVIDFHNPADVVEIRTLSRPSETCNETTKLGDFVRYHYNCSLLDGTQLFTSHDYGAPQEATLGANKVIEGLDTGLQGMCVGERRQLIVPPHLAHGESGARGVPGSAVLLFEVELVSREDGLPTGYLFVWHKDPPANLFEDMDLNKDGEVPPEEFSTFIKAQVSEGKGRLMPGQDPEKTIGDMFQNQDRNQDGKITVDELKLKSDEDEERVHEEL

SEQ ID NO: 210203 - protein, 582 aa, Artificial Sequence
  derived and/or modified sequence
MFPAGPPSHSLLRLPLLQLLLLVVQAVGRGLGRASPAGGPLEDVVIERYHIPRACPREVQMGDFVRYHYNGTFEDGKKFDSSYDRNTLVAIVVGVGRLITGMDRGLMGMCVNERRRLIVPPHLGYGSIGLAGLIPPDATLYFDVVLLDVWNKEDTVQVSTLLRPPHCPRMVQDGDFVRYHYNGTLLDGTSFDTSYSKGGTYDTYVGSGWLIKGMDQGLLGMCPGERRKIIIPPFLAYGEKGYGTVIPPQASLVFHVLLIDVHNPKDAVQLETLELPPGCVRRAGAGDFMRYHYNGSLMDGTLFDSSYSRNHTYNTYIGQGYIIPGMDQGLQGACMGERRRITIPPHLAYGENGTGDKIPGSAVLIFNVHVIDFHNPADVVEIRTLSRPSETCNETTKLGDFVRYHYNCSLLDGTQLFTSHDYGAPQEATLGANKVIEGLDTGLQGMCVGERRQLIVPPHLAHGESGARGVPGSAVLLFEVELVSREDGLPTGYLFVWHKDPPANLFEDMDLNKDGEVPPEEFSTFIKAQVSEGKGRLMPGQDPEKTIGDMFQNQDRNQDGKITVDELKLKSDEDEERVHEEL

SEQ ID NO: 210204 - protein, 542 aa, Artificial Sequence
  derived and/or modified sequence
MFPAGPPSHSLLRLPLLQLLLLVVQAVGRGLGRASPAGGPLEDVVIERYHIPRACPREVQMGDFVRYHYNGTFEDGKKFDSSYDRNTLVAIVVGVGRLITGMDRGLMGMCVNERRRLIVPPHLGYGSIGLAGLIPPDATLYFDVVLLDVWNKEDTVQVSTLLRPPHCPRMVQDGDFVRYHYNGTLLDGTSFDTSYSKGGTYDTYVGSGWLIKGMDQGLLGMCPGERRKIIIPPFLAYGEKGYGTVIPPQASLVFHVLLIDVHNPKDAVQLETLELPPGCVRRAGAGDFMRYHYNGSLMDGTLFDSSYSRNHTYNTYIGQGYIIPGMDQGLQGACMGERRRITIPPHLAYGENGTGDKIPGSAVLIFNVHVIDFHNPADVVEIRTLSRPSETCNETTKLGDFVRYHYNCSLLDGTQLFTSHDYGAPQEATLGANKVIEGLDTGLQGMCVGERRQLIVPPHLAHGESGARGVPGSAVLLFEVELVSREDGLPTGYLFVWHKDPPANLFEDMDLNKDGEVPPEEFSTFIKAQVSEGKGPHAWAGP

SEQ ID NO: 210205 - protein, 386 aa, Artificial Sequence
  derived and/or modified sequence
  misc_feature (1)..(1): Xaa can be any naturally occurring amino acid
XIDVHNPKDAVQLETLELPPGCVRRAGAGDFMRYHYNGSLMDGTLFDSSYSRNHTYNTYIGQGYIIPGMDQGLQGACMGERRRITIPPHLAYGENGTDSIGFLQGSAPLRPFRSGEGQPSLGREGGYGKTEPAYPQDPAVLGASVSSPVKWASHADPQGDKIPGSAVLIFNVHVIDFHNPADVVEIRTLSRPSETCNETTKLGDFVRYHYNCSLLDGTQLFTSHDYGAPQEATLGANKVIEGLDTGLQGMCVGERRQLIVPPHLAHGESGARGVPGSAVLLFEVELVSREDGLPTGYLFVWHKDPPANLFEDMDLNKDGEVPPEEFSTFIKAQVSEGKGRLMPGQDPEKTIGDMFQNQDRNQDGKITVDELKLKSDEDEERVHEEL

SEQ ID NO: 210206 - protein, 355 aa, Artificial Sequence
  derived and/or modified sequence
MRYHYNGSLMDGTLFDSSYSRNHTYNTYIGQGYIIPGMDQGLQGACMGERRRITIPPHLAYGENGTDSIGFLQGSAPLRPFRSGEGQPSLGREGGYGKTEPAYPQDPAVLGASVSSPVKWASHADPQGDKIPGSAVLIFNVHVIDFHNPADVVEIRTLSRPSETCNETTKLGDFVRYHYNCSLLDGTQLFTSHDYGAPQEATLGANKVIEGLDTGLQGMCVGERRQLIVPPHLAHGESGARGVPGSAVLLFEVELVSREDGLPTGYLFVWHKDPPANLFEDMDLNKDGEVPPEEFSTFIKAQVSEGKGRLMPGQDPEKTIGDMFQNQDRNQDGKITVDELKLKSDEDEERVHEEL

SEQ ID NO: 210207 - DNA, 2541 bp, Artificial Sequence
  derived and/or modified sequence
cccgagcctctctccctggccaggccccaggtctcgcagccagggatggagatggggggagggggaacctagagttctttgtagtgcctccctcagactctaacacactcagcctggccccctcctcctattgcaaccccctcccccgctcctcccggccaggccagctcagtcttcccagcccccattccacgtggaccagccagggcgggggtagggaaagaggacaggaagagggggagccagttctgggaggcggggggaaggaggttggtggcgactccctcgctcgccctcactgccggcggtcccaactccaggcaccatgttccccgcgggcccccccagccacagcctcctccggctccccctgctgcagttgctgctactggtggtgcaggccgtggggagggggctgggccgcgccagcccggccgggggccccctggaagatgtggtcatcgagaggtaccacatccccagggcctgtccccgggaagtgcagatgggggattttgtgcgctaccactacaacggcacttttgaagatggcaagaagtttgattcaagctatgatcgcaacaccttggtggccatcgtggtgggtgtggggcgcctcatcactggcatggaccgaggcctcatgggcatgtgtgtcaacgagcggcgacgcctcattgtgcctccccacctgggctatgggagcatcggcctggcggggctcattccaccggatgccaccctctacttcgatgtggttctgctggatgtgtggaacaaggaagacaccgtgcaggtgagcacattgctgcgcccgccccactgcccccgcatggtccaggacggcgactttgtccgctaccactacaatggcaccctgctggacggcacctccttcgacaccagctactcccgcaaccacacctacaatacctatatcgggcagggttacatcatccccgggatggaccaggggctgcagggtgcctgcatgggggaacgccggagaattaccatccccccgcacctcgcctatggggagaatggaactggagacaagatccctggctctgccgtgctaatcttcaacgtccatgtcattgacttccacaaccctgcggatgtggtggaaatcaggacactgtcccggccatctgagacctgcaatgagaccaccaagcttggggactttgttcgataccattacaactgttctttgctggacggcacccagctgttcacctcgcatgactacggggccccccaggaggcgactctcggggccaacaaggtgatcgaaggcctggacacgggcctgcagggcatgtgtgtgggagagaggcggcagctcatcgtgcccccgcacctggcccacggggagagtggagcccggggagtcccaggcagtgctgtgctgctgtttgaggtggagctggtgtcccgggaggatgggctgcccacaggctacctgtttgtgtggcacaaggaccctcctgccaacctgtttgaagacatggacctcaacaaggatggcgaggtccctccggaggagttctccaccttcatcaaggctcaagtgagtgagggcaaaggacgcctcatgcctgggcaggaccctgagaaaaccataggagacatgttccagaaccaggaccgcaaccaggacggcaagatcacagtcgacgagctcaagctgaagtcagatgaggacgaggagcgggtccacgaggagctctgaggggcagggagcctggccaggcctgagacacagaggcccactgcgagggggacagtggcggtgggactgacctgctgacagtcaccctccctctgctgggatgaggtccaggagccaactaaaacaatggcagaggagacatctctggtgttcccaccaccctagatgaaaatccacagcacagacctctaccgtgtttctcttccatccctaaaccacttccttaaaatgtttggatttgcaaagccaatttggggcctgtggagcctggggttggatagggccatggctggtcccccaccatacctcccctccacatcactgacacagctgagcttgttatccatctccccaaactttctctttctttgtacttcttgtcatccccactcccagccccttttcctctatgtgacagctccctaggacccctctgccttcctccccaatcctgactggctcctagggaaggggaaggctcctggagggcagccctacctctcccatgccctttgccctcctccctcgcctccagtggaggctgagctgaccctgggctgctggaggccagactgggctgtagttagcttttcatccctaaagaaggctcctttccctaaggaaccatagaagagaggaagaaaacaaagggcatgtgtgagggaagctgcttgggtgggtgttagggctatgaaatcttggatttggggctgaggggtgggagggagggcagagctctgcacactcaaaggctaaactggtgtcagtccttttttcctttgttccaaataaaagattaaacc

SEQ ID NO: 210208 - DNA, 2658 bp, Artificial Sequence
  derived and/or modified sequence
agaggacaggaagagggggagccagttctgggaggcggggggaaggaggttggtggcgactccctcgctcgccctcactgccggcggtcccaactccaggcaccatgttccccgcgggcccccccagccacagcctcctccggctccccctgctgcagttgctgctactggtggtgcaggccgtggggagggggctgggccgcgccagcccggccgggggccccctggaagatgtggtcatcgagaggtaccacatccccagggcctgtccccgggaagtgcagatgggggattttgtgcgctaccactacaacggcacttttgaagatggcaagaagtttgattcaagctatgatcgcaacaccttggtggccatcgtggtgggtgtggggcgcctcatcactggcatggaccgaggcctcatgggcatgtgtgtcaacgagcggcgacgcctcattgtgcctccccacctgggctatgggagcatcggcctggcggggctcattccaccggatgccaccctctacttcgatgtggttctgctggatgtgtggaacaaggaagacaccgtgcaggtgagcacattgctgcgcccgccccactgcccccgcatggtccaggacggcgactttgtccgctaccactacaatggcaccctgctggacggcacctccttcgacaccagctacagtaagggcggcacttatgacacctacgtcggctctggttggctgatcaagggcatggaccaggggctgctgggcatgtgtcctggagagagaaggaagattatcatccctccattcctggcctatggcgagaaaggctatgggacagtgatccccccacaggcctcgctggtctttcacgtcctcctgattgacgtgcacaacccgaaggacgctgtccagctagagacgctggagctcccccccggctgtgtccgcagagccggggccggggacttcatgcgctaccactacaatggctccttgatggacggcaccctcttcgattccagctactcccgcaaccacacctacaatacctatatcgggcagggttacatcatccccgggatggaccaggggctgcagggtgcctgcatgggggaacgccggagaattaccatccccccgcacctcgcctatggggagaatggaactggagacaagatccctggctctgccgtgctaatcttcaacgtccatgtcattgacttccacaaccctgcggatgtggtggaaatcaggacactgtcccggccatctgagacctgcaatgagaccaccaagcttggggactttgttcgataccattacaactgttctttgctggacggcacccagctgttcacctcgcatgactacggggccccccaggaggcgactctcggggccaacaaggtgatcgaaggcctggacacgggcctgcagggcatgtgtgtgggagagaggcggcagctcatcgtgcccccgcacctggcccacggggagagtggagcccggggagtcccaggcagtgctgtgctgctgtttgaggtggagctggtgtcccgggaggatgggctgcccacaggctacctgtttgtgtggcacaaggaccctcctgccaacctgtttgaagacatggacctcaacaaggatggcgaggtccctccggaggagttctccaccttcatcaaggctcaagtgagtgagggcaaaggacgcctcatgcctgggcaggaccctgagaaaaccataggagacatgttccagaaccaggaccgcaaccaggacggcaagatcacagtcgacgagctcaagctgaagtcagatgaggacgaggagcgggtccacgaggagctctgaggggcagggagcctggccaggcctgagacacagaggcccactgcgagggggacagtggcggtgggactgacctgctgacagtcaccctccctctgctgggatgaggtccaggagccaactaaaacaatggcagaggagacatctctggtgttcccaccaccctagatgaaaatccacagcacagacctctaccgtgtttctcttccatccctaaaccacttccttaaaatgtttggatttgcaaagccaatttggggcctgtggagcctggggttggatagggccatggctggtcccccaccatacctcccctccacatcactgacacagctgagcttgttatccatctccccaaactttctctttctttgtacttcttgtcatccccactcccagccccttttcctctatgtgacagctccctaggacccctctgccttcctccccaatcctgactggctcctagggaaggggaaggctcctggagggcagccctacctctcccatgccctttgccctcctccctcgcctccagtggaggctgagctgaccctgggctgctggaggccagactgggctgtagttagcttttcatccctaaagaaggctcctttccctaaggaaccatagaagagaggaagaaaacaaagggcatgtgtgagggaagctgcttgggtgggtgttagggctatgaaatcttggatttggggctgaggggtgggagggagggcagagctctgcacactcaaaggctaaactggtgtcagtccttttttcctttgttccaaataaaagattaaaccaa

SEQ ID NO: 210209 - DNA, 2581 bp, Artificial Sequence
  derived and/or modified sequence
ctcactgccggcggtcccaactccaggcaccatgttccccgcgggcccccccagccacagcctcctccggctccccctgctgcagttgctgctactggtggtgcaggccgtggggagggggctgggccgcgccagcccggccgggggccccctggaagatgtggtcatcgagaggtaccacatccccagggcctgtccccgggaagtgcagatgggggattttgtgcgctaccactacaacggcacttttgaagatggcaagaagtttgattcaagctatgatcgcaacaccttggtggccatcgtggtgggtgtggggcgcctcatcactggcatggaccgaggcctcatgggcatgtgtgtcaacgagcggcgacgcctcattgtgcctccccacctgggctatgggagcatcggcctggcggggctcattccaccggatgccaccctctacttcgatgtggttctgctggatgtgtggaacaaggaagacaccgtgcaggtgagcacattgctgcgcccgccccactgcccccgcatggtccaggacggcgactttgtccgctaccactacaatggcaccctgctggacggcacctccttcgacaccagctacagtaagggcggcacttatgacacctacgtcggctctggttggctgatcaagggcatggaccaggggctgctgggcatgtgtcctggagagagaaggaagattatcatccctccattcctggcctatggcgagaaaggctatgggacagtgatccccccacaggcctcgctggtctttcacgtcctcctgattgacgtgcacaacccgaaggacgctgtccagctagagacgctggagctcccccccggctgtgtccgcagagccggggccggggacttcatgcgctaccactacaatggctccttgatggacggcaccctcttcgattccagctactcccgcaaccacacctacaatacctatatcgggcagggttacatcatccccgggatggaccaggggctgcagggtgcctgcatgggggaacgccggagaattaccatccccccgcacctcgcctatggggagaatggaactggagacaagatccctggctctgccgtgctaatcttcaacgtccatgtcattgacttccacaaccctgcggatgtggtggaaatcaggacactgtcccggccatctgagacctgcaatgagaccaccaagcttggggactttgttcgataccattacaactgttctttgctggacggcacccagctgttcacctcgcatgactacggggccccccaggaggcgactctcggggccaacaaggtgatcgaaggcctggacacgggcctgcagggcatgtgtgtgggagagaggcggcagctcatcgtgcccccgcacctggcccacggggagagtggagcccggggagtcccaggcagtgctgtgctgctgtttgaggtggagctggtgtcccgggaggatgggctgcccacaggctacctgtttgtgtggcacaaggaccctcctgccaacctgtttgaagacatggacctcaacaaggatggcgaggtccctccggaggagttctccaccttcatcaaggctcaagtgagtgagggcaaaggacctcatgcctgggcaggaccctgagaaaaccataggagacatgttccagaaccaggaccgcaaccaggacggcaagatcacagtcgacgagctcaagctgaagtcagatgaggacgaggagcgggtccacgaggagctctgaggggcagggagcctggccaggcctgagacacagaggcccactgcgagggggacagtggcggtgggactgacctgctgacagtcaccctccctctgctgggatgaggtccaggagccaactaaaacaatggcagaggagacatctctggtgttcccaccaccctagatgaaaatccacagcacagacctctaccgtgtttctcttccatccctaaaccacttccttaaaatgtttggatttgcaaagccaatttggggcctgtggagcctggggttggatagggccatggctggtcccccaccatacctcccctccacatcactgacacagctgagcttgttatccatctccccaaactttctctttctttgtacttcttgtcatccccactcccagccccttttcctctatgtgacagctccctaggacccctctgccttcctccccaatcctgactggctcctagggaaggggaaggctcctggagggcagccctacctctcccatgccctttgccctcctccctcgcctccagtggaggctgagctgaccctgggctgctggaggccagactgggctgtagttagcttttcatccctaaagaaggctcctttccctaaggaaccatagaagagaggaagaaaacaaagggcatgtgtgagggaagctgcttgggtgggtgttagggctatgaaatcttggatttggggctgaggggtgggagggagggcagagctctgcacactcaaaggctaaactggtgtcagtccttttttcctttgttccaaataaaagattaaacc

SEQ ID NO: 210210 - DNA, 398 bp, Artificial Sequence
  derived and/or modified sequence
gtagtgcctccctcagactctaacacactcagcctggccccctcctcctattgcaaccccctcccccgctcctcccggccaggccagctcagtcttcccagcccccattccacgtggaccagccagggcggggggcctgtccccgggaagtgcagatgggggattttgtgcgctaccactacaacggcacttttgaagatggcaagaagtttgattcaagctatgatcgcaacaccttggtggccatcgtggtgggtgtggggcgcctcatcactggcatggaccgaggcctcatgggcatgtgtgtcaacgagcggcgacgcctcattgtgcctccccacctgggctatgggagcatcggcctggcggggctcattccaccggatgccaccctctac

SEQ ID NO: 210211 - DNA, 1965 bp, Artificial Sequence
  derived and/or modified sequence
tgattgacgtgcacaacccgaaggacgctgtccagctagagacgctggagctcccccccggctgtgtccgcagagccggggccggggacttcatgcgctaccactacaatggctccttgatggacggcaccctcttcgattccagctactcccgcaaccacacctacaatacctatatcgggcagggttacatcatccccgggatggaccaggggctgcagggtgcctgcatgggggaacgccggagaattaccatccccccgcacctcgcctatggggagaatggaactgactccatcggtttcctccagggcagcgccccacttcgccccttccgcagtggagaagggcagccaagtttggggagggagggtggttatggaaaaacagaaccagcatacccccaggacccagctgtgctgggagcctcagtgtcctcacctgtcaagtgggcaagccatgctgatccgcagggagacaagatccctggctctgccgtgctaatcttcaacgtccatgtcattgacttccacaaccctgcggatgtggtggaaatcaggacactgtcccggccatctgagacctgcaatgagaccaccaagcttggggactttgttcgataccattacaactgttctttgctggacggcacccagctgttcacctcgcatgactacggggccccccaggaggcgactctcggggccaacaaggtgatcgaaggcctggacacgggcctgcagggcatgtgtgtgggagagaggcggcagctcatcgtgcccccgcacctggcccacggggagagtggagcccggggagtcccaggcagtgctgtgctgctgtttgaggtggagctggtgtcccgggaggatgggctgcccacaggctacctgtttgtgtggcacaaggaccctcctgccaacctgtttgaagacatggacctcaacaaggatggcgaggtccctccggaggagttctccaccttcatcaaggctcaagtgagtgagggcaaaggacgcctcatgcctgggcaggaccctgagaaaaccataggagacatgttccagaaccaggaccgcaaccaggacggcaagatcacagtcgacgagctcaagctgaagtcagatgaggacgaggagcgggtccacgaggagctctgaggggcagggagcctggccaggcctgagacacagaggcccactgcgagggggacagtggcggtgggactgacctgctgacagtcaccctccctctgctgggatgaggtccaggagccaactaaaacaatggcagaggagacatctctggtgttcccaccaccctagatgaaaatccacagcacagacctctaccgtgtttctcttccatccctaaaccacttccttaaaatgtttggatttgcaaagccaatttggggcctgtggagcctggggttggatagggccatggctggtcccccaccatacctcccctccacatcactgacacagctgagcttgttatccatctccccaaactttctctttctttgtacttcttgtcatccccactcccagccccttttcctctatgtgacagctccctaggacccctctgccttcctccccaatcctgactggctcctagggaaggggaaggctcctggagggcagccctacctctcccatgccctttgccctcctccctcgcctccagtggaggctgagctgaccctgggctgctggaggccagactgggctgtagttagcttttcatccctaaagaaggctcctttccctaaggaaccatagaagagaggaagaaaacaaagggcatgtgtgagggaagctgcttgggtgggtgttagggctatgaaatcttggatttggggctgaggggtgggagggagggcagagctctgcacactcaaaggctaaactggtgtcagtccttttttcctttgttccaaataaaagattaaaccaa

SEQ ID NO: 210212 - DNA, 1926 bp, Artificial Sequence
  derived and/or modified sequence
agagacgctggagctcccccccggctgtgtccgcagagccggggccggggacttcatgcgctaccactacaatggctccttgatggacggcaccctcttcgattccagctactcccgcaaccacacctacaatacctatatcgggcagggttacatcatccccgggatggaccaggggctgcagggtgcctgcatgggggaacgccggagaattaccatccccccgcacctcgcctatggggagaatggaactgactccatcggtttcctccagggcagcgccccacttcgccccttccgcagtggagaagggcagccaagtttggggagggagggtggttatggaaaaacagaaccagcatacccccaggacccagctgtgctgggagcctcagtgtcctcacctgtcaagtgggcaagccatgctgatccgcagggagacaagatccctggctctgccgtgctaatcttcaacgtccatgtcattgacttccacaaccctgcggatgtggtggaaatcaggacactgtcccggccatctgagacctgcaatgagaccaccaagcttggggactttgttcgataccattacaactgttctttgctggacggcacccagctgttcacctcgcatgactacggggccccccaggaggcgactctcggggccaacaaggtgatcgaaggcctggacacgggcctgcagggcatgtgtgtgggagagaggcggcagctcatcgtgcccccgcacctggcccacggggagagtggagcccggggagtcccaggcagtgctgtgctgctgtttgaggtggagctggtgtcccgggaggatgggctgcccacaggctacctgtttgtgtggcacaaggaccctcctgccaacctgtttgaagacatggacctcaacaaggatggcgaggtccctccggaggagttctccaccttcatcaaggctcaagtgagtgagggcaaaggacgcctcatgcctgggcaggaccctgagaaaaccataggagacatgttccagaaccaggaccgcaaccaggacggcaagatcacagtcgacgagctcaagctgaagtcagatgaggacgaggagcgggtccacgaggagctctgaggggcagggagcctggccaggcctgagacacagaggcccactgcgagggggacagtggcggtgggactgacctgctgacagtcaccctccctctgctgggatgaggtccaggagccaactaaaacaatggcagaggagacatctctggtgttcccaccaccctagatgaaaatccacagcacagacctctaccgtgtttctcttccatccctaaaccacttccttaaaatgtttggatttgcaaagccaatttggggcctgtggagcctggggttggatagggccatggctggtcccccaccatacctcccctccacatcactgacacagctgagcttgttatccatctccccaaactttctctttctttgtacttcttgtcatccccactcccagccccttttcctctatgtgacagctccctaggacccctctgccttcctccccaatcctgactggctcctagggaaggggaaggctcctggagggcagccctacctctcccatgccctttgccctcctccctcgcctccagtggaggctgagctgaccctgggctgctggaggccagactgggctgtagttagcttttcatccctaaagaaggctcctttccctaaggaaccatagaagagaggaagaaaacaaagggcatgtgtgagggaagctgcttgggtgggtgttagggctatgaaatcttggatttggggctgaggggtgggagggagggcagagctctgcacactcaaaggctaaactggtgtcagtccttttttcctttgttccaaataaaagattaaacc

SEQ ID NO: 210213 - DNA, 1413 bp, Artificial Sequence
  derived and/or modified sequence
atgttcccagccgggcccccttcccattctcttcttcgactccccctcctgcagttactgctgctcgtagttcaggccgtaggaaggggcttgggacgggcttcgccagccggtggacctttagaagacgtcgtcatcgagcggtaccatattccaagggcatgcccccgggaggtgcagatgggggatttcgtacggtatcattacaacggaacattcgaagacggtaagaaattcgattcctcatatgatagaaacacgttggttgccatcgtggtcggcgtgggccggctgattactgggatggatcgcggactgatgggaatgtgtgtcaacgaaagacggcgcctgatagttcccccccacctcgggtacgggtccataggtctagctggtctcatcccgccagatgccaccctatattttgacgttgtgctcttagatgtatggaacaaggaagataccgttcaggtgagtacactattaagaccacctcactgtccccgaatggtgcaggacggggacttcgtgagataccactataatggaactctcttagatggcaccagcttcgataccagttacagtcgcaaccatacatataacacgtatattgggcaaggttatatcattcccggcatggaccaaggccttcagggcgcttgcatgggggagagacgccgtattacaatccctcctcatctcgcatatggtgagaacggcactggagacaagatccccggctctgccgtactcatttttaatgtgcacgtgattgacttccataaccctgcagatgtggtggagattcgtacgctctcgcgaccatctgagacttgcaacgaaacaacaaagctcggggacttcgttcgctaccactataattgctccctgttggacgggacacaactgttcaccagccatgattatggggcccctcaagaggccaccctcggggctaacaaagtcatagagggcctggacactggtctgcagggcatgtgtgtcggggaaagaagacagctgattgtaccacctcatcttgcccacggcgagagcggagcacgaggagtgcctgggagcgccgtcctgctttttgaagtcgaacttgtcagcagggaggacgggctccccactgggtatctgttcgtatggcataaggacccgcccgctaacctgttcgaagatatggacctgaacaaggacggagaagtacctcctgaggagttctccacatttatcaaggcacaggtatctgagggcaagggcagattaatgccaggacaggacccggagaagacaattggggacatgttccaaaaccaagatcgcaatcaggatggtaaaattactgttgatgagctaaaactaaaaagcgacgaagatgaggaacgggtccacgaggaactgtag

SEQ ID NO: 210214 - DNA, 1749 bp, Artificial Sequence
  derived and/or modified sequence
atgttcccagctggacctccctcacactccctactgagacttcctcttctccaactgttgctgttagtggtacaggctgtgggcagaggactgggccgggccagccccgcaggcggacctctggaggacgtcgtaatcgaacgctatcatattcctcgcgcctgtccacgcgaggtgcagatgggtgacttcgtgcgatatcactacaacggtacctttgaggatggtaaaaagttcgacagttcatacgataggaataccctggtagccatcgttgtaggggtaggcagattaatcaccgggatggaccggggcctgatgggaatgtgtgtgaacgagcggaggcggctgatcgtgcccccacatctgggttatgggagcatcggcctcgccggcttgataccccctgacgccaccctgtactttgatgttgtgctgttagacgtgtggaacaaggaagataccgtccaggtgtcaaccctgcttcgccctccccattgtccgagaatggtgcaggatggtgacttcgtgcggtaccattacaacggcaccctgctagacggtacctctttcgacacgtcttacagtaaaggaggaacgtacgatacatacgtcggttctggatggctgattaagggaatggaccaagggttgctgggtatgtgtcctggggagcgccggaaaatcattattcccccctttctggcttatggtgagaagggctatggcaccgtaatacctccacaagcatcccttgtattccatgtgctcctgatagacgtccacaatccaaaagacgccgtgcagctggaaacactggagctaccccctgggtgtgtgcggcgggccggggccggcgactttatgcggtaccactataacgggagtctgatggacggtactctttttgacagcagttactctcgcaatcatacgtacaatacgtacattgggcaggggtacatcatccctggtatggaccagggccttcaaggtgcctgcatgggggagaggcgaagaattaccatccctccacatttggcttatggtgagaacgggactggcgataagatccccgggtcagccgtccttatattcaacgtccacgtaatcgactttcacaatcctgccgatgtggtggagatcaggaccctttctaggcctagcgaaacgtgtaatgagactacaaaactgggcgacttcgtccgataccactacaactgctcgcttctggacggcactcagctgttcacaagccatgactacggagcccctcaagaagcaacactcggggccaacaaggttattgagggcttagacacggggttgcaaggaatgtgcgtcggcgagcgtagacaactcatcgtacccccccacttggcacatggtgaaagcggcgcacggggcgtgccgggctctgcagttttgctttttgaagtcgaactcgtgagtcgggaagacggtctgcctaccgggtacttgtttgtgtggcataaggatcctcctgctaacctgtttgaagatatggatctcaacaaggatggggaagtcccaccagaagagttttccacatttatcaaagctcaagtctctgagggaaaaggccgcctgatgcccgggcaagatcctgaaaagaccataggcgacatgttccagaaccaggataggaaccaggacggaaagattaccgtggatgaattgaagttgaagagcgatgaagatgaggagagggtacacgaagaactgtag

SEQ ID NO: 210215 - DNA, 1629 bp, Artificial Sequence
  derived and/or modified sequence
atgtttcctgctgggccgccatcccacagccttctgcgcctgcctcttctgcagctattgctgctcgttgtgcaggccgttgggcggggcttagggcgggcttcccccgctggcggtcccctcgaggacgtggtgatcgagagataccatatcccgcgggcatgcccccgtgaagtccagatgggcgattttgtgaggtatcactacaacggaacctttgaagatggtaagaaattcgattcctcttatgaccgcaacacactggtagcaattgtggttggagtcgggaggctaattactgggatggaccggggactcatggggatgtgtgtcaatgaacggcgcagactgattgtccctccccatttgggctatggctctatcggattagctggcctcatccccccagacgctacattgtactttgacgtggtgctattggacgtgtggaacaaggaggacactgtgcaggtctcgacgctcttacggccaccacactgccctaggatggtgcaagatggagatttcgtgcgctatcattataacgggacactacttgatggaacctcattcgacacaagttacagcaagggcgggacgtacgatacttacgtagggtctgggtggctcattaagggcatggatcagggattgctggggatgtgtccaggggaacgtagaaagattatcatcccaccattcctggcttacggggagaaaggatatggaaccgttatcccaccacaggcatcccttgtcttccacgtgcttctgatcgacgtgcataaccccaaagacgccgtgcaactggaaacgctcgagcttcctcctggctgcgtgcgacgggccggggctggagattttatgcgttatcattacaacggttctctgatggacggcactctcttcgattcttcatactcaaggaaccatacgtacaatacctatatcggccaagggtacatcattcccggcatggatcaagggctgcaaggggcatgcatgggtgagaggaggagaataacaattccgcctcatctcgcatacggggaaaatgggacaggtgataaaataccaggtagcgccgtcttgattttcaacgtgcacgtcattgacttccacaacccagcagatgtagtcgaaattaggacactgtcacggcctagcgagacgtgcaacgagaccaccaaactcggagacttcgtgagataccactataattgtagcctgctcgatggtacgcagctgttcacgtctcacgattacggagcaccgcaagaggccacgctgggggctaataaagtcatcgaagggctggacacaggcctgcagggtatgtgcgtcggggaacgcagacagcttatagtgccaccacacttggctcatggggaatcaggcgctcgaggcgtgcctggtagtgctgtgctcctctttgaggtggaactggtctcccgagaagacgggttaccaaccggatatctgttcgtatggcacaaagacccgcccgcgaacctgttcgaagacatggatctgaacaaggacggtgaggtgccacccgaggaattttcaacctttattaaagcccaggtgtccgaggggaagggtccccacgcgtgggcagggccatag

SEQ ID NO: 210216 - DNA, 246 bp, Artificial Sequence
  derived and/or modified sequence
atgggtgatttcgtacgctaccactataacggcacctttgaggacgggaaaaaattcgattcctcttacgaccggaacacattggtggccattgttgttggcgtgggcaggcttattacggggatggacagggggctaatggggatgtgcgtgaatgaaaggagacggcttatcgtccccccacatctgggatatggctctatagggctggcaggactgatcccgcccgatgcgacactctattag

SEQ ID NO: 210217 - DNA, 1161 bp, Artificial Sequence
  derived and/or modified sequence
tgaatcgacgtgcacaaccccaaagatgcagtccagctcgagacattggaactccctccaggctgtgtgcgcagggcgggagccggcgactttatgagataccattataatggttccttgatggacgggacccttttcgattcctcttatagcagaaaccatacatataacacttacattggacaaggctatatcatccccggcatggaccagggcctccagggcgcctgcatgggagaaaggcgtagaattactatccccccacaccttgcctacggggaaaacggaacagactctataggctttcttcagggctctgcccccctacgtcctttcagaagcggcgaaggacaacccagtctaggtcgcgaagggggctatggtaagaccgaacccgcgtaccctcaggatcccgcagttttgggggcctcagtttcttctcccgtgaagtgggcaagtcacgcagatccacagggggataaaatcccaggatccgctgtgcttatatttaacgtgcacgtgatcgatttccataacccagctgacgtggtggaaattcgtacgctgagccgaccatcagagacatgcaacgaaaccactaaattgggagactttgtgagatatcattataattgttcacttctagatggcacccaactgttcacgtcacatgattatggcgccccccaggaggctaccctaggtgcaaacaaagtcattgagggactcgacacaggcctccagggaatgtgtgtgggagagcggcggcagctcattgtccctccacatcttgcccacggcgagtcaggggcacggggtgtaccagggtccgctgtcctgctctttgaagtcgagcttgtttctagggaagacggactgcccacaggatatctctttgtgtggcataaggaccccccagcaaatctgttcgaggacatggacttgaataaagatggcgaagtcccccccgaagagttctctacttttattaaggctcaggtgagcgaaggcaagggacggctcatgccaggacaggacccagagaagactataggcgacatgttccagaatcaagatagaaatcaggacggtaagataacagtggatgaactgaagctgaagagtgatgaagacgaagaacgcgttcacgaggagttgtag

SEQ ID NO: 210218 - DNA, 1068 bp, Artificial Sequence
  derived and/or modified sequence
atgaggtaccattacaatgggtctctgatggacgggactctgtttgattcatcttacagcagaaatcacacctacaacacatatatcggccaggggtacattatcccaggaatggatcagggcctgcagggcgcctgcatgggagaacggaggcgcattacgatacctccccacctcgcatacggcgagaacggaacggacagtattggctttctgcagggcagcgccccactaagacccttccgctccggggaaggtcagcctagtttagggcgcgagggcggatatgggaagactgagcctgcttatccacaggacccagcggtgttgggcgccagtgtgtcgtcacctgtgaaatgggcatcgcatgccgatccgcagggtgacaagatcccaggatcagcggtgttgattttcaatgtccacgtcattgattttcacaaccccgccgatgtggtggaaatccggacattgtcaaggcccagtgagacttgcaacgaaactacgaaactcggagatttcgtacgttaccattataactgctcactcctggacggcacacagctgttcacatctcatgactacggtgccccacaagaagccactttgggtgctaataaagtgattgaaggactggacaccggtctacaaggaatgtgcgtcggtgagcgaagacagctcatagtccctccccatcttgcacacggggagagcggcgcacgaggggtgcccgggtctgccgtgcttctgttcgaagtggagttggtctctagggaggatggcttacctacaggatatctttttgtgtggcacaaagacccacccgccaatttgttcgaagatatggatctcaacaaagatggcgaggtgccgcccgaggaattttcaactttcatcaaggcccaggtgagcgaggggaagggtcgactcatgccgggccaagatcctgaaaaaacgatcggcgacatgttccagaaccaggataggaaccaggatggcaaaatcactgttgatgagctgaaattaaagagcgatgaggacgaagagagggttcatgaagagctctag

SEQ ID NO: 210219 - DNA, 1413 bp, Artificial Sequence
  derived and/or modified sequence
atgtttcctgctggcccccccagccacagcctgctgcggctgcccctgctgcagctgctgctgctggtggtgcaggccgtgggccggggcctgggccgggccagccctgctgggggccccctggaggatgtggtgattgaaagataccacatcccccgggcctgcccccgggaggtgcagatgggagactttgtgcgctaccactacaacggcacctttgaagatggcaagaagtttgacagcagctatgacaggaacaccctggtggccatcgtggtgggcgtgggccgcctcatcaccggcatggaccggggcctgatgggcatgtgtgtgaatgaaagaagaagactcatcgtgcccccccacctgggctacggcagcatcggcctggccggcctcatccccccagatgccaccctgtactttgatgtggtgctgctggatgtgtggaacaaggaggacacagtgcaggtgtccaccctgctgcggcccccccactgccccaggatggtgcaggatggagactttgtgcgctaccactacaacggcaccctgctggatggcaccagctttgacaccagctacagcaggaaccacacctacaacacctacatcggccagggctacatcatccctggcatggaccagggcctgcagggcgcctgcatgggagagcggcggcgcatcaccatccccccccacctggcctatggagaaaatggcaccggggacaagatccctggcagcgctgtgctgatcttcaacgtgcacgtgattgacttccacaacccagcagatgtggtggagatccgcaccctgagccggcccagcgagacctgcaatgagaccaccaagctgggggactttgtgcgctaccactacaactgcagcctgctggatggcacccagctgttcaccagccatgactatggagccccccaggaggccaccctgggcgccaacaaggtgattgagggcctggacaccggcctgcagggcatgtgtgtgggggagcggcggcagctgattgtgcccccccacctggcccacggggagagcggggcccggggcgtgcccggcagcgctgtgctgctgtttgaggtggagctggtgtcccgggaggatggcctgcccaccggctacctgtttgtgtggcacaaggaccccccagccaacctgtttgaggacatggacctgaacaaggatggagaggtgcccccagaggagttcagcaccttcatcaaggcccaggtgtctgagggcaagggccgcctgatgcctggccaggaccctgagaagaccatcggggacatgttccagaaccaggacaggaaccaggacggcaagatcaccgtggatgagctgaagctgaagagtgatgaagatgaggagcgggtgcatgaggagctgtag

SEQ ID NO: 210220 - DNA, 1749 bp, Artificial Sequence
  derived and/or modified sequence
atgtttcctgctggcccccccagccacagcctgctgcggctgcccctgctgcagctgctgctgctggtggtgcaggccgtgggccggggcctgggccgggccagccctgctgggggccccctggaggatgtggtgattgaaagataccacatcccccgggcctgcccccgggaggtgcagatgggagactttgtgcgctaccactacaacggcacctttgaagatggcaagaagtttgacagcagctatgacaggaacaccctggtggccatcgtggtgggcgtgggccgcctcatcaccggcatggaccggggcctgatgggcatgtgtgtgaatgaaagaagaagactcatcgtgcccccccacctgggctacggcagcatcggcctggccggcctcatccccccagatgccaccctgtactttgatgtggtgctgctggatgtgtggaacaaggaggacacagtgcaggtgtccaccctgctgcggcccccccactgccccaggatggtgcaggatggagactttgtgcgctaccactacaacggcaccctgctggatggcaccagctttgacaccagctacagcaaaggaggcacctatgacacctacgtgggcagcggctggctgatcaagggcatggaccagggcctgctgggcatgtgccctggagagaggaggaagatcatcatcccccccttcctggcctatggagagaagggctacggcaccgtcatccccccccaggccagcctggtgttccacgtgctgctgattgatgtgcacaaccccaaggatgctgtgcagctggagaccctggagctgcccccaggctgtgtgagaagagctggagctggggacttcatgagataccactacaacggcagcctgatggatggcaccctgtttgacagcagctacagcaggaaccacacctacaacacctacatcggccagggctacatcatccctggcatggaccagggcctgcagggcgcctgcatgggagagcggcggcgcatcaccatccccccccacctggcctatggagaaaatggcaccggggacaagatccctggcagcgctgtgctgatcttcaacgtgcacgtgattgacttccacaacccagcagatgtggtggagatccgcaccctgagccggcccagcgagacctgcaatgagaccaccaagctgggggactttgtgcgctaccactacaactgcagcctgctggatggcacccagctgttcaccagccatgactatggagccccccaggaggccaccctgggcgccaacaaggtgattgagggcctggacaccggcctgcagggcatgtgtgtgggggagcggcggcagctgattgtgcccccccacctggcccacggggagagcggggcccggggcgtgcccggcagcgctgtgctgctgtttgaggtggagctggtgtcccgggaggatggcctgcccaccggctacctgtttgtgtggcacaaggaccccccagccaacctgtttgaggacatggacctgaacaaggatggagaggtgcccccagaggagttcagcaccttcatcaaggcccaggtgtctgagggcaagggccgcctgatgcctggccaggaccctgagaagaccatcggggacatgttccagaaccaggacaggaaccaggacggcaagatcaccgtggatgagctgaagctgaagagtgatgaagatgaggagcgggtgcatgaggagctgtag

SEQ ID NO: 210221 - DNA, 1629 bp, Artificial Sequence
  derived and/or modified sequence
atgtttcctgctggcccccccagccacagcctgctgcggctgcccctgctgcagctgctgctgctggtggtgcaggccgtgggccggggcctgggccgggccagccctgctgggggccccctggaggatgtggtgattgaaagataccacatcccccgggcctgcccccgggaggtgcagatgggagactttgtgcgctaccactacaacggcacctttgaagatggcaagaagtttgacagcagctatgacaggaacaccctggtggccatcgtggtgggcgtgggccgcctcatcaccggcatggaccggggcctgatgggcatgtgtgtgaatgaaagaagaagactcatcgtgcccccccacctgggctacggcagcatcggcctggccggcctcatccccccagatgccaccctgtactttgatgtggtgctgctggatgtgtggaacaaggaggacacagtgcaggtgtccaccctgctgcggcccccccactgccccaggatggtgcaggatggagactttgtgcgctaccactacaacggcaccctgctggatggcaccagctttgacaccagctacagcaaaggaggcacctatgacacctacgtgggcagcggctggctgatcaagggcatggaccagggcctgctgggcatgtgccctggagagaggaggaagatcatcatcccccccttcctggcctatggagagaagggctacggcaccgtcatccccccccaggccagcctggtgttccacgtgctgctgattgatgtgcacaaccccaaggatgctgtgcagctggagaccctggagctgcccccaggctgtgtgagaagagctggagctggggacttcatgagataccactacaacggcagcctgatggatggcaccctgtttgacagcagctacagcaggaaccacacctacaacacctacatcggccagggctacatcatccctggcatggaccagggcctgcagggcgcctgcatgggagagcggcggcgcatcaccatccccccccacctggcctatggagaaaatggcaccggggacaagatccctggcagcgctgtgctgatcttcaacgtgcacgtgattgacttccacaacccagcagatgtggtggagatccgcaccctgagccggcccagcgagacctgcaatgagaccaccaagctgggggactttgtgcgctaccactacaactgcagcctgctggatggcacccagctgttcaccagccatgactatggagccccccaggaggccaccctgggcgccaacaaggtgattgagggcctggacaccggcctgcagggcatgtgtgtgggggagcggcggcagctgattgtgcccccccacctggcccacggggagagcggggcccggggcgtgcccggcagcgctgtgctgctgtttgaggtggagctggtgtcccgggaggatggcctgcccaccggctacctgtttgtgtggcacaaggaccccccagccaacctgtttgaggacatggacctgaacaaggatggagaggtgcccccagaggagttcagcaccttcatcaaggcccaggtgtctgagggcaagggcccccacgcctgggccggcccctag

SEQ ID NO: 210222 - DNA, 246 bp, Artificial Sequence
  derived and/or modified sequence
atgggagactttgtgcgctaccactacaacggcacctttgaagatggcaagaagtttgacagcagctatgacaggaacaccctggtggccatcgtggtgggcgtgggccgcctcatcaccggcatggaccggggcctgatgggcatgtgtgtgaatgaaagaagaagactcatcgtgcccccccacctgggctacggcagcatcggcctggccggcctcatccccccagatgccaccctgtactag

SEQ ID NO: 210223 - DNA, 1161 bp, Artificial Sequence
  derived and/or modified sequence
tgaattgatgtgcacaaccccaaggatgctgtgcagctggagaccctggagctgcccccaggctgtgtgcggcgggccggggccggggacttcatgagataccactacaacggcagcctgatggatggcaccctgtttgacagcagctacagcaggaaccacacctacaacacctacatcggccagggctacatcatccctggcatggaccagggcctgcagggcgcctgcatgggagagcggcggcgcatcaccatccccccccacctggcctacggggagaatggaacagacagcatcggcttcctgcagggcagcgcccccctgcggcccttccgcagcggggagggccagcccagcctgggccgggagggcggctacggcaagacagagcccgcctacccccaggaccctgctgtgctgggcgcctctgtgagcagccctgtgaagtgggccagccatgctgacccccagggcgacaagatccctggcagcgctgtgctgatcttcaacgtgcacgtgattgacttccacaacccagcagatgtggtggagatccgcaccctgagccggcccagcgagacctgcaatgagaccaccaagctgggggactttgtgcgctaccactacaactgcagcctgctggatggcacccagctgttcaccagccatgactatggagccccccaggaggccaccctgggcgccaacaaggtgattgagggcctggacaccggcctgcagggcatgtgtgtgggggagcggcggcagctgattgtgcccccccacctggcccacggggagagcggggcccggggcgtgcccggcagcgctgtgctgctgtttgaggtggagctggtgtcccgggaggatggcctgcccaccggctacctgtttgtgtggcacaaggaccccccagccaacctgtttgaggacatggacctgaacaaggatggagaggtgcccccagaggagttcagcaccttcatcaaggcccaggtgtctgagggcaagggccgcctgatgcctggccaggaccctgagaagaccatcggggacatgttccagaaccaggacaggaaccaggacggcaagatcaccgtggatgagctgaagctgaagagtgatgaagatgaggagcgggtgcatgaggagctgtag

SEQ ID NO: 210224 - DNA, 1068 bp, Artificial Sequence
  derived and/or modified sequence
atgagataccactacaacggcagcctgatggatggcaccctgtttgacagcagctacagcaggaaccacacctacaacacctacatcggccagggctacatcatccctggcatggaccagggcctgcagggcgcctgcatgggagagcggcggcgcatcaccatccccccccacctggcctatggagaaaatggaacagacagcatcggcttcctgcagggcagcgcccccctgcggcccttccgctctggagagggccagcccagcctgggccgggagggcggctacggcaagacagagcccgcctacccccaggaccctgctgtgctgggcgcctctgtgagcagccctgtgaagtgggccagccacgccgacccccagggcgacaagatccctggcagcgctgtgctgatcttcaacgtgcacgtgattgacttccacaacccagcagatgtggtggagatccgcaccctgagccggcccagcgagacctgcaatgagaccaccaagctgggggactttgtgcgctaccactacaactgcagcctgctggatggcacccagctgttcaccagccatgactatggagccccccaggaggccaccctgggcgccaacaaggtgattgagggcctggacaccggcctgcagggcatgtgtgtgggggagcggcggcagctgattgtgcccccccacctggcccatggagagagcggggcccggggcgtgcccggcagcgctgtgctgctgtttgaggtggagctggtgtccagagaagatggcctgcccaccggctacctgtttgtgtggcacaaggaccccccagccaacctgtttgaggacatggacctgaacaaggatggagaggtgcccccagaggagttcagcaccttcatcaaggcccaggtgtctgagggcaagggccgcctgatgcctggccaggaccctgagaagaccatcggggacatgttccagaaccaggacaggaaccaggacggcaagatcaccgtggatgagctgaagctgaagagtgatgaagatgaggagcgggtgcatgaggagctgtag

SEQ ID NO: 210225 - DNA, 1413 bp, Artificial Sequence
  derived and/or modified sequence
atgttccccgccggcccccccagccacagcctgctgcggctgcccctgctgcagctgctgctcctggtggttcaggcagtgggccgagggctgggccgagcatcaccagctggcggacccctcgaagacgttgttatagagcgctatcatattcctcgtgcctgtccaagggaggtacaaatgggcgacttcgttcgctaccattacaacggcacattcgaagatgggaagaagttcgattcctcttacgacagaaatacattggtggctatcgtcgtcggagtgggcaggctgataaccggcatggaccgcgggttgatggggatgtgtgttaacgagaggaggagactcattgtgcccccacacctggggtatggttccattggcttggcaggcctaatccctccagacgctaccctctattttgatgttgttctgctggatgtatggaataaagaggatactgtgcaggtcagtactctgctgcgccctccccattgcccccgaatggtgcaggacggagattttgtgagatatcactataacggcacgctacttgacgggacctcattcgatacgagctactcaaggaaccacacatacaatacatacatcggtcagggctacatcattcctgggatggaccaaggcctacaaggcgcatgcatgggtgaaagaagacggatcacaattccacctcatttggcttacggggaaaatgggaccggggataagatacccgggagcgctgttcttattttcaacgttcatgtgatcgatttccataaccctgctgacgtggtggaaattaggaccctgtctagaccgagtgaaacatgtaatgagaccacaaaactaggagatttcgtgcgttaccactacaactgttccctattggatggaactcagctgtttacaagccacgattacggggccccgcaggaggccaccctcggtgccaataaggtgattgagggcttagacactgggcttcaggggatgtgtgtaggcgagaggaggcaacttatcgtgcctccgcacctcgcccacggcgaatctggggcacggggggtgccggggtcagccgtgttgttgttcgaggtggagcttgtaagccgcgaggatggcctccctacgggctatctgttcgtctggcataaggacccgccggccaatctgttcgaggacatggacctaaacaaagatggggaagttccacctgaggaattctccacttttatcaaggcacaggttagcgaaggcaagggcagactcatgcctggccaggatccggagaagacgatcggcgacatgttccaaaatcaggataggaaccaggatggcaagattaccgtggacgaactgaaactcaagagtgatgaggacgaagaacgggtccacgaggaactatag

SEQ ID NO: 210226 - DNA, 1749 bp, Artificial Sequence
  derived and/or modified sequence
atgttccccgccggcccccccagccacagcctgctgcggctgccccttcttcagttgcttcttctagtcgtgcaggctgtgggcaggggactgggccgcgccagtccagcaggcggacccttggaggatgtggtgatagagaggtaccatattccccgcgcctgtccccgggaggtacagatgggagatttcgtgcgttatcactataatggcacattcgaggacggcaagaaattcgactcctcctatgataggaatactctcgtggctattgtagtgggagtgggtcggctaataacggggatggacagggggctaatgggtatgtgcgtcaacgagcgcaggcggctgatcgtgcccccccacctaggatacgggagtatcggattggcggggctgatcccccctgatgctacactctattttgacgtcgtgctgctggacgtttggaacaaggaagatacagtacaggtctccactctcttgcgccctcctcattgccctcgcatggtccaggatggcgactttgtcagatatcactataacggtactttgctggatggaacgtcttttgacacttcctacagcaagggagggacttatgatacgtatgtgggatcagggtggctgatcaaggggatggatcaggggctgctgggcatgtgtcctggggaacggagaaagattatcatccctccctttctggcgtacggcgagaaaggctatggaactgtgatccctccccaggcttctctggtgttccatgtactgctgatcgacgtgcacaacccgaaggatgctgtccagttggaaaccctcgagttaccgccgggatgcgttcgacgggcaggtgccggagactttatgagataccattataacggctccttgatggacggcaccttatttgattcttcgtacagcaggaaccacacctacaatacctacatcggtcagggatacatcatcccagggatggatcagggtttacagggcgcatgcatgggggaacggcggaggattaccattcctcctcatttggcctacggagaaaatggaaccggtgataagatacccggctcagcagttcttatttttaacgtccacgtaattgatttccataaccctgctgatgtcgtcgaaattcgtaccctctcccggcctagtgaaacgtgtaacgaaaccacaaaactcggagacttcgtacggtatcactacaactgcagtttactggatggcacccagttgttcacttcccacgactacggtgcaccccaggaggcaacacttggagccaataaggtgatagaaggcctggatacaggcttacagggaatgtgcgtgggggagcgccgccagctgatcgtgcccccccaccttgcacatggcgaatcaggggcacgcggcgtgccagggtctgcagttctgttatttgaagttgaacttgtatccagggaagatgggttacccacagggtacctgttcgtatggcacaaggatccccccgccaacttgtttgaggacatggacttaaacaaagacggcgaggtccccccagaggaattctccacctttattaaagcgcaagtgtccgagggaaagggaaggctcatgccagggcaggaccccgaaaaaacaataggggatatgtttcagaatcaggaccgcaaccaggatggtaagattacagtggacgaactaaaactgaagtcagatgaggatgaggagcgtgtgcacgaggaattatag

SEQ ID NO: 210227 - DNA, 1629 bp, Artificial Sequence
  derived and/or modified sequence
atgttccccgccggcccccccagccacagcctgctgcggctgcccctcttacagttgttactgttagtcgtgcaagccgtcggacgcggattgggaagggcctccccggccggaggaccgttggaagacgtggtgattgagaggtatcacataccaagagcatgccccagggaggtccaaatgggagactttgtaagataccactacaacggcacttttgaagatggaaagaagttcgactctagctacgataggaacactctcgttgcaatcgtggtcggtgtcggcaggctgatcacgggcatggataggggtttaatgggtatgtgtgtgaatgagcgaagacgtctcattgttccacctcacctaggttacggatcgattggcctggccggactgatcccacccgatgctactctttacttcgatgttgtgcttctcgatgtttggaacaaagaagataccgtgcaggtttcaaccctactgcgaccaccccactgtccaagaatggtgcaggacggagacttcgttcggtatcattacaacggaaccctgcttgatgggacctcgttcgacacttcgtactccaagggtgggacctacgacacctacgtaggctcgggatggctgattaagggcatggatcagggattgctgggtatgtgccctggagagcggcggaaaatcatcattccaccctttctcgcttacggggagaaaggctacggcaccgtcattcctccgcaggctagtcttgtcttccacgtccttctaatcgatgtacataaccctaaggacgccgtccaactggaaacactggaactaccacctggctgtgtgcggagagctggggcaggagacttcatgagataccattacaacggttctctgatggacggtaccctcttcgactcttcctactctcgcaaccacacatacaatacatacattgggcagggctacattatcccaggaatggaccagggactgcagggcgcgtgtatgggggagcggagaagaattaccataccccctcatcttgcctatggggagaacggtactggcgataagattcccggatcagccgtgctgatattcaacgtccatgtcatagacttccataacccagccgatgtcgtcgaaatcagaaccctaagccgcccgtcggaaacgtgtaatgagaccactaaattgggagacttcgtgcgataccattacaattgcagtttgcttgacggcacccagttatttaccagtcatgactacggagcaccccaggaggctactttaggagctaacaaagtgattgagggactcgatacgggcctgcagggaatgtgtgtgggcgagcgccgtcaactgattgtgcctccccatctcgcacacggcgaatccggggcccgtggcgttcccggctccgccgtgcttctcttcgaagtggagctggtgagcagagaggatgggctgcccactggatatctcttcgtttggcacaaggacccgccagccaacttgttcgaggacatggatctcaataaagatggtgaggtccccccagaagagtttagcacttttattaaggcccaagtatcagaaggcaaaggcccccacgcttgggcggggccttag

SEQ ID NO: 210228 - DNA, 246 bp, Artificial Sequence
  derived and/or modified sequence
atgggcgacttcgtgcggtaccactacaacggcaccttcgaggacggaaagaagtttgacagctcttacgatcggaatactctggtggccatcgtggtgggggtggggagactgattacaggcatggacaggggcttgatgggaatgtgcgttaacgaacgccgcagactcattgtgccaccccacctggggtacggatccatcgggctggcgggcctgatccctcccgacgcaaccctgtactag

SEQ ID NO: 210229 - DNA, 1161 bp, Artificial Sequence
  derived and/or modified sequence
tgaatcgacgtgcacaaccccaaggacgccgtgcagctggagaccctcgagttgccacccggctgcgttcggagagctggggccggcgatttcatgcggtaccactataacggttccttgatggatggcacactgttcgactcttcctattcacggaaccatacctacaacacatacattggccaaggctatattatcccgggcatggatcaggggttgcagggggcatgtatgggcgaacgtcgacgaattaccatcccaccacacctggcctatggtgaaaacggtacagattctatcggctttcttcagggatctgccccacttagaccattccgctctggagagggacaaccatctcttgggagagaagggggttacggcaagacagaacccgcctaccctcaagacccagcagtcttgggcgctagcgtctcatctcctgtgaagtgggcctcccacgccgatccacagggtgataagattcctggcagtgcggtacttatttttaatgtccacgtgatcgactttcataacccagctgatgtagtcgaaattcggaccttgtcacggccatccgagacatgtaacgagaccaccaagctgggtgatttcgtgcgttaccactacaattgcagtttgttggacggcacccagctctttacttcccacgattatggtgctccacaggaggcaacgttaggggcgaataaggtgatcgagggcctcgacacagggctgcagggcatgtgtgtcggtgaacggcggcagttgatcgtgcccccccacctcgcgcacggcgaaagcggtgcccgcggggttcccggatccgctgttctgctcttcgaagtggaactcgtcagccgcgaagacgggctcccaaccggttatctgtttgtctggcacaaggatccacccgctaatttgtttgaggacatggacctgaataaggacggcgaagttccacccgaagaattcagcacttttataaaggcacaggtgagcgagggaaaaggaaggctgatgcccggacaggaccccgaaaagaccatcggtgatatgtttcaaaaccaggaccgcaatcaggacggcaagattactgtcgacgaactgaagctgaaaagtgacgaggatgaggagagagtccacgaggagctctag

SEQ ID NO: 210230 - DNA, 1068 bp, Artificial Sequence
  derived and/or modified sequence
atgcggtaccactacaacggcagcctgatggacggcaccctgttcgactcctcttactcccggaaccacacttacaacacatacatcggacaaggctacattatcccaggcatggaccaaggactgcaaggcgcgtgtatgggcgagagaaggagaatcacaatcccaccccacctcgcatacggcgagaatgggactgatagcatcggcttcttgcaagggagcgcacctctgagaccatttcgatcaggagagggccaaccaagcctgggccgcgagggggggtatggcaaaactgagcccgcttatccacaggatcctgctgtgctgggagcatcagtcagtagtcctgtcaaatgggccagtcacgccgaccctcagggcgacaagatccccgggagcgcagtgcttatttttaatgtccatgtaattgattttcacaatcctgccgacgttgtggaaattaggactctctcaagaccaagcgaaacttgtaacgaaaccaccaagctaggggatttcgtccggtaccattacaactgttctcttttggatggaactcagctcttcactagtcacgactatggagctcctcaggaggctaccctaggtgccaataaagtgatagaagggttagacacgggcctgcagggcatgtgcgtgggggagcgacggcagctgatcgtgccacctcacctggcccatggggagtccggagcgaggggggtcccagggtcagccgtactcctgttcgaagtcgagctggtgagccgtgaagacgggctgcccacaggctatctctttgtgtggcacaaggacccacctgccaacctttttgaagatatggatcttaataaagacggggaagtcccaccagaagagttttctacatttattaaggctcaggtttccgagggtaagggtcggctgatgcctgggcaggaccctgagaaaaccataggagatatgtttcagaatcaggacaggaatcaagacggaaagatcactgtagacgagctcaaactgaaatcagatgaagatgaagagcgcgtgcacgaggagctctag

SEQ ID NO: 210231 - DNA, 1413 bp, Artificial Sequence
  derived and/or modified sequence
atgtttccggctggtccacctagccattcactgttaagactgcccctcctgcagctgctgctgctggtggtgcaggctgtggggagaggcctgggacgggcaagccctgcagggggacctcttgaggatgtagtaatagaacgatatcacatccccagagcttgcccacgtgaagtgcagatgggcgacttcgtacggtaccattacaatggaactttcgaggatggcaagaagttcgatagctcttatgacaggaataccctcgttgccatagtggttggggtgggacgcctcatcacaggcatggatagaggcctaatgggtatgtgcgttaacgaacggaggcgcttaattgtccctccacacttgggatatggttccatcggacttgctggcttgatcccgcctgacgccactctgtacttcgacgttgtgctgcttgacgtttggaacaaggaagacactgtccaggtatccacgctacttcgccctccccattgcccacgtatggtgcaggatggcgattttgtgcggtaccactacaacggcaccctactggatggtacttcctttgacactagctactcaaggaaccacacctacaacacctatatagggcaagggtacatcatacctggcatggaccaaggcctccagggagcatgcatgggagagcgcagaaggatcaccatccctccacacttggcttatggagagaacggaaccggcgacaagataccagggagtgccgttttgatcttcaacgtccatgtgattgactttcataaccctgccgacgtggtggagatacgcactcttagcaggccatctgagacctgcaacgagacaactaagcttggcgattttgtgcgctaccattataactgttccctgctggatgggacccagctgtttaccagccacgattacggagcaccacaggaggccaccctgggggcaaataaagtcattgagggactggacacagggctacagggtatgtgtgtcggcgaacgtagacaactcattgtgccaccccatctggcacacggagagagcggtgccagaggcgttcccggatccgcagtgttgctattcgaagtcgagttggtctcgcgcgaagatggcctgcccaccggctacctgtttgtgtggcataaggacccgccagcaaacctgttcgaggacatggacttgaacaaggatggagaagttccgcctgaggagttcagtaccttcatcaaggctcaggtctcagagggaaaaggccgacttatgcccggacaagatcccgaaaaaaccatcggggatatgttccagaatcaagacaggaatcaggatggtaagattaccgtcgacgaactgaaactcaaaagtgacgaagatgaagaacgggttcatgaagagttgtag

SEQ ID NO: 210232 - DNA, 1749 bp, Artificial Sequence
  derived and/or modified sequence
atgtttccagccggacccccaagccacagtctgctgaggctgcctctcctgcagctgctgctgctggtggtacaggccgttgggaggggtctgggtagagcatctcctgcaggaggcccactggaggatgtggtgatagaacgataccacattccacgggcttgtccaagggaggtgcagatgggggacttcgtcaggtaccactataatgggacttttgaggatggcaaaaaattcgactcatcgtacgatcgtaacaccctggtggcgatagtcgtgggtgtgggccgactcatcactggaatggaccgcggactgatgggtatgtgcgtgaacgagcgacgcagactcatcgttccgccacatctgggctacggctccatcggtctggccggtctaatcccccctgatgccaccttgtatttcgatgtggtattgttggatgtgtggaacaaagaggacacagtgcaagttagcaccttactgcgtccacctcattgcccaaggatggttcaggacggtgactttgtgaggtaccattataatggcaccctcctggatggcacatccttcgacaccagctacagcaagggcggtacatacgatacttacgtcggatccggatggctgattaaaggcatggatcaagggttgcttggtatgtgcccaggcgaacgcaggaaaattattatcccccctttcctcgcctacggcgagaagggctatgggactgttattcctcctcaggccagtttagtgttccatgttctcctcatcgacgtccacaacccaaaagatgccgttcaactcgagacgctcgagctgccacctggatgcgttagaagagcaggcgcaggtgacttcatgcgataccattacaatggttctttgatggatggaaccctcttcgacagttcgtattctcgtaatcacacttataatacttatatcggacagggatacatcatccccggaatggaccagggactgcagggcgcatgtatgggcgagaggcgcaggataactataccgccacacctcgcctacggtgagaatggaactggagacaagatcccaggttctgcggtcctgattttcaacgttcacgtgatcgatttccacaaccctgccgatgttgtcgagattcgaactctgtctcggccatccgagacatgtaacgagacaaccaagctgggagactttgtcaggtaccattataattgttcactgctggatgggactcagctgtttacatcccatgactacggagcaccccaggaagcaaccctgggcgctaacaaggtgattgagggtctggatacaggactgcaaggtatgtgcgtgggagaacgccgtcagctgattgtccctcctcatctcgcccacggggaaagcggagcgcgaggcgtccccggatccgccgtcctcttgtttgaagtggagctggtctctcgagaggacggactacctaccggttatctatttgtgtggcataaggatcctcccgcaaatctctttgaggacatggacctgaacaaggatggtgaagtgcccccagaagagttctccacgtttatcaaggctcaggtgtcagaagggaaaggcagattaatgcccggtcaggaccccgaaaagactattggggacatgtttcagaatcaggatcgtaaccaggacgggaagatcaccgtggacgagttaaagctgaaaagcgatgaggatgaggagcgagtccatgaagaattgtag

SEQ ID NO: 210233 - DNA, 1629 bp, Artificial Sequence
  derived and/or modified sequence
atgttccctgccggacccccatcacactctctcctgaggctcccactcttgcagcttctgctgctcgtcgtgcaggccgtaggccgtggccttggtagggcctccccagcaggcggacccctagaggacgtggtgatcgaaaggtatcacattccacgggcttgccccagagaagtgcagatgggagactttgtgagataccattataatggaaccttcgaggatggcaagaagtttgactcaagctacgaccggaacacactggtggccatcgtggtgggcgtaggcaggttgattaccggcatggataggggcctcatggggatgtgtgtcaacgagcgccgtcgtctgatcgttcctccacaccttggttatggctccattgggctcgcaggcctgattccccctgacgccacgctgtattttgacgtcgtgctgctagatgtgtggaacaaggaggacacagtgcaggtctccacgctgctacgaccccctcactgcccacggatggtccaagatggagattttgtgcggtatcattataatgggacattacttgatggaaccagttttgacacatcctattctaaaggtggtacctacgacacctatgtgggttccggatggttgatcaaggggatggaccagggcttgctgggtatgtgccccggtgagcgcaggaaaattatcatcccgccatttttggcctacggggaaaaaggctatggtactgtaatccctccccaggcttccctggtgttccacgtattgctgatagatgtccataaccccaaggacgcagtgcagctcgaaaccctagaattacctccgggttgcgtcagaagagctggggctggggacttcatgcggtatcactacaacggatcattgatggacggcactctgtttgatagctcctactctcgaaatcacacctataacacatatatcggacagggatatattatcccagggatggatcagggactgcagggtgcttgcatgggcgagagacggaggataacaattcctcctcatcttgcatacggcgaaaacggaacaggggacaagatccccggttccgccgtgctcattttcaatgtccatgtgatcgatttccacaatcctgctgacgtggtggagatcagaactctcagtaggccgagcgagacttgtaacgagaccacgaaattgggcgacttcgttcggtaccattacaactgtagccttcttgacggaacccagctttttacgtcgcacgactatggagcgcctcaagaggccacactgggggctaacaaggtaatcgaagggttggacacggggctgcaggggatgtgtgtcggcgagcggcgtcagctcattgttccaccacatttggcccacggagagtctggcgctcgaggtgtccccggtagcgctgttttgctctttgaggttgagctcgtgtcccgggaagacggtctgcccacagggtacctgtttgtgtggcataaagacccacctgcgaacctgttcgaggacatggatcttaataaagacggagaagtgccgcctgaggagttctccacctttattaaggcccaagtgtctgagggaaaaggcccacacgcatgggccggtccgtag

SEQ ID NO: 210234 - DNA, 246 bp, Artificial Sequence
  derived and/or modified sequence
atgggggacttcgtccgttatcattataacggaacctttgaagatggtaagaagttcgattccagctatgaccgcaacacactggtcgctattgtggttggagtaggccgactcatcactggtatggaccgtggactgatgggaatgtgcgttaatgaacgacggagactaatcgtgccccctcatcttgggtatggctccattggcctcgccggtctgatcccacccgacgcaacactatattag

SEQ ID NO: 210235 - DNA, 1161 bp, Artificial Sequence
  derived and/or modified sequence
tagatcgatgtgcataatccgaaggatgcggtccagctcgagaccctggaactgcctccgggatgtgtgcggagagccggagctggagattttatgaggtaccactacaatggatcattaatggacggcacgttgtttgactcctcttatagccgtaatcatacctataacacatacatcggccagggctatattatccccggaatggatcaggggctccagggggcttgtatgggagagcgcaggagaatcacaatccctccccacctggcttatggggagaacgggactgactcaatcggctttcttcaagggtccgctcctttacgaccattccggagtggggagggtcagcccagcctggggagggaaggcggttacgggaagaccgaaccagcataccctcaggacccagccgtgttaggagcgtctgtctcaagccccgtcaagtgggcctcacatgcggacccccagggcgacaagattcctggatcagccgtgctgatctttaacgtccacgtcatagacttccataacccagctgatgtggttgaaattcgcaccttatcccgcccaagcgagacgtgcaacgaaaccactaaactgggggacttcgtgaggtaccactataactgttctttgttggacggcacgcagctcttcacgtcacatgactacggggctcctcaggaggcgactctgggggctaacaaagtgattgaaggactggacacgggcctgcagggcatgtgcgtgggagaaaggcggcaattgatcgtgccgcctcacctcgcacacggggagagtggagccaggggagtcccaggaagcgcggtcctgctatttgaagtggagctggtgtcccgtgaggacggcctcccaactgggtacctgttcgtatggcataaagacccccctgccaatctcttcgaggatatggatctcaataaggatggggaggtccctccagaagaatttagcacattcatcaaagcccaggtgtcagaggggaaagggaggcttatgcctgggcaggatcctgagaaaaccattggtgacatgttccaaaatcaagacaggaaccaagacggaaaaattacagttgatgagcttaagctgaagtcagatgaggatgaagaaagagtccacgaagagttatag

SEQ ID NO: 210236 - DNA, 1068 bp, Artificial Sequence
  derived and/or modified sequence
atgcgataccactacaatggaagtcttatggacggcaccctattcgactccagctatagtaggaatcatacttacaatacttacatcggccaggggtatattatacctgggatggatcagggcctccagggcgcttgcatgggggagaggcgtcgaataactattccaccccatttagcctatggtgagaacgggacagatagcatcggctttcttcaaggaagtgcccctctaagacccttcaggtctggcgaaggacagccaagccttggcagggaagggggatatggcaaaaccgagcctgcctatcctcaagatcctgcagttctaggagcctccgtgtccagccccgtgaagtgggcgagtcatgctgatccccagggcgacaaaattcctgggtccgcggtactgattttcaacgtgcatgtgattgattttcataatcccgctgacgtagtcgagatcagaaccctgagccgcccaagcgaaacatgcaacgagacaacaaagctgggggacttcgtgagataccactacaattgctcccttcttgacggcacccaactttttacgtcacacgattacggagccccacaggaagcaacactgggggcaaataaagtgattgaggggctggatacaggactccagggcatgtgcgtcggggaaaggagacaattgattgtacccccacacctggcgcacggggaaagcggagcacggggagtaccgggttcggcagtgctcttgttcgaggtagagctggtatcacgtgaggatgggctgcccactggttatctcttcgtatggcacaaagatcctcccgctaacctttttgaggatatggatctaaacaaggacggcgaagttccccctgaggagttcagcacgttcatcaaggcacaagtgagtgaagggaagggcaggcttatgcctgggcaggatccggagaagaccatcggggacatgtttcaaaatcaggaccgcaaccaagacggcaaaatcactgtcgatgaattaaagctgaagtccgatgaggatgaagaaagggttcatgaggaactgtag

SEQ ID NO: 210237 - DNA, 1413 bp, Artificial Sequence
  derived and/or modified sequence
atgttccccgccggcccccccagccacagcctgctgagactgcccctgctgcagctgctgctgctggtggtgcaggccgtgggcagaggcctgggcagagccagccccgccggcggccccctggaggacgtggtgatcgagagataccacatccccagagcctgccccagagaggtgcagatgggcgacttcgtgagataccactacaacggcaccttcgaggacggcaagaagttcgacagcagctacgacagaaacaccctggtggccatcgtggtgggcgtgggcagactgatcaccggcatggacagaggcctgatgggcatgtgcgtgaacgagagaagaagactgatcgtgcccccccacctgggctacggcagcatcggcctggccggcctgatcccccccgacgccaccctgtacttcgacgtggtgctgctggacgtgtggaacaaggaggacaccgtgcaggtgagcaccctgctgagacccccccactgccccagaatggtgcaggacggcgacttcgtgagataccactacaacggcaccctgctggacggcaccagcttcgacaccagctacagcagaaaccacacctacaacacctacatcggccagggctacatcatccccggcatggaccagggcctgcagggcgcctgcatgggcgagagaagaagaatcaccatccccccccacctggcctacggcgagaacggcaccggcgacaagatccccggcagcgccgtgctgatcttcaacgtgcacgtgatcgacttccacaaccccgccgacgtggtggagatcagaaccctgagcagacccagcgagacctgcaacgagaccaccaagctgggcgacttcgtgagataccactacaactgcagcctgctggacggcacccagctgttcaccagccacgactacggcgccccccaggaggccaccctgggcgccaacaaggtgatcgagggcctggacaccggcctgcagggcatgtgcgtgggcgagagaagacagctgatcgtgcccccccacctggcccacggcgagagcggcgccagaggcgtgcccggcagcgccgtgctgctgttcgaggtggagctggtgagcagagaggacggcctgcccaccggctacctgttcgtgtggcacaaggacccccccgccaacctgttcgaggacatggacctgaacaaggacggcgaggtgccccccgaggagttcagcaccttcatcaaggcccaggtgagcgagggcaagggcagactgatgcccggccaggaccccgagaagaccatcggcgacatgttccagaaccaggacagaaaccaggacggcaagatcaccgtggacgagctgaagctgaagagcgacgaggacgaggagagagtgcacgaggagctgtag

SEQ ID NO: 210238 - DNA, 1749 bp, Artificial Sequence
  derived and/or modified sequence
atgttccccgccggcccccccagccacagcctgctgagactgcccctgctgcagctgctgctgctggtggtgcaggccgtgggcagaggcctgggcagagccagccccgccggcggccccctggaggacgtggtgatcgagagataccacatccccagagcctgccccagagaggtgcagatgggcgacttcgtgagataccactacaacggcaccttcgaggacggcaagaagttcgacagcagctacgacagaaacaccctggtggccatcgtggtgggcgtgggcagactgatcaccggcatggacagaggcctgatgggcatgtgcgtgaacgagagaagaagactgatcgtgcccccccacctgggctacggcagcatcggcctggccggcctgatcccccccgacgccaccctgtacttcgacgtggtgctgctggacgtgtggaacaaggaggacaccgtgcaggtgagcaccctgctgagacccccccactgccccagaatggtgcaggacggcgacttcgtgagataccactacaacggcaccctgctggacggcaccagcttcgacaccagctacagcaagggcggcacctacgacacctacgtgggcagcggctggctgatcaagggcatggaccagggcctgctgggcatgtgccccggcgagagaagaaagatcatcatcccccccttcctggcctacggcgagaagggctacggcaccgtgatccccccccaggccagcctggtgttccacgtgctgctgatcgacgtgcacaaccccaaggacgccgtgcagctggagaccctggagctgccccccggctgcgtgagaagagccggcgccggcgacttcatgagataccactacaacggcagcctgatggacggcaccctgttcgacagcagctacagcagaaaccacacctacaacacctacatcggccagggctacatcatccccggcatggaccagggcctgcagggcgcctgcatgggcgagagaagaagaatcaccatccccccccacctggcctacggcgagaacggcaccggcgacaagatccccggcagcgccgtgctgatcttcaacgtgcacgtgatcgacttccacaaccccgccgacgtggtggagatcagaaccctgagcagacccagcgagacctgcaacgagaccaccaagctgggcgacttcgtgagataccactacaactgcagcctgctggacggcacccagctgttcaccagccacgactacggcgccccccaggaggccaccctgggcgccaacaaggtgatcgagggcctggacaccggcctgcagggcatgtgcgtgggcgagagaagacagctgatcgtgcccccccacctggcccacggcgagagcggcgccagaggcgtgcccggcagcgccgtgctgctgttcgaggtggagctggtgagcagagaggacggcctgcccaccggctacctgttcgtgtggcacaaggacccccccgccaacctgttcgaggacatggacctgaacaaggacggcgaggtgccccccgaggagttcagcaccttcatcaaggcccaggtgagcgagggcaagggcagactgatgcccggccaggaccccgagaagaccatcggcgacatgttccagaaccaggacagaaaccaggacggcaagatcaccgtggacgagctgaagctgaagagcgacgaggacgaggagagagtgcacgaggagctgtag

SEQ ID NO: 210239 - DNA, 1629 bp, Artificial Sequence
  derived and/or modified sequence
atgttccccgccggcccccccagccacagcctgctgagactgcccctgctgcagctgctgctgctggtggtgcaggccgtgggcagaggcctgggcagagccagccccgccggcggccccctggaggacgtggtgatcgagagataccacatccccagagcctgccccagagaggtgcagatgggcgacttcgtgagataccactacaacggcaccttcgaggacggcaagaagttcgacagcagctacgacagaaacaccctggtggccatcgtggtgggcgtgggcagactgatcaccggcatggacagaggcctgatgggcatgtgcgtgaacgagagaagaagactgatcgtgcccccccacctgggctacggcagcatcggcctggccggcctgatcccccccgacgccaccctgtacttcgacgtggtgctgctggacgtgtggaacaaggaggacaccgtgcaggtgagcaccctgctgagacccccccactgccccagaatggtgcaggacggcgacttcgtgagataccactacaacggcaccctgctggacggcaccagcttcgacaccagctacagcaagggcggcacctacgacacctacgtgggcagcggctggctgatcaagggcatggaccagggcctgctgggcatgtgccccggcgagagaagaaagatcatcatcccccccttcctggcctacggcgagaagggctacggcaccgtgatccccccccaggccagcctggtgttccacgtgctgctgatcgacgtgcacaaccccaaggacgccgtgcagctggagaccctggagctgccccccggctgcgtgagaagagccggcgccggcgacttcatgagataccactacaacggcagcctgatggacggcaccctgttcgacagcagctacagcagaaaccacacctacaacacctacatcggccagggctacatcatccccggcatggaccagggcctgcagggcgcctgcatgggcgagagaagaagaatcaccatccccccccacctggcctacggcgagaacggcaccggcgacaagatccccggcagcgccgtgctgatcttcaacgtgcacgtgatcgacttccacaaccccgccgacgtggtggagatcagaaccctgagcagacccagcgagacctgcaacgagaccaccaagctgggcgacttcgtgagataccactacaactgcagcctgctggacggcacccagctgttcaccagccacgactacggcgccccccaggaggccaccctgggcgccaacaaggtgatcgagggcctggacaccggcctgcagggcatgtgcgtgggcgagagaagacagctgatcgtgcccccccacctggcccacggcgagagcggcgccagaggcgtgcccggcagcgccgtgctgctgttcgaggtggagctggtgagcagagaggacggcctgcccaccggctacctgttcgtgtggcacaaggacccccccgccaacctgttcgaggacatggacctgaacaaggacggcgaggtgccccccgaggagttcagcaccttcatcaaggcccaggtgagcgagggcaagggcccccacgcctgggccggcccctag

SEQ ID NO: 210240 - DNA, 246 bp, Artificial Sequence
  derived and/or modified sequence
atgggcgacttcgtgagataccactacaacggcaccttcgaggacggcaagaagttcgacagcagctacgacagaaacaccctggtggccatcgtggtgggcgtgggcagactgatcaccggcatggacagaggcctgatgggcatgtgcgtgaacgagagaagaagactgatcgtgcccccccacctgggctacggcagcatcggcctggccggcctgatcccccccgacgccaccctgtactag

SEQ ID NO: 210241 - DNA, 1161 bp, Artificial Sequence
  derived and/or modified sequence
tgaatcgacgtgcacaaccccaaggacgccgtgcagctggagaccctggagctgccccccggctgcgtgagaagagccggcgccggcgacttcatgagataccactacaacggcagcctgatggacggcaccctgttcgacagcagctacagcagaaaccacacctacaacacctacatcggccagggctacatcatccccggcatggaccagggcctgcagggcgcctgcatgggcgagagaagaagaatcaccatccccccccacctggcctacggcgagaacggcaccgacagcatcggcttcctgcagggcagcgcccccctgagacccttcagaagcggcgagggccagcccagcctgggcagagagggcggctacggcaagaccgagcccgcctacccccaggaccccgccgtgctgggcgccagcgtgagcagccccgtgaagtgggccagccacgccgacccccagggcgacaagatccccggcagcgccgtgctgatcttcaacgtgcacgtgatcgacttccacaaccccgccgacgtggtggagatcagaaccctgagcagacccagcgagacctgcaacgagaccaccaagctgggcgacttcgtgagataccactacaactgcagcctgctggacggcacccagctgttcaccagccacgactacggcgccccccaggaggccaccctgggcgccaacaaggtgatcgagggcctggacaccggcctgcagggcatgtgcgtgggcgagagaagacagctgatcgtgcccccccacctggcccacggcgagagcggcgccagaggcgtgcccggcagcgccgtgctgctgttcgaggtggagctggtgagcagagaggacggcctgcccaccggctacctgttcgtgtggcacaaggacccccccgccaacctgttcgaggacatggacctgaacaaggacggcgaggtgccccccgaggagttcagcaccttcatcaaggcccaggtgagcgagggcaagggcagactgatgcccggccaggaccccgagaagaccatcggcgacatgttccagaaccaggacagaaaccaggacggcaagatcaccgtggacgagctgaagctgaagagcgacgaggacgaggagagagtgcacgaggagctgtag

SEQ ID NO: 210242 - DNA, 1068 bp, Artificial Sequence
  derived and/or modified sequence
atgagataccactacaacggcagcctgatggacggcaccctgttcgacagcagctacagcagaaaccacacctacaacacctacatcggccagggctacatcatccccggcatggaccagggcctgcagggcgcctgcatgggcgagagaagaagaatcaccatccccccccacctggcctacggcgagaacggcaccgacagcatcggcttcctgcagggcagcgcccccctgagacccttcagaagcggcgagggccagcccagcctgggcagagagggcggctacggcaagaccgagcccgcctacccccaggaccccgccgtgctgggcgccagcgtgagcagccccgtgaagtgggccagccacgccgacccccagggcgacaagatccccggcagcgccgtgctgatcttcaacgtgcacgtgatcgacttccacaaccccgccgacgtggtggagatcagaaccctgagcagacccagcgagacctgcaacgagaccaccaagctgggcgacttcgtgagataccactacaactgcagcctgctggacggcacccagctgttcaccagccacgactacggcgccccccaggaggccaccctgggcgccaacaaggtgatcgagggcctggacaccggcctgcagggcatgtgcgtgggcgagagaagacagctgatcgtgcccccccacctggcccacggcgagagcggcgccagaggcgtgcccggcagcgccgtgctgctgttcgaggtggagctggtgagcagagaggacggcctgcccaccggctacctgttcgtgtggcacaaggacccccccgccaacctgttcgaggacatggacctgaacaaggacggcgaggtgccccccgaggagttcagcaccttcatcaaggcccaggtgagcgagggcaagggcagactgatgcccggccaggaccccgagaagaccatcggcgacatgttccagaaccaggacagaaaccaggacggcaagatcaccgtggacgagctgaagctgaagagcgacgaggacgaggagagagtgcacgaggagctgtag

SEQ ID NO: 210243 - protein, 440 aa, Artificial Sequence
  derived and/or modified sequence
MATRSCREKAQKLNEQHQLILSKLLREEDNKYCADCEAKGPRWASWNIGVFICIRCAGIHRNLGVHISRVKSVNLDQWTAEQIQCMQDMGNTKARLLYEANLPENFRRPQTDQAVEFFIRDKYEKKKYYDKNAIAITNKEKEKKKEEKKREKEPEKPAKPLTAEKLQKKDQQLEPKKSTSPKKAAEPTVDLLGLDGPAVAPVTNGNTTVPPLNDDLDIFGPMISNPLPATVMPPAQGTPSAPAAATLSTVTSGDLDLFTEQTTKSEEVAKKQLSKDSILSLYGTGTIQQQSTPGVFMGPTNIPFTSQAPAAFQGFPSMGVPVPAAPGLIGNVMGQSPSMMVGMPMPNGFMGNAQTGVMPLPQNVVGPQGGMVGQMGAPQSKFGLPQAQQPQWSLSQMNQQMAGMSISSATPTAGFGQPSSTTAGWSGSSSGQTLSTQLWK

SEQ ID NO: 210244 - DNA, 1323 bp, Artificial Sequence
  derived and/or modified sequence
atggccacaaggagctgccgagaaaaggcacaaaagcttaatgagcagcatcagctgattctgtccaagctactcagagaagaggataacaagtactgtgccgactgcgaggcgaaggggccgagatgggctagttggaacatcggcgtatttatatgtattagatgcgcaggaatacaccgcaatctgggcgtgcatatcagccgggtgaaaagtgttaatttagatcagtggacagccgagcaaatccagtgtatgcaggatatgggcaataccaaagctcgcctcctctatgaagccaatctcccagagaacttcaggcggccccagaccgatcaagccgtggagttctttattcgggacaaatacgaaaaaaagaaatattacgataagaatgccatagccattacaaataaagagaaggaaaagaagaaagaggagaagaaacgagagaaggaacccgagaagcccgccaagcctcttacagccgagaagttgcagaaaaaggaccagcaattggaaccaaagaaatctacctcacccaagaaagcggcagaaccaaccgtggacttgttaggtctggacggacccgccgttgcccccgtgacaaatgggaatactacagtccccccgctgaacgatgatctcgatatttttgggcctatgatctccaatcccctgcccgccacagtgatgccacccgcacaaggaacacccagtgccccagcagccgctacactttctactgtaacctccggtgacttagatctattcactgaacaaaccactaaatccgaagaagttgcaaaaaagcagctatccaaagacagcatccttagcctgtacggaactggaacaatccagcaacaaagcacccctggtgtgtttatgggccccaccaacattccatttacgtctcaggcgcctgccgctttccagggatttccgtccatgggcgtgcctgtcccagctgctcccgggctgatcggtaatgttatgggccagagcccttccatgatggttgggatgccgatgccaaacggtttcatgggaaatgcccagacaggggtgatgcccttgcctcagaacgtggttggaccacaaggaggcatggtgggtcagatgggcgctccacaaagcaaatttgggctcccccaagctcaacagccccagtggagccttagccagatgaaccaacagatggccggtatgtccatcagctcagctacgcccaccgcaggattcggccagccctcgtcaacaaccgcggggtggtccggctcgagcagcggccagacactaagcactcagctctggaaatag

SEQ ID NO: 210245 - DNA, 1323 bp, Artificial Sequence
  derived and/or modified sequence
atggccaccaggagctgccgggagaaggcccagaagctgaatgagcagcaccagctgatcctgagcaagctgctgcgggaggaggacaacaagtactgtgccgactgtgaggccaagggcccccgctgggcctcctggaacatcggggtcttcatctgcatccgctgtgccggcatccacaggaacctgggcgtgcacatcagccgggtgaagtctgtgaacctggaccagtggacagctgagcagatccagtgcatgcaggacatgggcaacaccaaggcccggctgctgtatgaggccaacctgcctgagaacttcagaagaccccagacagaccaggccgtggagttcttcatccgggacaagtatgagaagaagaagtactatgacaagaatgccatcgccatcaccaacaaggagaaggagaagaagaaggaggagaagaagcgggagaaggagcctgagaagccagccaagcccctgacagctgagaagctgcagaagaaggaccagcagctggagcccaagaagagcaccagccccaagaaggctgctgagcccaccgtggacctgctgggcctggatggccctgctgtggcccctgtgaccaacggcaacaccaccgtgccccccctgaatgatgacctggacatcttcggccccatgatcagcaaccccctgcctgccaccgtgatgcccccagcccagggcacccccagcgccccagctgctgccaccctgagcacagtgaccagcggggacctggacctcttcacagagcagaccaccaagtctgaggaggtggccaagaagcagctgagcaaggacagcatcctgagcctgtatggcaccggcaccatccagcagcagagcaccccaggagtcttcatgggccccaccaacatccccttcaccagccaggccccagctgccttccagggcttccccagcatgggcgtgcctgtgcctgctgcccctggcctgattggaaatgtgatgggccagagccccagcatgatggtgggcatgcccatgcccaacggcttcatgggaaatgcccagacaggagtgatgcccctgccccagaatgtggtgggcccccagggcggcatggtgggccagatgggcgccccccagagcaagtttggcctgccccaggcccagcagccccagtggagcctgagccagatgaaccagcagatggccggcatgagcatcagcagcgccacccccacagctggcttcggccagcccagcagcaccacagctggctggagcggcagcagcagcggccagaccctgagcacccagctgtggaagtag

SEQ ID NO: 210246 - DNA, 1323 bp, Artificial Sequence
  derived and/or modified sequence
atggccacccggagctgccgggagaaggcccagaagctgaacgagcaacaccagcttattctttccaagctgttgcgggaagaggacaacaagtattgcgctgactgcgaagccaaggggccaaggtgggcctcctggaatataggtgtatttatctgcatccggtgtgccgggattcatcgcaacttaggcgttcacatttcccgcgtgaaatcagttaacctggaccagtggacagcagagcaaatccagtgcatgcaagacatgggaaacactaaagcccgcttgttatatgaggctaacctccccgagaatttccgcaggccccaaaccgatcaagcagtcgaattctttatccgggataaatacgaaaagaaaaaatactatgacaagaacgcaattgctataacgaacaaggagaaggagaagaagaaggaggaaaagaagcgtgagaaggaacccgaaaagccagccaaacccctgacagctgagaaactgcagaagaaagaccagcagttggagcctaagaagagcacctcacccaagaaggcagccgaacctacagtcgatctcttaggtcttgatgggcccgcggtagcacccgtgaccaacgggaacacaaccgtgccacctctcaacgatgacctcgacatttttggacccatgatatccaacccgcttccggcgacggttatgccccctgcacaaggtaccccctctgctcctgccgctgctactctcagcactgtgacttccggagatctggacctgttcactgagcagacaacaaaatccgaggaggtggcaaagaagcaactctccaaagactctattttgagcctttacggcaccggcacaattcaacagcaaagcactcctggcgtgtttatgggacccaccaatatccccttcacgagccaggctcctgctgcctttcaggggttccctagcatgggagtgcctgtgccagccgctccaggcctcataggcaacgtaatgggacagtctccttcaatgatggtcggcatgccaatgcctaatggtttcatgggaaatgcacagaccggagtgatgccactgccccagaatgtagtggggccacaggggggtatggtgggacagatgggggcccctcagtcaaagtttgggttgccgcaagcccaacagcctcagtggtccctgtcccaaatgaatcaacagatggccgggatgtctatctcaagcgcaacccccacagccggattcggacagccctcctccaccaccgctggctggtcagggtcctcgtctggacagaccctttcaacacagctctggaaatag

SEQ ID NO: 210247 - DNA, 1323 bp, Artificial Sequence
  derived and/or modified sequence
atggctactcgatcttgccgggaaaaagcccagaaactgaacgagcagcatcagcttatcttgagcaaactactgagggaggaggataataagtactgtgcggactgcgaggccaagggaccaaggtgggcaagctggaatattggagtttttatctgcataaggtgcgccggaattcataggaatctgggagttcatatatcaagagtaaaaagcgtgaatctcgaccaatggactgcagagcagatccagtgcatgcaagacatggggaacactaaggccaggcttttgtacgaggctaatctgcccgagaactttaggcgccctcaaactgaccaggccgtggaatttttcatacgcgataagtatgaaaaaaaaaagtattatgataagaacgctatcgcgatcactaataaggaaaaagaaaagaagaaagaggaaaaaaagagagagaaggagcccgagaagccggctaagccactgaccgccgagaagcttcaaaagaaggaccaacagttagagcctaagaagtccacgagtccaaaaaaggcagccgagcccaccgtggacctgttaggcctcgacggccctgcggttgcacccgttacgaatggaaatactaccgtgccccctttgaatgatgatctggacatcttcggcccaatgatctctaatcctctgcctgcaacggtcatgccccctgcacagggaactccctcggcccctgcagccgctacgcttagcaccgtgacatccggagacttggacctcttcacggagcagaccaccaagagcgaggaggtggccaagaagcagctgagcaaggattcgatccttagtctctatggcacaggcaccatacagcagcagagcaccccaggagtcttcatggggcctactaacatcccgtttaccagtcaggctcccgctgcgtttcaaggcttccctagcatgggcgtccccgtcccagctgctcctgggctcattggcaacgtgatggggcagtcccccagcatgatggtgggaatgccaatgccaaatgggttcatgggaaacgcacagactggtgtgatgccgctgcctcagaatgtggttgggcctcagggaggtatggtcggtcagatgggcgctccgcagtctaaatttgggttaccacaagctcagcaaccacagtggtccctctcacagatgaatcagcagatggctgggatgagtatcagctccgccacgcctaccgctggattcggccagcctagtagcaccacagccggttggtccggcagctcatcaggccaaacactttcaacacagctttggaagtag

SEQ ID NO: 210248 - DNA, 2403 bp, Artificial Sequence
  derived and/or modified sequence
agtccccctccccctcccctcgccggctagggtggtgcgtgccggcaggccggtcaaggaggcgggacacgtcggcgctaccaccgccaccgccgccgccgcccctcctcccgttccagctgccgctgccgcttcctgggctgagtccgcccgcggtcccggcggcgccaggtgcgttcactctgcccggctccagccagcgtccgccgccgccgtagctgccccaggctccccgccccgctgccgagatggcgacgcgctcctgtcgggagaaggctcagaagctgaacgagcagcaccagctcatcctatccaagcttctgagggaggaggacaacaagtactgcgccgactgcgaggccaaaggtcctcgatgggcttcctggaatattggtgtgtttatttgcatcagatgtgctggaattcatagaaatcttggggttcatatatccagggtcaaatcagtcaacctagaccaatggacagcagaacagatacagtgcatgcaagatatgggaaatactaaagcaagactactctatgaagccaatcttccagagaactttcgaagaccacagacagatcaagcagtggaatttttcatcagagataaatatgaaaagaagaaatactacgataaaaatgccatagctattacaaataaagaaaaggaaaaaaaaaaggaagagaaaaagagagaaaaggagccagaaaagccggcaaaaccacttacagctgaaaagctgcagaagaaagatcagcaactggagcctaaaaaaagtaccagccctaaaaaagctgcggagcccactgtggatcttttaggacttgatggccctgctgtggcaccagtgaccaacgggaacacaacggtgccacccctgaacgatgatctggacatctttggaccgatgatttctaatcccttacctgcaactgtcatgcccccagctcaggggacaccctctgcaccagcagctgcaaccctgtctacagtaacatctggggatctagatttattcactgagcaaactacaaaatcagaagaagtggcaaagaaacaactttccaaagactccatcttatctctgtatggcacaggaaccattcaacagcaaagtactcctggtgtatttatgggacccacaaatataccatttacctcacaagcaccagctgcatttcagggctttccatcgatgggcgtgcctgtgcctgcagctcctggccttataggaaatgtgatgggacagagtccaagcatgatggtgggcatgcccatgcccaatgggtttatgggaaatgcacaaactggtgtgatgccacttcctcagaacgttgttggcccccaaggaggaatggtgggacaaatgggtgcaccccagagtaagtttggcctgccgcaagctcagcagccccagtggagcctctcacagatgaatcagcagatggctggcatgagtatcagtagtgcaacccctactgcaggttttggccagccctccagcacaacagcaggatggtctggaagctcatcaggtcagactctcagcacacaactgtggaaatgaaaactgcaatacaagtttcatccagaactaccacctgacattccttgctgaaacgcatctagttcccctgtttattcatatgcatattttttttctttttacccatttgttcatattaagaatgatctgattgaccgtgttggtctgtactgattcaatttgatgtggtgaaaagcaggttgataaatcattttatgtcaagggcagctttgctcatatttcccatgatttcatgtactgcattatttgagaagctgctcaacttgcaaaatcagttttcctctcaataaaattatagctctaatgtttgcatataagggaagtagttatcatgttagtaatacctctaatagtataaaccccaccccaaaattagccagtaatcctgtaggaaggtactgtatgatcaaatgtttaatcatataaatagaatgtaaatgtctcactgagcactgttttctagtgtatcaaaatgctcttatttcatcattcacttcactgtgctgttgttatgatgtgcttaacagggaacgtgattagtgaaaggaagataaacgtggatgttactccaaaacttcgtttaatgaatgcttaaagaattcaaattttatctgcctctcttgtaatttggatctcttcttaatgtacatagtgctaacatgaagacctttttctgcactatatgcaaacagggtaactaactaaaacaaagccactttcaatcttcaatccttgaaggtatatctaggtttatgacagtaattgtgtttacattttatggtgcctagtattgacaaaatgttatttccctacattaaacatgactccatag

SEQ ID NO: 210249 - DNA, 1323 bp, Artificial Sequence
  derived and/or modified sequence
atggccaccagaagctgcagagagaaggcccagaagctgaacgagcagcaccagctgatcctgagcaagctgctgagagaggaggacaacaagtactgcgccgactgcgaggccaagggccccagatgggccagctggaacatcggcgtgttcatctgcatcagatgcgccggcatccacagaaacctgggcgtgcacatcagcagagtgaagagcgtgaacctggaccagtggaccgccgagcagatccagtgcatgcaggacatgggcaacaccaaggccagactgctgtacgaggccaacctgcccgagaacttcagaagaccccagaccgaccaggccgtggagttcttcatcagagacaagtacgagaagaagaagtactacgacaagaacgccatcgccatcaccaacaaggagaaggagaagaagaaggaggagaagaagagagagaaggagcccgagaagcccgccaagcccctgaccgccgagaagctgcagaagaaggaccagcagctggagcccaagaagagcaccagccccaagaaggccgccgagcccaccgtggacctgctgggcctggacggccccgccgtggcccccgtgaccaacggcaacaccaccgtgccccccctgaacgacgacctggacatcttcggccccatgatcagcaaccccctgcccgccaccgtgatgccccccgcccagggcacccccagcgcccccgccgccgccaccctgagcaccgtgaccagcggcgacctggacctgttcaccgagcagaccaccaagagcgaggaggtggccaagaagcagctgagcaaggacagcatcctgagcctgtacggcaccggcaccatccagcagcagagcacccccggcgtgttcatgggccccaccaacatccccttcaccagccaggcccccgccgccttccagggcttccccagcatgggcgtgcccgtgcccgccgcccccggcctgatcggcaacgtgatgggccagagccccagcatgatggtgggcatgcccatgcccaacggcttcatgggcaacgcccagaccggcgtgatgcccctgccccagaacgtggtgggcccccagggcggcatggtgggccagatgggcgccccccagagcaagttcggcctgccccaggcccagcagccccagtggagcctgagccagatgaaccagcagatggccggcatgagcatcagcagcgccacccccaccgccggcttcggccagcccagcagcaccaccgccggctggagcggcagcagcagcggccagaccctgagcacccagctgtggaagtag

SEQ ID NO: 210250 - protein, 1133 aa, Artificial Sequence
  derived and/or modified sequence
MSPTQWDFPVELCCRPMAFVTLTGLDVVYNAVHRAVWDAFCANRRADRVPISFKVLPGDHEYPKCRPKRTSYEWYIPKGILKTGWMNKHLNLVPALVVVFYELDWDEPQWKEKQSECATRVEIVRQSLQGRNTKVAVVLIQKKTPLPPGEDVIASERAAALCNACELSGKSLFVLPHTDHLVGYIIRLENAFYEHAQTYYYTEIRRVKSHKEFLNKTTHQLLFVRHQFKIAFFSELKQDTQNALKNYRTAYNLVHELRAHETNILEIKTMAGFINYKICRLCFQHNTPLDAIAQFRKHIDLCKKKIGSAELSFEHDAWMSKQFQAFGDLFDEAIKLGLTAIQTQNPGFYYQQAAYYAQERKQLAKTLCNHEASVMYPNPDPLETQTGVLDFYGQRSWRQGILSFDLSDPEKEKVGILAIQLKERNVVHSEIIITLLSNAVAQFKKYKCPRMKSHLMVQMGEEYYYAKDYTKALKLLDYVMCDYRSEGWWTLLTSVLTTALKCSYLMAQLKDYITYSLELLGRASTLKDDQKSRIEKNLINVLMNESPDPEPDCDILAVKTAQKLWADRISLAGSNIFTIGVQDFVPFVQCKAKFHAPSFHVDVPVQFDIYLKADCPHPIRFSKLCVSFNNQEYNQFCVIEEASKANEVLENLTQGKMCLVPGKTRKLLFKFVAKTEDVGKKIEITSVDLALGNETGRCVVLNWQGGGGDAASSQEALQAARSFKRRPKLPDNEVHWDSIIIQASTMIISRVPNISVHLLHEPPALTNEMYCLVVTVQSHEKTQIRDVKLTAGLKPGQDANLTQKTHVTLHGTELCDESYPALLTDIPVGDLHPGEQLEKMLYVRCGTVGSRMFLVYVSYLINTTVEEKEIVCKCHKDETVTIETVFPFDVAVKFVSTKFEHLERVYADIPFLLMTDLLSASPWALTIVSSELQLAPSMTTVDQLESQVDNVILQTGESASECFCLQCPSLGNIEGGVATGHYIISWKRTSAMENIPIITTVITLPHVIVENIPLHVNADLPSFGRVRESLPVKYHLQNKTDLVQDVEISVEPSDAFMFSGLKQIRLRILPGTEQEMLYNFYPLMAGYQQLPSLNINLLRFPNFTNQLLRRFIPTSIFVKPQGRLMDDTSIAAA

SEQ ID NO: 210251 - protein, 1018 aa, Artificial Sequence
  derived and/or modified sequence
MSPTQWDFPVELCCRPMAFVTLTGLDVVYNAVHRAVWDAFCANRRADRVPISFKVLPGDHEYPKCRPKRTSYEWYIPKGILKTGWMNKHLNLVPALVVVFYELDWDEPQWKEKQSECATRVEIVRQSLQGRNTKVAVVLIQKKTPLPPGEDVIASERAAALCNACELSGKSLFVLPHTDHLVGYIIRLENAFYEHAQTYYYTEIRRVKSHKEFLNKTTHQLLFVRHQFKIAFFSELKQDTQNALKNYRTAYNLVHELRAHETNILEIKTMAGFINYKICRLCFQHNTPLDAIAQFRKHIDLCKKKIGSAELSFEHDAWMSKQFQAFGDLFDEAIKLGLTAIQTQNPGFYYQQAAYYAQERKQLAKTLCNHEASVMYPNPDPLETQTGVLDFYGQRSWRQGILSFDLSDPEKEKVGILAIQLKERNVVHSEIIITLLSNAVAQFKKYKCPRMKSHLMVQMGEEYYYAKDYTKALKLLDYVMCDYRSEGWWTLLTSVLTTALKCSYLMAQLKDYITYSLELLGRASTLKDDQKSRIEKNLINVLMNESPDPEPDCDILAVKTAQKLWADRISLAGSNIFTIGVQDFVPFVQCKAKFHAPSFHVDVPVQFDIYLKADCPHPIRFSKLCVSFNNQEYNQFCVIEEASKANEVLENLTQGKMCLVPGKTRKLLFKFVAKTEDVGKKIEITSVDLALGNETGRCVVLNWQGGGGDAASSQEALQAARSFKRRPKLPDNEVHWDSIIIQASTMIISRVPNISVHLLHEPPALTNEMYCLVVTVQSHEKTQIRDVKLTAGLKPGQDANLTQKTHVTLHGTELCDESYPALLTDIPVGDLHPGEQLEKMLYVRCGTVGSRMFLVYVSYLINTTVEEKEIVCKCHKDETVTIETVFPFDVAVKFVSTKFEHLERVYADIPFLLMTDLLSASPWALTIVSSELQLAPSMTTVDQLESQVDNVILQTGESASALYYLLEKDLSNGEYPHHHNCHHSAARDCGEYPSPCECRSAVIWACQRVVTCQVSPTE

SEQ ID NO: 210252 - DNA, 3402 bp, Artificial Sequence
  derived and/or modified sequence
atgagccccacccagtgggacttccccgtggagctgtgctgcagacccatggccttcgtgaccctgaccggcctggacgtggtgtacaacgccgtgcacagagccgtgtgggacgccttctgcgccaacagaagagccgacagagtgcccatcagcttcaaggtgctgcccggcgaccacgagtaccccaagtgcagacccaagagaaccagctacgagtggtacatccccaagggcatcctgaagaccggctggatgaacaagcacctgaacctggtgcccgccctggtggtggtgttctacgagctggactgggacgagccccagtggaaggagaagcagagcgagtgcgccaccagagtggagatcgtgagacagagcctgcagggcagaaacaccaaggtggccgtggtgctgatccagaagaagacccccctgccccccggcgaggacgtgatcgccagcgagagagccgccgccctgtgcaacgcctgcgagctgagcggcaagagcctgttcgtgctgccccacaccgaccacctggtgggctacatcatcagactggagaacgccttctacgagcacgcccagacctactactacaccgagatcagaagagtgaagagccacaaggagttcctgaacaagaccacccaccagctgctgttcgtgagacaccagttcaagatcgccttcttcagcgagctgaagcaggacacccagaacgccctgaagaactacagaaccgcctacaacctggtgcacgagctgagagcccacgagaccaacatcctggagatcaagaccatggccggcttcatcaactacaagatctgcagactgtgcttccagcacaacacccccctggacgccatcgcccagttcagaaagcacatcgacctgtgcaagaagaagatcggcagcgccgagctgagcttcgagcacgacgcctggatgagcaagcagttccaggccttcggcgacctgttcgacgaggccatcaagctgggcctgaccgccatccagacccagaaccccggcttctactaccagcaggccgcctactacgcccaggagagaaagcagctggccaagaccctgtgcaaccacgaggccagcgtgatgtaccccaaccccgaccccctggagacccagaccggcgtgctggacttctacggccagagaagctggagacagggcatcctgagcttcgacctgagcgaccccgagaaggagaaggtgggcatcctggccatccagctgaaggagagaaacgtggtgcacagcgagatcatcatcaccctgctgagcaacgccgtggcccagttcaagaagtacaagtgccccagaatgaagagccacctgatggtgcagatgggcgaggagtactactacgccaaggactacaccaaggccctgaagctgctggactacgtgatgtgcgactacagaagcgagggctggtggaccctgctgaccagcgtgctgaccaccgccctgaagtgcagctacctgatggcccagctgaaggactacatcacctacagcctggagctgctgggcagagccagcaccctgaaggacgaccagaagagcagaatcgagaagaacctgatcaacgtgctgatgaacgagagccccgaccccgagcccgactgcgacatcctggccgtgaagaccgcccagaagctgtgggccgacagaatcagcctggccggcagcaacatcttcaccatcggcgtgcaggacttcgtgcccttcgtgcagtgcaaggccaagttccacgcccccagcttccacgtggacgtgcccgtgcagttcgacatctacctgaaggccgactgcccccaccccatcagattcagcaagctgtgcgtgagcttcaacaaccaggagtacaaccagttctgcgtgatcgaggaggccagcaaggccaacgaggtgctggagaacctgacccagggcaagatgtgcctggtgcccggcaagaccagaaagctgctgttcaagttcgtggccaagaccgaggacgtgggcaagaagatcgagatcaccagcgtggacctggccctgggcaacgagaccggcagatgcgtggtgctgaactggcagggcggcggcggcgacgccgccagcagccaggaggccctgcaggccgccagaagcttcaagagaagacccaagctgcccgacaacgaggtgcactgggacagcatcatcatccaggccagcaccatgatcatcagcagagtgcccaacatcagcgtgcacctgctgcacgagccccccgccctgaccaacgagatgtactgcctggtggtgaccgtgcagagccacgagaagacccagatcagagacgtgaagctgaccgccggcctgaagcccggccaggacgccaacctgacccagaagacccacgtgaccctgcacggcaccgagctgtgcgacgagagctaccccgccctgctgaccgacatccccgtgggcgacctgcaccccggcgagcagctggagaagatgctgtacgtgagatgcggcaccgtgggcagcagaatgttcctggtgtacgtgagctacctgatcaacaccaccgtggaggagaaggagatcgtgtgcaagtgccacaaggacgagaccgtgaccatcgagaccgtgttccccttcgacgtggccgtgaagttcgtgagcaccaagttcgagcacctggagagagtgtacgccgacatccccttcctgctgatgaccgacctgctgagcgccagcccctgggccctgaccatcgtgagcagcgagctgcagctggcccccagcatgaccaccgtggaccagctggagagccaggtggacaacgtgatcctgcagaccggcgagagcgccagcgagtgcttctgcctgcagtgccccagcctgggcaacatcgagggcggcgtggccaccggccactacatcatcagctggaagagaaccagcgccatggagaacatccccatcatcaccaccgtgatcaccctgccccacgtgatcgtggagaacatccccctgcacgtgaacgccgacctgcccagcttcggcagagtgagagagagcctgcccgtgaagtaccacctgcagaacaagaccgacctggtgcaggacgtggagatcagcgtggagcccagcgacgccttcatgttcagcggcctgaagcagatcagactgagaatcctgcccggcaccgagcaggagatgctgtacaacttctaccccctgatggccggctaccagcagctgcccagcctgaacatcaacctgctgagattccccaacttcaccaaccagctgctgagaagattcatccccaccagcatcttcgtgaagccccagggcagactgatggacgacaccagcatcgccgccgcctag

SEQ ID NO: 210253 - DNA, 3402 bp, Artificial Sequence
  derived and/or modified sequence
atgagtcccactcaatgggacttccccgtagagctgtgctgtagacctatggcatttgtcacactcaccggcttagacgtggtgtacaacgccgtccaccgcgccgtttgggacgctttttgtgcaaacagacgagccgatagggtgcccattagtttcaaggtgctgccgggagatcacgaatacccaaagtgccggccaaaacggacctcgtatgaatggtacatccctaaggggattctcaaaacaggctggatgaacaagcacctgaacctcgtgcccgctctggtcgtggtgttctatgagctggattgggatgagccgcagtggaaggaaaaacagtccgagtgcgcgacgcgggtcgagatagtgcggcagtcactgcagggtcggaatactaaggtggccgtggttctgattcagaagaaaactccgctgcctccgggggaagacgtcattgcctctgaaagggccgcggctctttgcaatgcatgcgaactctctgggaaatcactcttcgtcttgcctcacactgatcacctggtgggctatattatccggcttgaaaatgcattctatgagcatgcacagacgtactactacacagagattcggcgcgtgaaatcccataaagaattcctgaacaaaacaacccaccagctgttgttcgtcaggcaccagttcaagattgcatttttcagcgagctgaagcaggacacccaaaacgccctgaagaactaccgaacagcttacaacttggtgcacgaattgcgggctcacgaaaccaatatcctcgaaataaagaccatggctgggtttatcaattataagatatgtcggctgtgcttccagcataacaccccattggatgcgatcgcgcagtttcgcaagcatattgatctctgcaagaagaagataggcagtgccgaactgagcttcgaacacgatgcttggatgagtaagcagttccaggccttcggtgatctcttcgacgaagccattaaacttggtctgactgctatccagacccagaatcccggattctattaccagcaggccgcctactacgctcaggagagaaagcaattagcaaagaccctctgtaaccatgaggcttcagtgatgtaccccaatcccgatccgctcgagacccagaccggtgttctggacttctacggacagcggtcttggcgccaaggcattctgtcttttgatctgtctgaccccgagaaagagaaagtggggatcctggcgatacaactgaaagaacggaacgtagtgcactccgagatcataatcacccttctaagcaacgcagtcgcacagttcaaaaagtacaaatgtccacgcatgaaaagccatttgatggtccagatgggggaagagtactactatgccaaagattacactaaagctctcaagcttctcgactacgttatgtgtgattaccgcagcgagggctggtggacgctgcttaccagcgtgctaaccaccgctctcaaatgctcttatctcatggcccaactgaaagactatataacctactctttagaactgttggggagggcctccaccctgaaagacgatcagaagtctagaatcgagaagaacttgatcaatgtactgatgaacgagagtccagatccagagccagactgtgacatcttggcagtgaagactgctcagaaactgtgggcagacagaatatcactggcaggctccaacatttttaccatcggggtccaggatttcgtgccctttgtccagtgcaaagcaaaattccacgctccgtcctttcatgtggacgtgccggttcagttcgatatatacctgaaggcagactgccctcatcccattaggttctcaaagttgtgcgtgtcttttaacaatcaagagtataaccaattctgtgtgatcgaagaagctagcaaggccaacgaggtcctggagaacctgacccagggaaagatgtgtttagtgcccggcaaaaccagaaaactgctctttaaattcgtggctaagacagaggatgtgggcaagaagattgaaattactagtgtagacttggccttaggtaacgagactggacgctgtgtcgtactgaattggcaggggggaggcggcgatgctgcaagcagccaagaggctctccaggccgcccgtagcttcaagcgcagacctaagttgccggataacgaagtgcattgggactccattatcattcaggcgagtacaatgatcattagccgcgtcccgaatatttctgtccatttactacacgagccgccggccctgacaaacgaaatgtactgtctcgtggttactgtgcagtctcatgaaaaaacccaaatacgggatgttaaactgacagcgggcttaaaacccgggcaggacgcgaacctgacccagaaaacgcatgtgacactgcatgggaccgaattatgcgacgaatcatatccagctctgttgacagatatccccgtgggggatctgcacccaggagaacaactcgaaaaaatgctgtatgttcggtgcggcactgtcggctcccgaatgtttctggtctacgtgtcgtacctcattaatactacagttgaagagaaggaaatcgtgtgtaaatgccataaagacgagacagttacaattgagacagtgttcccatttgatgtggcagtgaagtttgttagtacaaagtttgaacacctggagcgagtctacgcggatattccatttcttttaatgacagacctgctttcggccagtccatgggcgctgaccatcgtgtcatcagaactccagctggctccaagtatgactacggttgaccaattggaatcacaggtggacaacgtgattctgcaaactggagagagcgcctctgaatgcttctgcctccagtgtccttctctgggcaatattgagggaggggtggcgaccggacattacatcatcagctggaaaaggacctccgcgatggagaatatcccgataattaccaccgtcatcaccttgccgcacgtgattgtggaaaacatccccctgcatgtcaacgcagacctaccgagttttgggcgggtgcgggagagccttcctgtgaaataccatctgcagaacaaaaccgatttggtgcaggacgtcgaaattagcgtggagccgagtgacgccttcatgttttcgggcctaaaacagatcagactcagaattctgcctgggactgagcaggagatgttatacaatttctaccctctgatggcgggctaccaacaactgccctctttgaatataaatctattacggttccccaactttacaaatcagctgctgaggcggtttattcccacaagcatctttgttaagccgcaggggaggctcatggacgacacaagtattgctgccgcatag

SEQ ID NO: 210254 - DNA, 3402 bp, Artificial Sequence
  derived and/or modified sequence
atgagccccacccagtgggacttccctgtggagctgtgctgccggcccatggcctttgtgaccctgaccggcctggatgtggtgtacaatgctgtgcacagagctgtgtgggatgccttctgtgccaacagaagagctgacagagtgcccatctccttcaaggtgctgcccggggaccacgagtaccccaagtgccggcccaagaggaccagctatgagtggtacatccccaagggcatcctgaagacaggctggatgaacaagcacctgaacctggtgcctgccctggtggtggtgttctatgagctggactgggatgagccccagtggaaggagaagcagagtgaatgtgccaccagggtggagatcgtgcggcagagcctgcagggcaggaacaccaaggtggccgtggtgctgatccagaagaagacccccctgcccccaggagaagatgtgattgccagcgagagagctgctgccctgtgcaatgcctgtgagctgagcggcaagagcctgtttgtgctgccccacacagaccacctggtgggctacatcatccggctggagaatgccttctatgaacatgcccagacctactactacacagagatcagaagagtgaagagccacaaggagttcctgaacaagaccacccaccagctgctgtttgtgcgccaccagttcaagatcgccttcttcagcgagctgaagcaggacacccagaatgccctgaagaactacagaacagcctacaacctggtgcatgagctgcgggcccacgagaccaacatcctggagatcaagaccatggccggcttcatcaactacaagatctgccgcctgtgcttccagcacaacacccccctggatgccatcgcccagttcaggaagcacatcgacctgtgcaagaagaagattggcagcgctgagctgagctttgaacatgatgcctggatgagcaagcagttccaggccttcggggacctgtttgatgaggccatcaagctgggcctgacagccatccagacccagaaccctggcttctactaccagcaggccgcctactatgcccaggagaggaagcagctggccaagaccctgtgcaaccacgaggcctctgtgatgtaccccaacccagaccccctggagacccagacaggagtgctggacttctacggccagaggtcctggaggcagggcatcctgagctttgacctgagtgaccctgagaaggagaaggtgggcatcctggccatccagctgaaggagagaaatgtggtgcacagcgagatcatcatcaccctgctgagcaatgctgtggcccagttcaagaagtacaagtgccccaggatgaagagccacctgatggtgcagatgggagaggagtactactatgccaaggactacaccaaggccctgaagctgctggactatgtgatgtgtgactacagaagtgagggctggtggaccctgctgacctctgtgctgaccacagccctgaagtgcagctacctgatggcccagctgaaggactacatcacctacagcctggagctgctgggccgggccagcaccctgaaggatgaccagaagagccgcatcgagaagaacctgatcaacgtgctgatgaatgaatctccagaccctgagccagactgtgacatcctggccgtgaagacagcccagaagctgtgggccgaccgcatcagcctggccggcagcaacatcttcaccatcggcgtgcaggactttgtgccctttgtgcagtgcaaggccaagttccacgcccccagcttccacgtggatgtgcctgtgcagtttgacatctacctgaaggctgactgcccccaccccatccgcttcagcaagctgtgtgtgtccttcaacaaccaggagtacaaccagttctgtgtgattgaggaggccagcaaggccaatgaggtgctggagaacctgacccagggcaagatgtgcctggtgcctgggaagaccaggaagctgctcttcaagtttgtggccaagacagaagatgtgggcaagaagattgagatcacctctgtggacctggccctgggcaatgaaacaggccgctgtgtggtgctgaactggcagggcggcggcggagatgctgccagcagccaggaggccctgcaggccgcccggagcttcaagagaagacccaagctgcctgacaatgaggtgcactgggacagcatcatcatccaggccagcaccatgatcatcagccgggtgcccaacatctctgtgcacctgctgcacgagcccccagccctgaccaatgagatgtactgcctggtggtgacagtgcagagccatgagaagacccagatcagagatgtgaagctgacagctggcctgaagccaggccaggatgccaacctgacccagaagacccacgtgaccctgcacggcacagagctgtgtgatgagagctacccagccctgctgacagacatccctgtgggggacctgcaccctggagagcagctggagaagatgctgtatgtgcgctgtggcaccgtgggcagcaggatgttcctggtgtatgtgtcctacctgatcaacaccaccgtggaggagaaggagatcgtgtgcaagtgccacaaggatgaaacagtgaccatcgagaccgtcttcccctttgatgtggccgtgaagtttgtgtccaccaagtttgagcacctggagcgggtgtatgctgacatccccttcctgctgatgacagacctgctgagcgccagcccctgggccctgaccatcgtgagcagcgagctgcagctggcccccagcatgaccaccgtggaccagctggagagccaggtggacaacgtcatcctgcagacaggagagagcgccagcgagtgcttctgcctgcagtgccccagcctgggcaacattgaaggaggagtggccaccggccactacatcatctcctggaagaggaccagcgccatggagaacatccccatcatcaccaccgtcatcaccctgccccacgtgattgtggagaacatccccctgcacgtgaatgctgacctgcccagctttggccgggtgcgggagagcctgcctgtgaagtaccacctgcagaacaagacagacctggtgcaggatgtggagatctctgtggagcccagtgatgccttcatgttttctggcctgaagcagatccggctgcgcatcctgcccggcacagagcaggagatgctgtacaacttctaccccctgatggccggctaccagcagctgcccagcctgaacatcaacctgctgcgcttccccaacttcaccaaccagctgctgcggcgcttcatccccaccagcatctttgtgaagccccagggccgcctgatggatgacaccagcattgctgctgcctag

SEQ ID NO: 210255 - DNA, 3402 bp, Artificial Sequence
  derived and/or modified sequence
atgagccccacccagtgggacttccccgtggagctgtgctgccggccaatggcattcgtgactctgaccggtctggacgtggtctacaatgccgtgcatagggccgtttgggatgccttttgcgccaaccgacgcgcagatagagttccaatttcatttaaggttctgcctggtgatcacgagtatccaaaatgccgcccaaaacggacatcttacgagtggtacatccctaaaggtattctgaagactggctggatgaataagcatttgaatctggtcccggctctcgtggtcgtattttacgaactcgattgggacgaaccacagtggaaggagaaacagtctgagtgtgccacaagagtagagatcgttagacaatcccttcagggaagaaacactaaggttgccgtggtactgattcaaaagaagactcccctcccccccggcgaagacgttatcgcttcagagcgggctgccgcgctgtgcaacgcctgtgagctgtctggcaaatctctcttcgtgctccctcacacggaccatctagtgggttacattattcgtctggagaacgccttctacgagcacgcacagacatactactacacagaaatcagacgcgtgaagagtcacaaggagtttctaaataaaacaacccaccagctgctgtttgtgaggcaccagtttaaaatcgctttctttagcgagttgaaacaggatactcagaacgccctgaaaaactacaggactgcttataacctggtgcacgaactacgggcgcacgagactaatatcctcgagataaaaactatggccggatttattaactacaaaatctgccgattatgtttccagcataacaccccgctggacgcaatcgcacagtttaggaagcatatcgacctttgcaaaaaaaaaatcgggagcgctgaactaagctttgaacatgatgcttggatgtccaagcagtttcaagccttcggggatctcttcgacgaagctatcaagttaggtctgactgctatccagacacagaacccagggttctactaccagcaggccgcctactatgcccaggaacgaaaacagttggccaaaacactgtgcaatcacgaggctagcgtgatgtaccctaatccagatcccctcgagacccagactggggtgctggacttctacgggcagcggtcctggaggcagggtatcctgagctttgacctctcagacccagaaaaagaaaaagttgggatattagctatccaactgaaagagaggaatgtagtgcattctgagataatcatcactctcctgtcaaacgctgtggcccagttcaaaaagtacaagtgccctcgcatgaagtcccacttgatggtccagatgggcgaagaatattactacgctaaggattacaccaaagctcttaaacttctggattacgttatgtgcgattaccgatctgagggatggtggacactgttaaccagcgtgttgactacagctttaaaatgctcctatttgatggcccagctcaaagactacattacctacagtctggaacttctcgggagggcttctacactcaaggatgaccagaagagcagaattgaaaagaatctgatcaacgtgctgatgaacgaaagtcccgatccggaaccagactgcgacatactggccgttaagaccgcccaaaagctctgggccgatcgcatctcattggccgggagtaacatcttcaccatcggggtccaggattttgttccttttgtccagtgtaaagctaagttccatgcaccatcctttcacgtcgatgtgcctgtccagttcgacatctatctgaaggcagactgccctcacccaatcagattcagtaagctttgtgtcagcttcaacaatcaggaatacaaccagttttgtgtgatcgaagaggcatcgaaggctaatgaagtgctggaaaatttaactcagggcaagatgtgtctggtcccaggcaagacccggaaactgctgttcaaattcgtcgccaaaacggaggacgtgggcaagaagatcgagattacttcagtcgatcttgccctgggcaacgagacaggccgctgtgtggttctgaattggcaaggaggcgggggggacgcagccagctctcaggaagcactgcaggcggcaaggagtttcaagagacggccaaagctgccagataatgaagtgcattgggatagtataattatacaggccagcactatgatcatctctagagtacccaacatatcagtacacctgctgcacgaacctccggccctgactaatgagatgtactgcttggttgttacagtgcaaagccacgaaaagacccagatccgcgacgtgaaactgaccgccgggttgaagccggggcaagatgccaatctcacccaaaaaacccatgtgacccttcacggtacggagctttgcgatgaatcctatcccgcccttctcaccgacatccccgtcggggatctgcatcccggcgagcagcttgagaagatgttatacgtgcgctgtggcaccgtgggttcaaggatgtttctggtgtatgtgtcctatctgatcaacacaaccgtggaagagaaagagatcgtttgcaaatgccacaaagatgagaccgttacaatcgagactgtcttccccttcgatgtcgccgttaagtttgtgtccacgaagttcgagcaccttgaacgagtctatgctgatatcccattccttctgatgaccgacctattgagcgcttccccctgggctttaacaatcgtctcctcagagttacagctagccccgagcatgacgaccgtagaccaactggagtcccaggtggataatgtgatcttacagaccggtgaatcggcctctgaatgcttctgtctacagtgcccgtctctgggcaatattgaagggggagtcgccacgggccactacatcatttcctggaaaagaacatcggccatggagaatatccctataattacgacagtgatcacgcttccccacgtgatcgtcgagaatatccctctccatgtcaatgctgacctcccgtctttcggcagagttagagagagtctccctgtgaaatatcacctgcaaaacaagactgatctagtgcaagatgtggaaatttccgtggagccgagtgatgcttttatgttctcaggcctgaagcagattcggttgcggatcctacccggaacagaacaggagatgctttataatttctatccattgatggcgggatatcagcagttgccgtccctgaatataaatttgctcaggtttcctaactttactaatcaactgcttcggagattcataccgactagtattttcgtgaaaccccaggggagactgatggatgatacgtccatcgccgccgcttag

SEQ ID NO: 210256 - DNA, 3402 bp, Artificial Sequence
  derived and/or modified sequence
atgtctccgactcagtgggactttcccgtggagctctgctgtcgccctatggcttttgtaaccctgaccgggcttgacgtggtctacaacgctgtgcatagagcggtatgggatgccttttgcgcgaaccgtcgggcagatagggtgccaatcagctttaaggtactgcctggcgatcacgaatatcccaagtgtaggcctaagagaacttcttacgagtggtacatccccaagggtattctgaagacaggatggatgaacaagcacctgaatctcgttcctgccctggtcgtagttttctacgagttggactgggacgagccacagtggaaggagaagcagtcagagtgtgctacccgggtcgagattgtgcgacagtctttgcagggcagaaacacaaaagtggcagtggtcctgatccagaagaagactcccctccccccaggtgaagacgtgatcgcctccgagcgggcagccgcactatgtaacgcttgcgagttatctgggaagtccttatttgtattgccacacaccgaccacctcgtggggtatatcattaggctggagaacgcattctacgagcacgcccaaacgtattattacaccgaaattaggcgagtcaagagccataaagagtttctgaacaagaccactcaccagctcctttttgtgaggcaccagtttaagatcgcattcttttcagaactcaagcaggacactcaaaacgccttaaaaaattacaggactgcatacaatttggttcacgaactgcgtgcccacgagactaatatcctcgaaatcaagacaatggcaggcttcatcaattacaagatctgtcggctctgttttcagcacaatacaccattggatgccattgcacagttcagaaagcacatcgacctctgtaagaaaaaaattggttcggctgagctgtctttcgaacacgatgcttggatgtccaaacagtttcaggccttcggagatttgtttgacgaggcgattaagctgggcctgaccgctattcaaactcagaacccagggttttactaccaacaggccgcttactacgcccaagaaagaaagcagctggctaaaaccctgtgtaatcacgaggcatcggtgatgtatccaaatcccgatcctcttgagacacagaccggcgtgctcgatttctacggccagcgttcatggcggcagggcatcttgtcttttgacctctcagatcctgagaaggaaaaagtgggaatcctcgctatccagttgaaggagcggaatgtcgttcacagtgaaattattattactttgctgagcaacgccgtagcccagtttaaaaaatacaagtgtcctcgcatgaaatctcatctgatggtacagatgggagaggagtattattatgctaaggactatactaaagctttgaagctgctggactacgtgatgtgtgattacagatcggaaggctggtggaccctactcacgtctgtgctcactactgctctgaagtgttcttacttaatggctcaactgaaagattacatcacctactccctcgagttgctgggaagggcttcaactttaaaagacgaccaaaaaagcagaatagagaagaacttgatcaacgtgctaatgaacgaaagtcctgaccctgaacctgattgcgatatcctggccgtaaagacagcccaaaaactctgggctgacagaatatcgctcgccggatccaatatcttcacaattggtgtgcaggactttgtcccttttgtccaatgtaaggcaaaatttcatgcacctagcttccatgtggacgtacccgtgcagttcgatatttatctgaaagccgattgtccccaccctatacggttttccaagctttgtgtgagcttcaacaatcaggagtataaccaattttgtgtgatagaggaggccagcaaggctaatgaggtcctggaaaacctgactcaaggcaaaatgtgtctagtacctggcaagacgcgaaaattactcttcaagttcgttgccaaaactgaggatgtgggaaagaaaatagagattacttctgttgatctggccttaggaaacgaaacgggaaggtgtgtggttcttaactggcagggcggaggcggtgacgcagcatcctcacaggaagcacttcaagcagcaaggtcttttaagcggagacctaaacttccagataatgaagtccactgggattccatcataattcaggcttcgacaatgattatctcccgcgtccctaacatctctgtgcacctgctgcacgaaccccctgccctgaccaatgagatgtattgcttagtcgtaaccgtgcaatcccacgagaagactcaaatacgagacgtcaaactcactgccggtctcaagcccggacaggatgctaacctgacccagaaaactcatgtgaccctgcatgggacggagctttgcgatgagtcctaccccgctcttttaacagatatacctgtgggtgacctccacccgggtgaacaacttgaaaagatgctttatgtgaggtgtggcacagttggctctcgcatgtttctcgtttatgtgtcatacttgattaacacaacagtcgaagaaaaagagattgtttgtaaatgtcataaggacgaaaccgttactattgagacagtctttcccttcgacgtcgccgtcaagtttgttagcacaaagtttgagcaccttgagcgggtgtacgccgacatccctttcttactgatgacggatctgctgtccgcatctccttgggctttgactatcgtctcctcagaacttcagctggcaccctctatgactactgtggatcagcttgaaagtcaagtggataatgtcatccttcaaactggtgagtccgcatcggaatgtttttgtctgcagtgcccatccctgggtaacattgaaggcggtgtagcgaccggtcactacattatctcttggaagagaacaagcgccatggagaacattccaatcatcaccaccgtgatcactttaccacacgtgattgtggagaatatccccctacatgttaatgccgacctcccgtccttcggcagagtccgggaaagcctccctgtgaagtaccatctgcagaataagaccgacttagttcaggacgtcgaaatctcggtggaaccctccgatgcgtttatgtttagcggtctaaaacagatcaggcttagaatcctgcccggaaccgaacaagaaatgctctataatttttatcctctcatggccggatatcaacaactgcctagcttgaacatcaaccttctgcgctttccaaacttcactaatcagctcttgagaagattcataccaacaagtatctttgtaaaacctcagggacggctcatggacgacaccagcatcgctgcagcgtag

SEQ ID NO: 210257 - DNA, 4552 bp, Artificial Sequence
  derived and/or modified sequence
aaagtgcttcctgtgccgggggaggtgggtacagggaagtctcgcctgttggaactggctgtggggctgcggcggtggggacgggccacggcgttctgtgacatccccccgcctcccctcgtcttctcccggctggcggcgaccggcctcagctgcagcgggcccggggcgtggggcctgggttttttgtgacatcgtaaacatgagccccacacagtgggacttccctgtggaattatgttgccggcctatggcctttgttactctaacgggcctggatgtagtttataatgcagtccatcgagctgtctgggacgccttctgtgcaaatcggagagctgatcgagtaccaatttctttcaaggtgctcccaggtgaccatgagtatcccaaatgtagacccaagagaacttcatatgagtggtacattcctaaagggatcttaaagactggctggatgaataagcatctgaatctggtgccagccctggtggttgtgttctatgaactggactgggatgagcctcagtggaaagaaaagcagtctgagtgcgccaccagagtggaaatagtcaggcaaagtttacaaggaagaaacacaaaagttgcagtggttctgattcagaagaaaacccctttgcccccaggagaagatgtcattgcttcagaaagggctgcagctttatgcaatgcatgtgaactctcaggaaagtctttgtttgtactgccgcacactgaccaccttgtgggttatattataagattggaaaatgccttttatgaacatgcacagacttattactacactgagatcagaagagtgaaatctcataaagaatttttgaataaaacaacacaccagcttttatttgttaggcatcagttcaaaatagctttcttcagtgagttgaaacaagatacacaaaatgcgctgaagaattataggaccgcctataatcttgtacacgaattgagagcccatgaaactaatattctggaaattaagactatggcaggatttataaactacaagatctgtaggctgtgttttcaacacaacaccccattggatgcaattgctcagttccgaaaacacatcgacttgtgtaagaaaaagattggaagtgcagagctgtcttttgagcatgatgcatggatgtctaaacaattccaggcctttggagatttatttgatgaagctattaagttagggttaacagctattcaaactcagaatcctggtttctattaccagcaggcagcatactatgcccaggagcggaaacagcttgcaaaaaccctctgtaaccacgaagcttctgtaatgtatcccaatcctgatcccttagaaacacaaacaggcgttcttgacttttatggacaaagatcatggcgacaaggaatactaagttttgatctttctgatcctgaaaaagaaaaggtgggaattcttgccattcagctgaaggagagaaatgttgttcactctgagataatcataactcttctgagcaatgctgttgcacagttcaagaagtataagtgcccgcgaatgaaaagtcacctaatggttcagatgggagaggaatattattacgcaaaggattataccaaagctttgaagttgctggattatgtgatgtgtgattatcggagtgaaggatggtggactctgctcacttctgtattaactacagctctgaagtgctcctacctcatggcccaattaaaggattacattacttactccctagaactccttggtagagcttcaactctgaaagatgaccagaagtctcggatagaaaagaacctcataaatgttttaatgaatgaaagtcctgatccagaacccgactgtgatatcttagctgtgaaaactgctcagaagctgtgggcagaccgaatttctctggctggcagcaatattttcacaataggagtacaggactttgtgccatttgtgcagtgcaaagccaagtttcatgccccaagttttcatgttgatgttcctgttcagtttgatatttatctgaaggctgattgtccacatcccattaggttttccaagctctgtgtcagctttaataatcaggaatacaaccagttctgtgtaatagaagaagcatccaaagcaaatgaagttttagaaaatctgactcaaggaaagatgtgcctagttcctggcaaaacaagaaaactgttatttaagtttgttgcaaaaactgaagatgtgggaaagaaaattgagattacttcagtggatcttgctctgggcaatgagacgggaagatgtgtggttttaaattggcagggaggaggaggagatgctgcttcctcccaagaagccttacaggcagctcggtctttcaaaaggcgacctaagctacctgacaatgaagttcactgggacagcattataattcaggcaagcacaatgatcatatccagagtcccaaacatttctgtacatctgctacatgaaccccctgcactgactaatgaaatgtattgtttggttgtgactgttcagtcccatgaaaagacccaaatcagagatgtgaagctcaccgctggcttaaaaccaggacaggatgccaatttaactcagaagactcacgtgactcttcatggaacagaactgtgtgatgaatcctacccggctttactcactgacattcctgttggagacttacatccaggggaacagctggaaaaaatgttgtatgttcgctgtggaacagtgggttccagaatgtttcttgtatatgtttcttacctgataaatacaaccgttgaagaaaaagaaattgtttgcaagtgtcacaaggatgaaactgtaacaattgaaacagtctttccatttgatgttgcggttaaatttgtttctaccaagtttgagcacctggaaagggtttatgctgacatcccctttctgttgatgacggacctcttaagtgcctcaccctgggccctcactattgtttccagtgagctccagcttgctccatccatgaccacagtggaccagctcgagtctcaagtggacaatgttatcttacagactggagagagtgctagtgaatgcttttgtcttcaatgcccatctcttggaaatattgaaggtggagtagcaaccgggcattatattatctcttggaaaaggacctcagcaatggagaatatccccatcatcacaactgtcatcactctgccgcacgtgattgtggagaatatccctctccatgtgaatgcagatctgccgtcatttgggcgtgtcagagagtcgttacctgtcaagtatcacctacagaataagaccgacttagttcaagatgtagaaatttctgtggagcccagtgatgccttcatgttctcaggtctcaaacagattcgattacgtatcctccctggcacggagcaggaaatgctatataatttctatcctctgatggctggataccagcagctgccatctctcaacatcaacttgcttagatttcctaacttcacaaatcagctgctcaggcgttttatacctaccagtatttttgtcaagccacagggtcgactcatggatgatacctctattgctgctgcatgatgttcaagaccggcccttggctgttgttacagagatgttgggcagagctatgcaggtgtttcattgtgaactctagctttgatcatggtaaaaagttaaccttttctattttttaatggatgttataccaactattcagaggaactcatacttcaaaaatattaggaaaatctgtcttatagtttctctaataaatatctgaaatctcagtacgacatgaaagaatgtcagaccattgttattgttgaaagtcatttgatgaatggtaaattctatgaaaagtaagtgatttgcatgtataatatcaggaaaattaagcatcccaagtgtgactggacaaagagagcagatgcaccagtgcctgtgccataaagttccgaatcccccatgtgtctctttcagagctggccagaccggaaataaatcattctcataaattcagtgtgtactcagaacacatacacaacaacatagggagttgtatgactgatacggaaaacttccagaaagttttaatcaaagcagtttaattaaggtatcaaaaatatctttgcttactatcaagaagtgtcaaataggttcagcttgctgccaaaatatggatcatttatgaagcaggttcatattttagaggtgttaataaaatcctcatcggaaaagatccaaagtgcaaggatttgattataaacataatttcctagactgaaagtttttggaaaagatgcagggtctgagtcaggccttctggttatattgtgcagtttcaaaagaactatttaaaactcttgaaaactcatgtaaataaaaatcatagggtgaaaattgtatttgttaaaataccttaataatttaaaatgacctgatttcctggaaaattttattattcaaaaggtggaggcattgtaaaaaggaaatagtgatgtaaataaacatgttctctttcaagta

SEQ ID NO: 210258 - protein, 227 aa, Artificial Sequence
  derived and/or modified sequence
MGDAGSERSKAPSLPPRCPCGFWGSSKTMNLCSKCFADFQKKQPDDDSAPSTSNSQSDLFSEETTSDNNNTSITTPTLSPSQQPLPTELNVTSPSKEECGPCTDTAHVSLITPTKRSCGTDSQSENEASPVKRPRLLENTERSEETSRSKQKSRRRCFQCQTKLELVQQELGSCRCGYVFCMLHRLPEQHDCTFDHMGRGREEAIMKMVKLDRKVGRSCQRIGEGCS

SEQ ID NO: 210259 - DNA, 3351 bp, Artificial Sequence
  derived and/or modified sequence
gcggccgctgcgactccggagccggcggggggctccggtccttccctgcgccaccgcacaggacatctctctggctggggagcggcggtgagacccgccgagggcgtctgtgtccctcctcccccgcggtcctcggtgcgtccgcacgcccctcctcctcggctccctccttcttctctccgcgcctctccgccccctccccgtctccgcaggccgagtggtgcggcccgcctccagctgaccggcctggaatcccggctccgagccccggactcgcgcccgcccgcgcgcccgctccttccccctccccccgccccgagccccccgacgccgccgccaccgcctcctcagagcggggcccgggcccagccgccgccaccgctgccgccgccgagctccgccgccgccgagcaccatgggagacgctgggagcgagcgcagcaaagcgcccagcctgccgcctcgctgtccctgcggcttctgggggtccagcaagactatgaatctctgttccaaatgctttgctgattttcaaaagaaacagccagacgatgattccgctccaagtacaagtaacagccaatcagatttgttttccgaagagaccaccagtgacaacaacaatacctcgataaccacgccaactcttagtcccagccagcagccgcttccgacagaactgaatgtaacttcaccgagtaaagaggagtgtgggccatgcacagacacagctcatgtctcattaatcacaccaacaaaaagatcctgtggtacagattcacagtctgagaatgaggcttcaccagtaaaacggccacgactacttgagaatacggaacggtccgaggaaaccagtcgatctaaacagaagagtcgacgtcggtgcttccagtgccaaaccaaactggagctggtgcagcaggaattgggatcgtgtcgctgcggttatgtgttctgtatgttacatcgcctccccgagcagcacgactgcacattcgaccacatgggccgtggccgggaggaagccatcatgaaaatggtgaagctggaccggaaagtggggcgctcctgccagcgcatcggggaggggtgctcctgaaggccaggcatggccaccacgtgacgctgttcttagttcactaatgttagccttatttaggacaaagtcagccagacaccttgtactgggcacgcgtcagactgcagccagtccgtttcctttctttagccagccatcctggtactgtagtttaggggttgatggtggttgaaattgatttctggctggttactaaggtgcctgctagccattgtataaaattaaaacatgaagaatattttttttttgagcatggctagtggatttaaaacaacacatacctgtcactgctggagtcaaacttataaaaagccttaagtggaaagtgttccagacggagactctgagttaatagaggagtagaagctggtgttaaagttcccacgacgcacatggctttgccagaaactctgtttaatgatcggcctttcacctcttcacttatccttagtcccagtagccaggatacctgatggccacgtgtgccttggccacgggaggctgctgagattggccacgtggctgggctgggtggtggcctcactctcccacagagctggaaatggggggtgggggacagattcttacggaaatttttttacctgacttgctatgaaaaaactcatcacacaagaagagaaacagtaacctcactttgaaaattagctccactcaagactagtccacgaacgagacccgccttttctacacaggatccaaggtcacgagaagcagccagagtgccccgcctccgccggctctggtctgccattcgccagtgcagggatctggcacggaccagatgtggcgaatggcagcacagcgcggtggctgggtctgcacactggcctctgcagccagatttctatattgggagttttttaaaaagacatttcatagccaacaagaatcagtagaagtgctgggagcagcagctggggaagctgccgcccacgggctctgccccttccagctggagccgcccgtgcctccaggggccaagaggatgatgtcgtggcctccattctcgtttctatgcagccccatagtccaaggacacccagtccacatctaccatatagcaagtttagtaagggaaggcagcatacgtcccagggacagtgggtttggatctgtctagaacagcggtttgtggctgtggcccagctccgagagtgatatttgctctggtaggtgagggcctgagggtacatttctccacctgtgccccctcatgttcacagaggatttcagcagctgcaactgcgcacgccaggtggggaagggtgggggtgggcctggttgccccatgttaggaaatcactaccagtcaggtggggctggggctgggtggacaggatcaggattcccttgaaagcccaggcagggtgagcagtcccagtggtcctagtgccgcatcagatccaggtgggtgagggcaggaggcccctgcggaggcagcgtggatctgcccacacataggctactggaatagtttaacccagcaactttcctttttataaaacaacaaatggttcaactctgtctgcaaattaacagctgaacacctgcaactgcaaatgttttttgatccgacgtactgaaataggaagtcatgctcttcccaccctccacccaccagagtggaacccgctgcaaaatccccagccttaattcttgcttcaggacccagaccggtgtcttgctctagggcaacccagggcagaggggccaggtctgcccagcgtttaccactgctgtcaagccacagcccttggccaccatacgggccatcctcagtgaggcagccccccataggcttccgccaagctctggtcccgaagaggctgtgcgagcccttcccggccctccccagggccccccgccccctcctctgcctgctgcgtggaggcagccatgggaaggagcccaggggagctggcctgggggagcgaagcccatgttcgcttcctgacttagagctggggggggtggggggtggggcttgttcccctgcagtatctgttctgtgaagtttgttaaatgtaaggaaagcttaaattcttgtatctttaaaagagaaaatcttatttaacccttttgtgttctagatttacttacacacatagcctagagctcagttttagttttaacattgtgaaaatattaaaagaatcttgtaactttattcttttttctcctgctgaaaaaaaaaattaaaccaatcgtatgaaaaaaaaaaaaaaaaaaaa

SEQ ID NO: 210260 - DNA, 684 bp, Artificial Sequence
  derived and/or modified sequence
atgggcgacgccggcagcgagagaagcaaggcccccagcctgccccccagatgcccctgcggcttctggggcagcagcaagaccatgaacctgtgcagcaagtgcttcgccgacttccagaagaagcagcccgacgacgacagcgcccccagcaccagcaacagccagagcgacctgttcagcgaggagaccaccagcgacaacaacaacaccagcatcaccacccccaccctgagccccagccagcagcccctgcccaccgagctgaacgtgaccagccccagcaaggaggagtgcggcccctgcaccgacaccgcccacgtgagcctgatcacccccaccaagagaagctgcggcaccgacagccagagcgagaacgaggccagccccgtgaagagacccagactgctggagaacaccgagagaagcgaggagaccagcagaagcaagcagaagagcagaagaagatgcttccagtgccagaccaagctggagctggtgcagcaggagctgggcagctgcagatgcggctacgtgttctgcatgctgcacagactgcccgagcagcacgactgcaccttcgaccacatgggcagaggcagagaggaggccatcatgaagatggtgaagctggacagaaaggtgggcagaagctgccagagaatcggcgagggctgcagctag

SEQ ID NO: 210261 - DNA, 684 bp, Artificial Sequence
  derived and/or modified sequence
atgggagacgctggctccgagcgcagcaaggcaccatcactgccaccccgctgcccttgtggcttctggggcagctcaaagaccatgaatctgtgttccaaatgtttcgcagattttcaaaagaagcagcctgatgacgactccgctcccagtacctccaacagtcaatccgacctgttcagcgaagagactaccagcgataataataatacgagcattaccactccaacactgtctccctcccagcagcctctcccgactgagctcaacgtgaccagcccaagtaaggaagaatgtggtccctgcacagataccgctcacgtgtctctgatcacccccacaaagagatcttgcggcacagactcacagagcgagaacgaggctagccctgttaaaagacctcggctgctggaaaacaccgagcgctctgaggaaaccagccgtagcaagcagaagagccggcgaaggtgctttcagtgccagactaagctggagttggtgcaacaggagttgggcagctgcagatgcgggtacgttttttgtatgcttcatagactccccgagcaacatgattgtacttttgaccatatgggtcggggccgcgaagaagctataatgaagatggttaaactggataggaaggtgggcagatcctgccagcgtattggcgagggctgtagctag

SEQ ID NO: 210262 - DNA, 684 bp, Artificial Sequence
  derived and/or modified sequence
atgggagatgctggcagcgagaggagcaaggcccccagcctgcccccacgctgcccctgtggcttctggggcagcagcaagaccatgaacctgtgcagcaagtgctttgctgacttccagaagaagcagccagatgatgacagcgcccccagcaccagcaacagccagagcgacctcttcagcgaggagaccaccagtgacaacaacaacaccagcatcaccacccccaccctgagccccagccagcagcccctgcccacagagctgaatgtgaccagccccagcaaggaggagtgtggcccctgcacagacacagcccacgtgtccctcatcacccccaccaagaggagctgtggcacagacagccagagtgaaaatgaggccagccctgtgaagaggccccggctgctggagaacacagagaggtctgaggagaccagccgcagcaagcagaagagcagaagacgctgcttccagtgccagaccaagctggagctggtgcagcaggagctgggcagctgccgctgtggctacgtgttctgcatgctgcaccggctgcctgagcagcacgactgcacctttgaccacatgggccggggccgggaggaggccatcatgaagatggtgaagctggacaggaaggtgggccgcagctgccagagaattggagagggctgcagctag

SEQ ID NO: 210263 - DNA, 684 bp, Artificial Sequence
  derived and/or modified sequence
atgggcgacgccggcagcgagcggagcaaggcccccagcctgccccccaggtgcccctgtggcttttggggatcttccaaaactatgaatctttgctcaaaatgttttgccgatttccaaaaaaagcaaccagatgacgacagcgcccctagcacgagtaatagtcagtcggacctgttctctgaagagaccaccagcgataataacaacacgtccatcaccaccccaactctgtccccttctcagcagccgctacctacagagcttaacgtgacaagccccagtaaagaggaatgtgggccgtgcactgacaccgcccacgtttcgctcatcactcccactaaaaggtcctgcgggaccgactcccagtcagaaaatgaagcctcccctgttaagcgccctcgactgctggagaacacagagaggagtgaggaaacatctcgctccaagcagaagagcaggcgccggtgtttccagtgccagaccaaactggagctggtgcagcaagagcttggatcatgtcgctgtgggtacgttttttgcatgctccataggcttccagagcagcacgattgcacttttgatcacatggggagaggccgagaggaggcaatcatgaagatggtaaaactcgatagaaaggtgggacgatcatgtcaaagaatcggggaagggtgcagctag

SEQ ID NO: 210264 - DNA, 684 bp, Artificial Sequence
  derived and/or modified sequence
atgggagacgcagggagcgaaaggtctaaggcccctagcctgcccccaaggtgcccatgcggcttttggggctcatccaagacaatgaatctctgttccaaatgcttcgcagatttccagaagaagcagcctgacgacgattcagccccttccacctcaaactcccaaagcgacctcttcagcgaggagacaaccagcgataataacaacacttccattacaaccccaaccttatcaccctcacagcagcccctgccaactgagctgaatgttacatcaccatcaaaggaagagtgcggcccttgcaccgatacagcacacgtgtctctcatcacacctaccaagagatcttgcggtaccgacagtcagagtgagaatgaggcctctcccgtgaaacgcccacggctcttggaaaacaccgaaagatcagaagaaacgtcccgcagtaaacagaagtccaggaggagatgtttccagtgtcagacaaagctggaactggtgcaacaggaactggggtcttgtaggtgtgggtacgtgttttgcatgctgcatcgcctgcccgaacagcatgattgcacatttgatcacatgggaaggggcagggaagaagcgatcatgaaaatggtcaagcttgacaggaaagtggggagatcttgtcagagaatcggcgaaggctgcagctag

SEQ ID NO: 210265 - DNA, 3366 bp, Artificial Sequence
  derived and/or modified sequence
gttacggagacagcagggcccggggcttcagagcggccgctgcgactccggagccggcggggggctccggtccttccctgcgccaccgcacaggacatctctctggctggggagcggcggtgagacccgccgagggcgtctgtgtccctcctcccccgcggtcctcggtgcgtccgcacgcccctcctcctcggctccctccttcttctctccgcgcctctccgccccctccccgtctccgcaggccgagtggtgcggcccgcctccagctgaccggcctggaatcccggctccgagccccggactcgcgcccgcccgcgcgcccgctccttccccctccccccgccccgagccccccgacgccgccgccaccgcctcctcagagcggggcccgggcccagccgccgccaccgctgccgccgccgagctccgccgccgccgagcaccatgggagacgctgggagcgagcgcagcaaagcgcccagcctgccgcctcgctgtccctgcggcttctgggggtccagcaagactatgaatctctgttccaaatgctttgctgattttcaaaagaaacagccagacgatgattccgctccaagtacaagtaacagccaatcagatttgttttccgaagagaccaccagtgacaacaacaatacctcgataaccacgccaactcttagtcccagccagcagccgcttccgacagaactgaatgtaacttcaccgagtaaagaggagtgtgggccatgcacagacacagctcatgtctcattaatcacaccaacaaaaagatcctgtggtacagattcacagtctgagaatgaggcttcaccagtaaaacggccacgactacttgagaatacggaacggtccgaggaaaccagtcgatctaaacagaagagtcgacgtcggtgcttccagtgccaaaccaaactggagctggtgcagcaggaattgggatcgtgtcgctgcggttatgtgttctgtatgttacatcgcctccccgagcagcacgactgcacattcgaccacatgggccgtggccgggaggaagccatcatgaaaatggtgaagctggaccggaaagtggggcgctcctgccagcgcatcggggaggggtgctcctgaaggccaggcatggccaccacgtgacgctgttcttagttcactaatgttagccttatttaggacaaagtcagccagacaccttgtactgggcacgcgtcagactgcagccagtccgtttcctttctttagccagccatcctggtactgtagtttaggggttgatggtggttgaaattgatttctggctggttactaaggtgcctgctagccattgtataaaattaaaacatgaagaatattttttttttgagcatggctagtggatttaaaacaacacatacctgtcactgctggagtcaaacttataaaaagccttaagtggaaagtgttccagacggagactctgagttaatagaggagtagaagctggtgttaaagttcccacgacgcacatggctttgccagaaactctgtttaatgatcggcctttcacctcttcacttatccttagtcccagtagccaggatacctgatggccacgtgtgccttggccacgggaggctgctgagattggccacgtggctgggctgggtggtggcctcactctcccacagagctggaaatggggggtgggggacagattcttacggaaatttttttacctgacttgctatgaaaaaactcatcacacaagaagagaaacagtaacctcactttgaaaattagctccactcaagactagtccacgaacgagacccgccttttctacacaggatccaaggtcacgagaagcagccagagtgccccgcctccgccggctctggtctgccattcgccagtgcagggatctggcacggaccagatgtggcgaatggcagcacagcgcggtggctgggtctgcacactggcctctgcagccagatttctatattgggagttttttaaaaagacatttcatagccaacaagaatcagtagaagtgctgggagcagcagctggggaagctgccgcccacgggctctgccccttccagctggagccgcccgtgcctccaggggccaagaggatgatgtcgtggcctccattctcgtttctatgcagccccatagtccaaggacacccagtccacatctaccatatagcaagtttagtaagggaaggcagcatacgtcccagggacagtgggtttggatctgtctagaacagcggtttgtggctgtggcccagctccgagagtgatatttgctctggtaggtgagggcctgagggtacatttctccacctgtgccccctcatgttcacagaggatttcagcagctgcaactgcgcacgccaggtggggaagggtgggggtgggcctggttgccccatgttaggaaatcactaccagtcaggtggggctggggctgggtggacaggatcaggattcccttgaaagcccaggcagggtgagcagtcccagtggtcctagtgccgcatcagatccaggtgggtgagggcaggaggcccctgcggaggcagcgtggatctgcccacacataggctactggaatagtttaacccagcaactttcctttttataaaacaacaaatggttcaactctgtctgcaaattaacagctgaacacctgcaactgcaaatgttttttgatccgacgtactgaaataggaagtcatgctcttcccaccctccacccaccagagtggaacccgctgcaaaatccccagccttaattcttgcttcaggacccagaccggtgtcttgctctagggcaacccagggcagaggggccaggtctgcccagcgtttaccactgctgtcaagccacagcccttggccaccatacgggccatcctcagtgaggcagccccccataggcttccgccaagctctggtcccgaagaggctgtgcgagcccttcccggccctccccagggccccccgccccctcctctgcctgctgcgtggaggcagccatgggaaggagcccaggggagctggcctgggggagcgaagcccatgttcgcttcctgacttagagctggggggggtggggggtggggcttgttcccctgcagtatctgttctgtgaagtttgttaaatgtaaggaaagcttaaattcttgtatctttaaaagagaaaatcttatttaacccttttgtgttctagatttacttacacacatagcctagagctcagttttagttttaacattgtgaaaatattaaaagaatcttgtaactttattcttttttctcctgctgaaaaaaaaaattaaaccaatcgtatgaaa

SEQ ID NO: 210266 - protein, 405 aa, Artificial Sequence
  derived and/or modified sequence
MFSTLRFFEGFCLAGIILTLYALRIELCPPGKRFMITMVASFVAMAGQFLMPGLAALCRDWQVLQALIICPFLLMLLYWSIFPESLRWLMATQQFESAKRLILHFTQKNRMNPEGDIKGVIPELEKELSRRPKKVCIVKVVGTRNLWKNIVVLCVNSLTGYGIHHCFARSMMGHEVKVPLLENFYADYYTTASIALVSCLAMCVVVRFLGRRGGLLLFMILTALASLLQLGLLNLIGKYSQHPDSGMSDSVKDKFSIAFSIVGMFASHAVGSLSVFFCAEITPTVIRCGGLGLVLASAGFGMLTAPIIELHNQKGYFLHHIIFACCTLICIICILLLPESRDQNLPENISNGEHYTRQPLLPHKKGEQPLLLTNAELKDYSGLHDAAAAGDTLPEGATANGMKAM

SEQ ID NO: 210267 - DNA, 1218 bp, Artificial Sequence
  derived and/or modified sequence
atgttctccaccctaaggttttttgagggcttttgtctagccgggattatcttgactttatacgcccttcgcattgaactttgtccaccaggtaagagattcatgatcaccatggtggcctccttcgttgctatggctgggcagttcctcatgccagggcttgctgctctctgtcgggattggcaagtgttgcaggcgttgatcatttgtccgtttctgctgatgcttctttactggagcatattccccgaatccttaagatggctgatggccacccagcaattcgagagtgccaaacgactgattcttcacttcactcaaaaaaataggatgaatcctgagggggacatcaagggagtcatccccgaattggaaaaggagctgtctcgtagaccaaagaaggtgtgcatcgtgaaggtggtcggaacacgcaacttgtggaaaaatattgtggtcctgtgtgtaaactcgctgacaggatacggcatccaccactgctttgcaaggtcgatgatgggccatgaagtgaaagtcccactgctggagaacttctatgctgactactatactacagcttctattgcactcgtatcttgtctcgccatgtgcgtggtcgttcgctttttgggtcgtcgcggagggctgctcctcttcatgattctgacagcactggcctcactgctgcagctaggtctactgaatctgatcggaaaatactctcagcatcctgactctgggatgtccgacagcgtcaaagataagttttcaattgcattctcaattgtcggtatgtttgcctcgcatgccgtgggctccctgtctgtctttttctgcgcagagatcacccctactgtcattcgatgtggtgggctaggtcttgtcttagcctccgctgggtttggcatgttgactgctcctattatcgaattgcataaccagaagggttatttcctgcatcacataatttttgcatgctgcacacttatttgcattatctgcatcctgctactgcccgagagtagagatcagaatctgcccgaaaatatctcaaacggcgagcattacacaaggcagcctctcctcccacataaaaagggcgaacagcccctgctgctcacaaatgctgaacttaaagactacagcggccttcatgatgcggctgctgcgggcgatacactgccagaaggcgcaacggccaatgggatgaaggccatgtag

SEQ ID NO: 210268 - DNA, 1218 bp, Artificial Sequence
  derived and/or modified sequence
atgttctccacgctacgcttttttgaaggcttttgtctcgccggaattattttgacactctatgctctgaggattgagctgtgcccgcctgggaaaagattcatgatcaccatggttgcaagctttgtggccatggctggacagtttctgatgcccggcttggctgccctctgtcgggactggcaagtcctccaagccttaattatctgccctttcttacttatgctcctttactggagtatctttccggaaagcctgagatggctaatggctactcagcagtttgagagcgcaaagcgcttgatcttacattttacacagaagaatcgaatgaacccggaaggcgatatcaagggagtaatccccgaactggagaaggaattatccaggcggcccaagaaagtctgcattgtgaaagtggtgggcacccgcaatctgtggaaaaacattgtggtactctgcgtgaattctctgaccgggtatggcatccaccactgcttcgcccgaagcatgatgggtcacgaagtgaaagtgcctctccttgaaaacttctacgccgattattacaccacagcttcgatcgctctggtcagttgtctggccatgtgcgtcgtcgtccgcttcctgggtcgtcgcggaggactgttgctgtttatgattctgacagcccttgcctccctgcttcaattgggcttgttgaatctgattggcaaatatagtcagcatcctgactcaggcatgtcagactctgttaaagataagttcagtatcgcttttagtatcgtggggatgtttgcctcacatgcggtgggaagtttgagcgtgttcttctgcgctgaaatcactcccaccgtgatccgatgcggcggcttagggctggtcctggcaagtgctggtttcggcatgctaacagccccgatcatagaactccacaaccaaaagggctatttcctgcaccacattatcttcgcttgttgtactctgatatgtatcatatgtattctgctgctccctgagtcgcgcgatcaaaatctgccagagaacatttccaatggcgagcactatacccggcagcctctgctgcctcacaaaaagggggagcagcccctgctgctaacaaacgccgagcttaaagactattccggcctccacgacgccgcggctgcaggtgacacactgccagagggcgcaaccgctaacggcatgaaagccatgtag

SEQ ID NO: 210269 - DNA, 1218 bp, Artificial Sequence
  derived and/or modified sequence
atgttcagcaccctgcgcttctttgagggcttctgcctggccggcatcatcctgaccctgtatgccctgagaattgagctgtgccccccaggcaagcgcttcatgatcaccatggtggccagctttgtggccatggccggccagttcctgatgcctggcctggccgccctgtgccgggactggcaggtgctgcaggccctgatcatctgccccttcctgctgatgctgctgtactggagcatcttccctgagagcctgcgctggctgatggccacccagcagtttgaaagtgccaagaggctcatcctgcacttcacccagaagaacaggatgaaccctgagggggacatcaagggcgtcatccctgagctggagaaggagctgagccggcggcccaagaaggtgtgcatcgtgaaggtggtgggcaccaggaacctgtggaagaacatcgtggtgctgtgtgtgaacagcctgaccggctacggcatccaccactgctttgcccgctccatgatgggccacgaggtgaaggtgcccctgctggagaacttctacgccgactactacaccacagccagcatcgccctggtgtcctgcctggccatgtgtgtggtggtgcgcttcctgggcagaagaggaggcctgctgctcttcatgatcctgacagccctggccagcctgctgcagctgggcctgctgaacctgattggcaagtacagccagcacccagattctggcatgtctgacagcgtgaaggacaagttcagcatcgccttcagcatcgtgggcatgtttgccagccatgctgtgggcagcctgagcgtcttcttctgtgccgagatcacccccaccgtcatccgctgtggcggcctgggcctggtgctggccagcgctggcttcggcatgctgacagcccccatcatcgagctgcacaaccagaagggctacttcctgcaccacatcatctttgcctgctgcaccctcatctgcatcatctgcatcctgctgctgcctgagagccgggaccagaacctgcctgagaacatcagcaatggagagcactacacccggcagcccctgctgccccacaagaagggggagcagcccctgctgctgaccaatgctgagctgaaggactacagcggcctgcatgatgctgctgctgctggggacaccctgcctgagggcgccacagccaacggcatgaaggccatgtag

SEQ ID NO: 210270 - DNA, 1218 bp, Artificial Sequence
  derived and/or modified sequence
atgttcagcaccctgcggttcttcgagggcttctgcctggccggcattatactcaccttgtacgctttgcgcatcgaactgtgcccacctggtaagcgctttatgattactatggttgcttctttcgtggcgatggcaggccagttcctcatgccgggcctggcagcactgtgccgggactggcaggtgctgcaagccctgattatttgcccatttctgttgatgcttttgtactggagcatcttcccagaaagcctgaggtggttaatggcaacccaacagttcgaatcggctaaaaggctcatcctccacttcacccagaaaaatcggatgaaccccgagggagatataaagggagtgattcctgaacttgaaaaagaacttagcaggcgaccaaagaaagtttgtattgttaaagttgtgggaacacgcaatctctggaagaacatagtggttctgtgtgttaattccctgacggggtacggaatccatcactgcttcgctcggtctatgatgggccatgaggtgaaggtgcctctattggagaacttctatgcagactattacacaaccgctagcatcgccctcgtttcgtgtttagctatgtgtgttgtcgtgcgatttctgggcaggcgaggaggcttgctcctgtttatgattctgaccgctctagcgagtctgctgcagttaggtctcctcaaccttattgggaaatattctcaacaccccgactccggaatgagcgacagtgtgaaagataaattcagtatagcattctcgatcgtagggatgttcgcctcccatgcggttggctcactgtcagtgtttttttgtgccgaaatcacccccactgtgatacgatgcggcggactcggcttagtcctcgccagtgccggattcgggatgctgacagcacccatcattgaactgcataaccagaagggatatttcctgcaccacataattttcgcttgctgtaccctgatttgtataatttgcatactgctcctccctgagtctagagaccagaaccttcccgagaatatttctaatggagagcactatacacgacagcctcttcttccacacaagaaaggtgagcaacccctcctcctgaccaatgcagagctcaaggactactctggccttcacgatgccgccgccgcaggggatacactgcctgagggggctaccgcaaacggcatgaaagcaatgtag

SEQ ID NO: 210271 - DNA, 1218 bp, Artificial Sequence
  derived and/or modified sequence
atgttcagcaccctgcggttcttcgagggcttctgcctggccggcatcatattgaccttgtacgccctacgcattgagctgtgcccacccggcaagaggttcatgattacaatggttgcatcgttcgtggcaatggccggacagttcctaatgcctggccttgccgcactgtgtcgggattggcaggtcctacaagcactcattatttgcccttttctcctaatgttgctgtattggagcattttccccgagagccttcggtggctgatggccacccagcagttcgagtctgcgaaacggctgatcctgcacttcacccagaaaaaccgcatgaatcccgagggtgacatcaaaggggtgattccagaactggagaaggaactgagtcgtcgaccaaaaaaggtatgtatcgtaaaggtagtcggtaccagaaacctttggaagaatatcgtcgtcttatgcgtaaactccctcactggatacggcattcaccattgtttcgcccggagcatgatggggcacgaggtgaaagtgccactgttagagaatttctatgcagactactacaccaccgcttccattgcgctggtgtcttgcctggccatgtgcgtagtggtgcgctttctcggtcgacgtggaggcctgctgttattcatgattctgacagcccttgccagccttttacagctgggacttctgaacctgatcggaaaatatagccagcatcctgactccggaatgtctgactcagtgaaggacaaattcagtatcgctttttccatcgtgggcatgttcgctagtcatgcagtcggaagtctctcagtgtttttttgcgcagagatcacacctacagttataagatgcgggggcttgggactggtactcgccagcgctgggttcggcatgcttacggcacctataatcgagctacacaaccagaagggttactttctgcaccacattattttcgcatgctgtactctgatttgtattatatgtatccttctactgcccgagtctagagaccagaatttgcctgagaacataagcaacggagaacattacacgcgccagcctctgctaccgcacaagaagggtgaacagcctctgctactcaccaacgcggagcttaaggactactccggcctgcatgacgctgcagcagctggtgacaccctgccagagggagctacagccaacggaatgaaggccatgtag

SEQ ID NO: 210272 - DNA, 1218 bp, Artificial Sequence
  derived and/or modified sequence
atgttttctaccctccgcttcttcgaaggcttttgccttgcgggaatcatcctgaccttatatgccctcagaattgagctgtgcccccctggcaaacgctttatgatcacaatggtggccagttttgtcgctatggccggtcagttcctgatgcccggactggccgcactgtgtcgcgactggcaggtgctgcaggccctgattatttgcccgttcctgttgatgctgctctattggagtatttttccagaaagtctcaggtggctgatggctacgcagcagtttgaatccgctaagcgtctgatattgcattttacacagaagaatcgcatgaatccggagggcgatatcaagggcgtcatcccagagctggagaaagagctgagccggcgacccaaaaaggtttgtatcgtgaaggtcgtgggcactaggaatctgtggaaaaatatcgttgtcctgtgtgtgaatagcctgaccggatacgggatacaccattgctttgcacggtccatgatgggacacgaggtgaaggtaccccttctggaaaatttttatgccgattactacaccactgcaagcattgccttggtgtcctgcctggctatgtgtgtcgtggttcgctttctggggcgtaggggtggactgcttctctttatgatattaacagcgttagctagccttctgcagttgggcttacttaacctgatcggaaagtatagtcaacaccccgatagcgggatgtcggacagcgtgaaggacaaattttccattgcgttctctatagtgggaatgttcgcctcccatgccgtaggtagtttatctgtttttttctgcgctgagattacccctaccgtgattaggtgtggaggcctgggactggtcctcgcctcagctggctttggaatgctcaccgcccctattatcgaactccacaatcagaagggctacttccttcaccatatcatatttgcctgctgtaccctgatttgtatcatctgtatcttgctgttgcctgagtctagggatcagaacttgcctgagaatatttccaacggcgagcattatacaaggcagcctttgctgccccacaaaaaaggagagcagccgctgctgctcactaacgccgaactcaaggattatagcggtctccatgatgccgcagcagctggcgataccctacccgagggagctaccgccaacggcatgaaggcaatgtag

SEQ ID NO: 210273 - DNA, 1218 bp, Artificial Sequence
  derived and/or modified sequence
atgtttagcacacttcgcttctttgagggtttttgtctggccggaattattttgacactctacgccttgcggatcgaactctgtccccctggaaagagattcatgatcaccatggtggcctcatttgtggccatggcaggccaattcctcatgcccggtctcgctgcactctgtagggattggcaagtcttgcaggcgttaattatctgcccattcctccttatgctcctttactggtcgatattcccagaatcacttcgatggctcatggctacgcagcaattcgaatcagccaagaggctcattcttcacttcacccaaaagaaccggatgaaccctgagggtgatataaagggcgttatccccgaattagaaaaagagttgagtcgacgccctaagaaagtgtgtatcgtcaaagttgtgggaactcggaacctgtggaagaacattgttgttttatgtgtgaactctttaacggggtacgggattcaccattgctttgctcgatccatgatgggccacgaagtgaaggttccccttcttgagaatttttacgcagactattacacaacagcttcaatcgctctggtaagttgtcttgcaatgtgtgtggtggtgcggttcttgggccgtcgcggaggactgctgttatttatgatactgacagctctcgcttccctgctacagctgggtctgctgaacctaattgggaaatattcgcagcatcccgatagtgggatgagtgacagcgttaaggacaaattctctatcgccttctcgattgttgggatgttcgctagtcacgccgtgggctctctctccgtgtttttctgcgccgagataacaccaaccgtcatcagatgtggcggactggggctagttctcgcgtctgccggtttcgggatgctcacagcacccattattgaactacacaatcaaaaaggttatttcctgcatcatatcattttcgcatgctgtacccttatctgcattatctgcattctgctgctgcctgagtccagagatcagaaccttccagagaatatatcaaatggtgaacactacacgaggcaacccctgctgcctcataagaagggagagcaaccgttgctcctaaccaacgccgaactcaaggactactctgggttacatgacgccgcagccgcaggcgacaccctgcctgagggggcaaccgcgaacggaatgaaggccatgtag

SEQ ID NO: 210274 - DNA, 1218 bp, Artificial Sequence
  derived and/or modified sequence
atgttcagcaccctgagattcttcgagggcttctgcctggccggcatcatcctgaccctgtacgccctgagaatcgagctgtgcccccccggcaagagattcatgatcaccatggtggccagcttcgtggccatggccggccagttcctgatgcccggcctggccgccctgtgcagagactggcaggtgctgcaggccctgatcatctgccccttcctgctgatgctgctgtactggagcatcttccccgagagcctgagatggctgatggccacccagcagttcgagagcgccaagagactgatcctgcacttcacccagaagaacagaatgaaccccgagggcgacatcaagggcgtgatccccgagctggagaaggagctgagcagaagacccaagaaggtgtgcatcgtgaaggtggtgggcaccagaaacctgtggaagaacatcgtggtgctgtgcgtgaacagcctgaccggctacggcatccaccactgcttcgccagaagcatgatgggccacgaggtgaaggtgcccctgctggagaacttctacgccgactactacaccaccgccagcatcgccctggtgagctgcctggccatgtgcgtggtggtgagattcctgggcagaagaggcggcctgctgctgttcatgatcctgaccgccctggccagcctgctgcagctgggcctgctgaacctgatcggcaagtacagccagcaccccgacagcggcatgagcgacagcgtgaaggacaagttcagcatcgccttcagcatcgtgggcatgttcgccagccacgccgtgggcagcctgagcgtgttcttctgcgccgagatcacccccaccgtgatcagatgcggcggcctgggcctggtgctggccagcgccggcttcggcatgctgaccgcccccatcatcgagctgcacaaccagaagggctacttcctgcaccacatcatcttcgcctgctgcaccctgatctgcatcatctgcatcctgctgctgcccgagagcagagaccagaacctgcccgagaacatcagcaacggcgagcactacaccagacagcccctgctgccccacaagaagggcgagcagcccctgctgctgaccaacgccgagctgaaggactacagcggcctgcacgacgccgccgccgccggcgacaccctgcccgagggcgccaccgccaacggcatgaaggccatgtag

SEQ ID NO: 210275 - protein, 1711 aa, Artificial Sequence
  derived and/or modified sequence
MISTAPLYSGVHNWTSSDRIRMCGINEERRAPLSDEESTTGDCQHFGSQEFCVSSSFSKVELTAVGSGSNARGADPDGSATEKLGHKSEDKPDDPQPKMDYAGNVAEAEGFLVPLSSPGDGLKLPASDSAEASNSRADCSWTPLNTQMSKQVDCSPAGVKALDSRQGVGEKNTFILATLGTGVPVEGTLPLVTTNFSPLPAPICPPAPGSASVPHSVPDAFQVPLSVPAPVPHSGLVPVQVATSVPAPSPPLAPVPALAPAPPSVPTLISDSNPLSVSASVLVPVPASAPPSGPVPLSAPAPAPLSVPVSAPPLALIQAPVPPSAPTLVLAPVPTPVLAPMPASTPPAAPAPPSVPMPTPTPSSGPPSTPTLIPAFAPTPVPAPTPAPIFTPAPTPMPAATPAAIPTSAPIPASFSLSRVCFPAAQAPAMQKVPLSFQPGTVLTPSQPLVYIPPPSCGQPLSVATLPTTLGVSSTLTLPVLPSYLQDRCLPGVLASPELRSYPYAFSVARPLTSDSKLVSLEVNRLPCTSPSGSTTTQPAPDGVPGPLADTSLVTASAKVLPTPQPLLPAPSGSSAPPHPAKMPSGTEQQTEGTSVTFSPLKSPPQLEREMASPPECSEMPLDLSSKSNRQKLPLPNQRKTPPMPVLTPVHTSSKALLSTVLSRSQRTTQAAGGNVTSCLGSTSSPFVIFPEIVRNGDPSTWVKNSTALISTIPGTYVGVANPVPASLLLNKDPNLGLNRDPRHLPKQEPISIIDQGEPKGTGATCGKKGSQAGAEGQPSTVKRYTPARIAPGLPGCQTKELSLWKPTGPANIYPRCSVNGKPTSTQVLPVGWSPYHQASLLSIGISSAGQLTPSQGAPIRPTSVVSEFSGVPSLSSSEAVHGLPEGQPRPGGSFVPEQDPVTKNKTCRIAAKPYEEQVNPVLLTLSPQTGTLALSVQPSGGDIRMNQGPEESESHLCSDSTPKMEGPQGACGLKLAGDTKPKNQVLATYMSHELVLATPQNLPKMPELPLLPHDSHPKELILDVVPSSRRGSSTERPQLGSQVDLGRVKMEKVDGDVVFNLATCFRADGLPVAPQRGQAEVRAKAGQARVKQESVGVFACKNKWQPDDVTESLPPKKMKCGKEKDSEEQQLQPQAKAVVRSSHRPKCRKLPSDPQESTKKSPRGASDSGKEHNGVRGKHKHRKPTKPESQSPGKRADSHEEGSLEKKAKSSFRDFIPVVLSTRTRSQSGSICSSFAGMADSDMGSQEVFPTEEEEEVTPTPAKRRKVRKTQRDTQYRSHHAQDKSLLSQGRRHLWRAREMPWRTEAARQMWDTNEEEEEEEEEGLLKRKKRRRQKSRKYQTGEYLTEQEDEQRRKGRADLKARKQKTSSSQSLEHRLRNRNLLLPNKVQGISDSPNGFLPNNLEEPACLENSEKPSGKRKCKTKHMATVSEEAKDVVLYCLQKDSEDVNHRDNAGYTALHEACSRGWTDILNILLEHGANVNCSAQDGTRPVHDAVVNDNLETIWLLLSYGADPTLATYSGQTAMKLASSDTMKRFLSDHLSDLQGRAEGDPGVSWDFYSSSVLEEKDGFACDLLHNPPGSSDQEGDDPMEEDDFMFELSDKPLLPCYNLQVSVSRGPCNWFLFSDVLKRLKLSSRIFQARFPHFEITTMPKAEFYRQVASSQLLTPAERPGGLDDRSPPGSSETVELVRYEPDLLRLLGSEVEFQSCNS

SEQ ID NO: 210276 - DNA, 5136 bp, Artificial Sequence
  derived and/or modified sequence
atgatcagcaccgcccccctgtacagcggcgtgcacaactggaccagcagcgacagaatcagaatgtgcggcatcaacgaggagagaagagcccccctgagcgacgaggagagcaccaccggcgactgccagcacttcggcagccaggagttctgcgtgagcagcagcttcagcaaggtggagctgaccgccgtgggcagcggcagcaacgccagaggcgccgaccccgacggcagcgccaccgagaagctgggccacaagagcgaggacaagcccgacgacccccagcccaagatggactacgccggcaacgtggccgaggccgagggcttcctggtgcccctgagcagccccggcgacggcctgaagctgcccgccagcgacagcgccgaggccagcaacagcagagccgactgcagctggacccccctgaacacccagatgagcaagcaggtggactgcagccccgccggcgtgaaggccctggacagcagacagggcgtgggcgagaagaacaccttcatcctggccaccctgggcaccggcgtgcccgtggagggcaccctgcccctggtgaccaccaacttcagccccctgcccgcccccatctgcccccccgcccccggcagcgccagcgtgccccacagcgtgcccgacgccttccaggtgcccctgagcgtgcccgcccccgtgccccacagcggcctggtgcccgtgcaggtggccaccagcgtgcccgcccccagcccccccctggcccccgtgcccgccctggcccccgccccccccagcgtgcccaccctgatcagcgacagcaaccccctgagcgtgagcgccagcgtgctggtgcccgtgcccgccagcgccccccccagcggccccgtgcccctgagcgcccccgcccccgcccccctgagcgtgcccgtgagcgccccccccctggccctgatccaggcccccgtgccccccagcgcccccaccctggtgctggcccccgtgcccacccccgtgctggcccccatgcccgccagcaccccccccgccgcccccgccccccccagcgtgcccatgcccacccccacccccagcagcggcccccccagcacccccaccctgatccccgccttcgcccccacccccgtgcccgcccccacccccgcccccatcttcacccccgcccccacccccatgcccgccgccacccccgccgccatccccaccagcgcccccatccccgccagcttcagcctgagcagagtgtgcttccccgccgcccaggcccccgccatgcagaaggtgcccctgagcttccagcccggcaccgtgctgacccccagccagcccctggtgtacatccccccccccagctgcggccagcccctgagcgtggccaccctgcccaccaccctgggcgtgagcagcaccctgaccctgcccgtgctgcccagctacctgcaggacagatgcctgcccggcgtgctggccagccccgagctgagaagctacccctacgccttcagcgtggccagacccctgaccagcgacagcaagctggtgagcctggaggtgaacagactgccctgcaccagccccagcggcagcaccaccacccagcccgcccccgacggcgtgcccggccccctggccgacaccagcctggtgaccgccagcgccaaggtgctgcccaccccccagcccctgctgcccgcccccagcggcagcagcgcccccccccaccccgccaagatgcccagcggcaccgagcagcagaccgagggcaccagcgtgaccttcagccccctgaagagccccccccagctggagagagagatggccagcccccccgagtgcagcgagatgcccctggacctgagcagcaagagcaacagacagaagctgcccctgcccaaccagagaaagaccccccccatgcccgtgctgacccccgtgcacaccagcagcaaggccctgctgagcaccgtgctgagcagaagccagagaaccacccaggccgccggcggcaacgtgaccagctgcctgggcagcaccagcagccccttcgtgatcttccccgagatcgtgagaaacggcgaccccagcacctgggtgaagaacagcaccgccctgatcagcaccatccccggcacctacgtgggcgtggccaaccccgtgcccgccagcctgctgctgaacaaggaccccaacctgggcctgaacagagaccccagacacctgcccaagcaggagcccatcagcatcatcgaccagggcgagcccaagggcaccggcgccacctgcggcaagaagggcagccaggccggcgccgagggccagcccagcaccgtgaagagatacacccccgccagaatcgcccccggcctgcccggctgccagaccaaggagctgagcctgtggaagcccaccggccccgccaacatctaccccagatgcagcgtgaacggcaagcccaccagcacccaggtgctgcccgtgggctggagcccctaccaccaggccagcctgctgagcatcggcatcagcagcgccggccagctgacccccagccagggcgcccccatcagacccaccagcgtggtgagcgagttcagcggcgtgcccagcctgagcagcagcgaggccgtgcacggcctgcccgagggccagcccagacccggcggcagcttcgtgcccgagcaggaccccgtgaccaagaacaagacctgcagaatcgccgccaagccctacgaggagcaggtgaaccccgtgctgctgaccctgagcccccagaccggcaccctggccctgagcgtgcagcccagcggcggcgacatcagaatgaaccagggccccgaggagagcgagagccacctgtgcagcgacagcacccccaagatggagggcccccagggcgcctgcggcctgaagctggccggcgacaccaagcccaagaaccaggtgctggccacctacatgagccacgagctggtgctggccaccccccagaacctgcccaagatgcccgagctgcccctgctgccccacgacagccaccccaaggagctgatcctggacgtggtgcccagcagcagaagaggcagcagcaccgagagaccccagctgggcagccaggtggacctgggcagagtgaagatggagaaggtggacggcgacgtggtgttcaacctggccacctgcttcagagccgacggcctgcccgtggccccccagagaggccaggccgaggtgagagccaaggccggccaggccagagtgaagcaggagagcgtgggcgtgttcgcctgcaagaacaagtggcagcccgacgacgtgaccgagagcctgccccccaagaagatgaagtgcggcaaggagaaggacagcgaggagcagcagctgcagccccaggccaaggccgtggtgagaagcagccacagacccaagtgcagaaagctgcccagcgacccccaggagagcaccaagaagagccccagaggcgccagcgacagcggcaaggagcacaacggcgtgagaggcaagcacaagcacagaaagcccaccaagcccgagagccagagccccggcaagagagccgacagccacgaggagggcagcctggagaagaaggccaagagcagcttcagagacttcatccccgtggtgctgagcaccagaaccagaagccagagcggcagcatctgcagcagcttcgccggcatggccgacagcgacatgggcagccaggaggtgttccccaccgaggaggaggaggaggtgacccccacccccgccaagagaagaaaggtgagaaagacccagagagacacccagtacagaagccaccacgcccaggacaagagcctgctgagccagggcagaagacacctgtggagagccagagagatgccctggagaaccgaggccgccagacagatgtgggacaccaacgaggaggaggaggaggaggaggaggagggcctgctgaagagaaagaagagaagaagacagaagagcagaaagtaccagaccggcgagtacctgaccgagcaggaggacgagcagagaagaaagggcagagccgacctgaaggccagaaagcagaagaccagcagcagccagagcctggagcacagactgagaaacagaaacctgctgctgcccaacaaggtgcagggcatcagcgacagccccaacggcttcctgcccaacaacctggaggagcccgcctgcctggagaacagcgagaagcccagcggcaagagaaagtgcaagaccaagcacatggccaccgtgagcgaggaggccaaggacgtggtgctgtactgcctgcagaaggacagcgaggacgtgaaccacagagacaacgccggctacaccgccctgcacgaggcctgcagcagaggctggaccgacatcctgaacatcctgctggagcacggcgccaacgtgaactgcagcgcccaggacggcaccagacccgtgcacgacgccgtggtgaacgacaacctggagaccatctggctgctgctgagctacggcgccgaccccaccctggccacctacagcggccagaccgccatgaagctggccagcagcgacaccatgaagagattcctgagcgaccacctgagcgacctgcagggcagagccgagggcgaccccggcgtgagctgggacttctacagcagcagcgtgctggaggagaaggacggcttcgcctgcgacctgctgcacaacccccccggcagcagcgaccaggagggcgacgaccccatggaggaggacgacttcatgttcgagctgagcgacaagcccctgctgccctgctacaacctgcaggtgagcgtgagcagaggcccctgcaactggttcctgttcagcgacgtgctgaagagactgaagctgagcagcagaatcttccaggccagattcccccacttcgagatcaccaccatgcccaaggccgagttctacagacaggtggccagcagccagctgctgacccccgccgagagacccggcggcctggacgacagaagcccccccggcagcagcgagaccgtggagctggtgagatacgagcccgacctgctgagactgctgggcagcgaggtggagttccagagctgcaacagctag

SEQ ID NO: 210277 - DNA, 5136 bp, Artificial Sequence
  derived and/or modified sequence
atgataagtaccgcacctctgtattccggagtgcacaattggactagctcagaccgaatccgcatgtgcggcattaatgaagagagaagggcacccctgagcgacgaagaatcaaccacaggggactgccagcacttcggcagccaggagttctgtgtttcgtccagctttagcaaggtggagctgacggctgtcggctctggaagcaacgcccgaggtgcagatcctgatgggtccgccaccgaaaagctgggacataagtccgaggacaaacctgatgatccccagccgaagatggactacgccggaaacgtcgccgaggccgagggatttctagttcccctgagttctcctggcgacgggctgaagctccctgccagcgacagcgctgaggcatccaatagccgcgcagattgttcctggactcccctgaacacccagatgagtaagcaagtggattgcagccccgccggcgtcaaggcattggatagtaggcagggcgttggtgagaaaaacacatttatcttagccaccctgggcactggggttccagtcgaagggactctgccactggtaactacaaatttctctcctctgcccgcacccatttgccctccggctcccggttcagctagtgtcccccatagtgtaccagacgccttccaggtcccgttgtccgtccccgcccccgttcctcactcaggtctagtgcccgtacaggttgctaccagcgttcctgctccgtcccctccattagcccccgtgccggctctggccccagccccgccctcggtgccgactcttatctcagattcaaatcccctgtccgtaagtgctagcgtcctcgtgcccgtccctgccagtgccccaccctctgggccagtgccactttcagcccccgcccccgctccattgagcgtaccggtgagtgctccccccctcgcactgatacaagccccagtacctcccagcgcgcccacactcgtcctggcacccgtacctaccccggtgctggctcccatgccagcatctacccccccagccgcgcctgctccccctagtgtaccaatgcctactcctactccgagctcgggaccgccatccacgccaaccctgattccagcttttgccccaacaccggtgccggccccaacccctgccccaatctttacacctgcccccactcctatgcctgcggccaccccagcggctatccccacctctgcgcccattcctgctagttttagtctgtcgcgggtgtgctttccggcggctcaggcaccagcaatgcaaaaggtccctctctcttttcaaccaggaacagtgctgaccccatctcaacctctggtgtatatcccccccccgagttgcggacagcctttaagtgtagcgaccttacctaccacactcggcgtctcaagcactctgacactgccggtgctgccaagctatttacaggaccggtgcctgcctggagtgctggctagtccagagctgaggagctatccatacgcctttagcgtagctcggcccctgacttccgactccaagctcgtgtcacttgaggtgaatcggctgccctgcacctcaccctccggctccaccacaacacagccggctccggacggagtgcccggtcctctggccgataccagcctggtgacagcatcagccaaggtgctccccacaccgcaacccctgctccctgcacccagcggatccagcgcgcctccccatcctgccaagatgccctccggtacagagcagcagacagaaggaacgagcgttaccttttctccgctgaaatccccacctcagctcgagagagagatggcatcgccccccgagtgtagcgaaatgccactagatctttcctcaaaatctaatcgtcagaaacttccactgccgaaccagagaaaaactcctcccatgcctgtcttgacgcctgtccatacatcgagtaaggcgctgctgtccaccgttttgagccgaagtcaacgcaccacccaagccgcagggggcaacgttacctcctgtttagggagcacttcatcaccattcgtgatctttcctgagattgtgcggaacggcgatccgtcgacatgggtgaaaaattctacagccctgatctccactatccccgggacgtacgtaggcgtagctaaccctgtaccggccagcttattgcttaataaggatcctaacttgggattgaatcgagatcctcggcatttgcccaagcaggagccaatctctatcattgaccagggtgagccaaaaggaaccggggcgacatgtgggaagaagggatctcaggccggcgcagaggggcagcctagcactgtgaaacgctacacaccagcgagaatcgctcccggcctacctgggtgccagaccaaggaactttctctgtggaagcccaccggaccagcaaatatatatccccggtgtagtgtgaatggtaaacctacctccacccaagtgttgcctgttgggtggtcaccttaccaccaggccagcctgctatccatcggcataagctcagccgggcagctgactccttctcagggggcccccattaggcccaccagcgttgtcagcgagttcagcggggtgccatcacttagctcaagcgaggccgtgcatgggcttcccgaaggacaaccgagacctggcgggtcttttgtacctgagcaggatcctgttaccaaaaacaaaacctgccgtatcgcagcgaaaccatacgaggagcaagtgaatcctgtgttgctgactttgtcgccacagactggcaccctcgcactctcagtccagcctagtggcggggatatccggatgaatcaaggtccagaagaatccgagtctcacctctgctctgattccacccccaaaatggaaggacctcagggggcttgtggcttaaaactcgctggagacacaaaacccaagaatcaggttctcgctacttacatgtcacatgagttagtgttggccactccacagaatctcccaaagatgccggaactgcccttactgccgcatgatagccacccaaaagaactgatactggacgtcgtcccaagcagccggcgaggctcttccactgaaaggccccagcttggatcccaggtagatttggggcgggtcaagatggaaaaggtggacggggacgtggtcttcaacttagccacgtgctttagggccgatggacttcctgtggccccccagagaggccaggcagaagtgcgcgccaaagccggacaagctagagttaaacaagagagtgtaggcgtgttcgcttgcaagaacaaatggcagcctgacgacgtgaccgagagcctgccccctaaaaaaatgaagtgtggaaaggagaaggattccgaagaacagcaactgcaaccgcaggcaaaagctgtggtacgctccagccacaggcccaagtgccgaaaactgccctccgacccccaggaatcaactaagaaatccccccgaggagcctcagactcgggcaaggaacataatggagtgcgcgggaagcacaaacaccggaagccgaccaaaccagaatcccaaagtcctggcaagcgtgccgatagccacgaggaaggatctctggaaaagaaggccaaatctagctttagagattttatccctgtggtcctgtctactcgcaccagatcccaatccgggtccatctgtagcagctttgcaggaatggccgattcagacatgggcagtcaggaggtatttcccactgaggaagaagaagaggtaacccccacccccgctaagagacggaaggtgcgcaagacccagcgggacacccagtacagatcccatcacgcacaggacaagagcctgcttagtcaaggccggagacacctgtggcgcgcacgtgaaatgccttggcgcacagaagccgcccggcaaatgtgggatacaaacgaggaggaagaggaggaagaggaggaaggccttctcaaacggaagaagaggcggcggcagaaaagcaggaagtaccaaacaggcgaatatctgaccgagcaggaagatgaacaacgcagaaaaggccgcgccgacctaaaggccaggaaacagaaaactagctccagccagagcttagaacaccgcttgcggaacagaaatctattgcttccaaacaaggtgcagggcattagcgatagtccaaatggatttctgcccaataacttagaggagcctgcctgcctcgaaaatagcgaaaaaccatctggaaagcggaagtgcaaaaccaaacatatggccaccgtttccgaggaggccaaggacgtggtactgtactgcctgcaaaaagacagcgaggatgtcaatcatagagacaacgcaggttatacagccctccacgaagcctgctcccgcggatggactgacattctcaatattttactggagcatggggcaaatgtgaactgtagtgcacaagacggaacccgacccgtccatgacgccgtggttaacgacaatctcgagacaatctggctcttactgtcatatggcgccgatcctacactggccacatactccggtcagacagctatgaaactggcctccagcgataccatgaagcgcttcctgtcagaccatctaagcgacctgcagggcagggctgaaggggaccccggcgtatcctgggacttctatagctcatctgtcctcgaggagaaggacggctttgcctgcgatttactacacaacccaccagggagctccgatcaggaaggtgatgaccccatggaggaggacgatttcatgtttgaactgtctgacaagccgctgctgccatgctataatcttcaggtgtccgtgagcagaggaccctgcaactggtttttgttctctgatgtcctcaagcgactgaagctgtcgtcgcgcatatttcaggcaaggtttccgcacttcgaaataaccacaatgcctaaggctgagttttatcggcaggttgccagctcccagctgttaacaccggccgaaagaccaggcggactcgacgatcgctctcctcccggctcgtccgagaccgtggagctggtccggtacgaacccgacctcctgcggttgctagggtctgaagtagaattccagtcatgtaatagctag

SEQ ID NO: 210278 - DNA, 5136 bp, Artificial Sequence
  derived and/or modified sequence
atgatcagcacagcccccctgtacagcggcgtgcacaactggaccagcagtgaccgcatccgcatgtgtggcatcaatgaggagcggcgggcccccctgagtgatgaggagagcaccaccggggactgccagcacttcggcagccaggagttctgtgtgagcagcagcttcagcaaggtggagctgacagctgtgggcagcggcagcaatgcccggggagctgaccctgatggcagcgccacagagaagctgggccacaagtctgaggacaagccagatgacccccagcccaagatggactatgctggaaatgtggccgaggccgagggcttcctggtgcccctgagcagccctggagatggcctgaagctgcctgccagtgacagcgctgaggccagcaacagcagagctgactgctcctggacccccctgaacacccagatgagcaagcaggtggactgcagccctgctggggtgaaggccctggacagccggcagggcgtgggggagaagaacaccttcatcctggccaccctgggcactggagtgcctgtggagggcaccctgcccctggtgaccaccaacttcagccccctgcctgcccccatctgccccccagcccctggcagcgcctctgtgccccacagcgtgcctgatgccttccaggtgcccctgtctgtgcctgcccctgtgccccacagcggcctggtgcctgtgcaggtggccacctctgtgcctgcccccagcccccccctggcccctgtgcctgccctggccccagccccacccagcgtgcccaccctcatcagtgacagcaaccccctgtctgtgtctgcctctgtgctggtgcctgtgcctgccagcgccccacccagcggccctgtgcccctgagcgccccagccccagcccccctgtctgtgcctgtgtctgccccacccctggccctgatccaggcccctgtgccccccagcgcccccaccctggtgctggcccctgtgcccacccctgtgctggcccccatgcctgccagcaccccacctgctgccccagccccacccagcgtgcccatgcccacccccacccccagcagcggcccccccagcacccccaccctcatcccagcctttgcccccacccctgtgcctgcccccaccccagcccccatcttcaccccagcccccacccccatgcctgctgccaccccagctgccatccccaccagcgcccccatcccagccagcttcagcctgagccgggtgtgcttccctgctgcccaggccccagccatgcagaaggtgcccctgtccttccagcccggcaccgtgctgacccccagccagcccctggtgtacatccccccacccagctgtggccagcccctgtctgtggccaccctgcccaccaccctgggcgtgagcagcaccctgaccctgcctgtgctgcccagctacctgcaggaccgctgcctgcccggggtgctggccagccctgagctgcggagctacccctatgccttctctgtggcccggcccctgaccagtgacagcaagctggtgtccctggaggtgaaccggctgccctgcaccagccccagcggcagcaccaccacccagcctgccccagatggagtgcccggccccctggccgacaccagcctggtgacagccagcgccaaggtgctgcccaccccccagcccctgctgcctgcccccagcggcagcagcgccccaccccacccagccaagatgcccagcggcacagagcagcagacagagggcacctctgtgaccttcagccccctgaagagccccccccagctggagcgggagatggccagccccccagagtgcagcgagatgcccctggacctgagcagcaagagcaaccggcagaagctgcccctgcccaaccagaggaagaccccacccatgcctgtgctgacccctgtgcacaccagcagcaaggccctgctgagcacagtgctgagccgcagccagaggaccacccaggccgccggcggcaatgtgaccagctgcctgggcagcaccagcagcccctttgtgatcttccctgagatcgtgagaaatggagaccccagcacctgggtgaagaacagcacagccctgatcagcaccatccctggcacctacgtgggcgtggccaaccctgtgcctgccagcctgctgctgaacaaggaccccaacctgggcctgaacagagaccccaggcacctgcccaagcaggagcccatcagcatcatcgaccagggcgagcccaagggcaccggggccacctgtgggaagaagggcagccaggccggggctgagggccagcccagcacagtgaagcgctacaccccagcccgcatcgcccctggcctgcccggctgccagaccaaggagctgagcctgtggaagcccaccggccctgccaacatctacccccgctgcagcgtgaatggcaagcccaccagcacccaggtgctgcctgtgggctggagcccctaccaccaggccagcctgctgagcatcggcatcagcagcgctggccagctgacccccagccagggcgcccccatccggcccacctctgtggtgtctgagttcagcggcgtgcccagcctgagcagcagcgaggccgtgcacggcctgcctgagggccagcccaggcctgggggcagctttgtgcctgagcaggaccctgtgaccaagaacaagacctgcagaattgctgccaagccctatgaggagcaggtgaaccctgtgctgctgaccctgagcccccagacaggcaccctggccctgtctgtgcagcccagcggcggggacatccgcatgaaccagggccctgaggagagcgagagccacctgtgcagcgacagcacccccaagatggagggcccccagggcgcctgtggcctgaagctggccggggacaccaagcccaagaaccaggtgctggccacctacatgagccatgagctggtgctggccaccccccagaacctgcccaagatgcctgagctgcccctgctgccccatgacagccaccccaaggagctgatcctggatgtggtgcccagcagccggcggggcagcagcacagagcggccccagctgggcagccaggtggacctgggccgggtgaagatggagaaggtggatggagatgtggtgttcaacctggccacctgcttccgggcagatggcctgcctgtggccccccagaggggccaggccgaggtgcgggccaaggccggccaggcccgggtgaagcaggagagcgtgggcgtgtttgcctgcaagaacaagtggcagccagatgatgtgacagagagcctgccccccaagaagatgaagtgtgggaaggagaaggacagcgaggagcagcagctgcagccccaggccaaggctgtggtgcgcagcagccaccggcccaagtgcaggaagctgcccagcgacccccaggagagcaccaagaagagccccaggggggccagtgacagcggcaaggagcacaacggggtgcggggcaagcacaagcacaggaagcccaccaagccagagagccagagccctgggaagagagctgacagccatgaggagggcagcctggagaagaaggccaagagcagcttccgggacttcatccctgtggtgctgagcaccaggaccaggagccagagcggcagcatctgcagcagctttgctggcatggctgacagcgacatgggcagccaggaggtgttccccacagaggaggaggaggaggtgacccccaccccagccaagaggaggaaggtgaggaagacccagagggacacccagtaccgcagccaccacgcccaggacaagagcctgctgagccagggccgccgccacctgtggagggcccgggagatgccctggaggacagaagctgcccggcagatgtgggacaccaatgaggaggaggaggaggaggaggaggagggcctgctgaagaggaagaagagaagacggcagaagagcaggaagtaccagacaggagagtacctgacagagcaggaggatgagcagaggaggaagggccgggctgacctgaaggccaggaagcagaagaccagcagcagccagagcctggagcaccggctgaggaacagaaacctgctgctgcccaacaaggtgcagggcatcagtgacagccccaacggcttcctgcccaacaacctggaggagcccgcctgcctggagaacagcgagaagcccagcggcaagaggaagtgcaagaccaagcacatggccaccgtgtctgaggaggccaaggatgtggtgctgtactgcctgcagaaggacagtgaagatgtgaaccaccgggacaatgccggctacacagccctgcacgaggcctgcagccggggctggacagacatcctgaacatcctgctggagcacggggccaacgtgaactgcagcgcccaggacggcaccaggcctgtgcatgatgctgtggtgaatgacaacctggagaccatctggctgctgctgtcctatggagctgaccccaccctggccacctacagcggccagacagccatgaagctggccagcagtgacaccatgaagcgcttcctgagtgaccacctgagtgacctgcagggccgggcagagggggaccccggggtgtcctgggacttctacagcagctctgtgctggaggagaaggatggctttgcctgtgacctgctgcacaaccccccaggcagcagtgaccaggagggagatgaccccatggaggaggatgacttcatgtttgagctgagtgacaagcccctgctgccctgctacaacctgcaggtgtctgtgtcccggggcccctgcaactggttcctgttcagtgatgtgctgaagaggctgaagctgagcagccgcatcttccaggcccgcttcccccactttgagatcaccaccatgcccaaggccgagttctaccggcaggtggccagcagccagctgctgaccccagctgagaggcctgggggcctggatgacaggagccccccaggcagcagcgagaccgtggagctggtgcgctatgagccagacctgctgcggctgctgggcagcgaggtggagttccagagctgcaacagctag

SEQ ID NO: 210279 - DNA, 5136 bp, Artificial Sequence
  derived and/or modified sequence
atgatcagcaccgcccccctgtacagcggcgtgcacaactggaccagctccgatcgcattagaatgtgcggcataaatgaagagagaagggcgccactgagtgatgaggagagtactaccggtgactgtcagcacttcggctctcaggagttctgcgtaagttcctctttttccaaagtcgagctgacagctgtgggttccggttctaacgcacgcggggctgaccccgatgggagcgctactgagaagctgggacacaaaagcgaagacaaaccagacgacccgcagccgaagatggattatgccgggaacgtcgccgaagctgaggggtttttggttccgctgtcctctcctggtgatggcctgaaactgcccgcttccgattctgccgaagcgtccaacagccgtgcagactgcagttggacacctcttaatactcaaatgtctaagcaagtcgactgctccccagcaggcgtcaaggcgctggactccaggcagggggttggagagaaaaacacatttatcttggccacgctgggaactggtgtgcccgttgaaggaacattgcctttagtgactaccaacttcagtcccctacccgcgcccatctgcccgcccgcaccaggctccgcctccgtgccacactccgtgccagatgcatttcaggtcccccttagtgtgcccgccccggtgccacacagcggcctggtccccgttcaggtggctacctctgtacccgctccatccccaccgttggcacctgtgccagccctggcccctgctcctccctcagtgcctacgctaatttctgatagcaatcctttaagtgtgtcagcctccgtccttgtgcctgtgcccgcttcagcccccccaagcggaccagtccccttgtcagcacctgctcctgcacctctgagcgtccccgtgtccgctcctcctctggccctgattcaggccccagtgcctccctcagcccctactctggtgctagccccagttcctaccccagtgctggcacctatgcctgccagcacgcccccagcagcgccagccccccccagcgtgcccatgccaacgccgacacctagcagtgggccaccgtccacacctacattgattcctgcattcgcccctaccccggttccagctccaactcctgctcctatcttcacccctgctcctacacccatgccagccgcaacccccgcagccattcctacaagcgcccccatccccgcctccttctctctgtccagagtctgcttccccgcagcccaagcccccgctatgcaaaaggtgccccttagcttccagcccggaaccgtgctcaccccctctcagcccttggtctacatacctcctccttcctgcggtcaacctctctctgtcgccaccctccccactactctcggagtaagttcgaccctgaccctgcctgtgctcccctcctacctgcaagacagatgccttccaggagtactggcctcgcccgagctcagaagttatccatacgcattctccgtggcccggcctctgactagtgattcgaaactggtctctcttgaggtcaatagactcccgtgtaccagcccctctggctccacaactacccagcccgcccctgatggcgtcccgggccctttggcggatacctctctggtcacagccagtgccaaggtgctcccaaccccccagccgctgctgcccgcgccctccggctcaagcgccccgccacacccagccaagatgcctagcggaacagaacaacaaaccgaggggaccagcgtgaccttcagtcccctgaagtccccgccacaactggaaagggaaatggcatcaccccccgagtgttccgaaatgcccctggacctcagttcgaagagcaataggcagaagttgcccttgcctaatcaacggaagacccctcctatgccagttcttaccccggtacacacatcttccaaagcactgttatctaccgtgttgtctaggagtcagcggaccacacaggccgcgggcgggaacgtgacatcatgcctcggcagtacaagttccccctttgtgatctttcccgagattgtccgcaacggtgatccgtctacctgggtcaagaattctacggcgctgatctctaccatcccagggacctacgtcggtgtcgctaacccagtgcctgcctctctgttgctcaataaggaccccaatctcggcctcaatcgggatccgagacacctgccaaagcaggaacctatctctattattgatcagggagagcccaaaggaaccggcgcaacttgcgggaaaaaaggctcccaggcaggcgcagaagggcaaccatcaactgtgaagaggtatacgccagcacggatcgcccctggcctgcctggctgtcagacaaaggaactgtcactgtggaagccaaccggcccggcaaatatctacccacgttgcagtgtgaacggcaagcctacatccacacaagttctgcccgtgggttggtcaccctaccaccaggcatcactgcttagcattggaatttcgagcgcaggccagctgacgccatctcagggcgctccaatccgacctaccagcgttgtgtccgagtttagcggtgtaccttctctcagcagttccgaagctgtccacggtctcccggagggtcagccaaggcctggcggcagctttgtgcctgaacaggacccagtgacgaagaataagacatgccgaatcgccgcgaagccctatgaggagcaggtgaatccagtgctgcttactctctcaccccagaccgggacactcgcactctcagtacaaccttccgggggtgatattcggatgaaccaggggccggaggaatcagaatcacacctgtgttccgattctacccccaaaatggagggaccgcagggggcctgcgggttaaaactggccggggacactaagcccaagaatcaggtgctcgctacatatatgagccatgagctggtgctagccacacctcagaacctgcctaaaatgcccgaactaccacttttaccacatgatagtcatccgaaggagctcattttagacgttgtcccttcctcccgacggggcagctccacagagcggccacagctgggaagtcaagttgaccttgggcgcgtaaaaatggagaaagtcgatggggatgtggtgtttaatttagctacctgcttccgggcggacggcctgccagtggcaccccagaggggacaggctgaagtgagggccaaggccgggcaggcccgagtgaagcaggagagcgtgggggtgttcgcgtgtaaaaataagtggcagcctgatgacgtgacggaatcacttccaccaaagaagatgaagtgcggcaaagaaaaggactctgaggagcaacagctgcagccacaagcaaaggctgtggtcaggtcaagccaccgccccaaatgtagaaagcttccaagcgacccacaggagtccaccaagaaatctcctcggggcgcatccgattctggaaaggagcacaatggggttcgaggtaaacacaagcacaggaaaccgacaaaaccagagtctcagtctccagggaaaagagccgacagccacgaggaaggtagtctggagaagaaggcgaagtcaagctttcgcgatttcatacccgtagtcctcagcactaggactcgctctcaatccggcagcatttgcagttccttcgctggcatggccgactccgatatggggtcacaggaagtttttcctactgaggaagaggaagaagtgactcctacgcctgctaaaaggcggaaagtgaggaagactcagcgcgatacacaatatcggtctcatcacgcgcaggataagagtctgttgagtcagggccgccgccacctttggagagcccgggagatgccgtggcgaacagaggcggctcgtcagatgtgggacaccaacgaagaggaagaggaagaggaggaggagggactgctgaagaggaaaaagcgcaggcgacagaagtctcgaaagtaccagacgggcgaatacctcaccgaacaggaggatgagcagaggcgcaagggccgggccgaccttaaagcgcgaaagcagaaaacgagcagctcacagagcctggaacatcggcttcgcaaccgcaacctcctgcttcctaacaaggtccaaggcatttcagatagtcccaacggattcctgcccaataacctggaagagcctgcatgcctggaaaattcggaaaagccatcaggtaagcgcaaatgcaagactaagcacatggctacggtgtctgaggaggcaaaggatgtggtcctttattgcctgcaaaaggattcagaggatgtcaaccatagagacaatgctgggtatactgccttgcatgaggcttgttcgcgggggtggactgatatcttgaatatcctgctggaacacggagccaatgtgaactgttcagcccaggatggaacgcgcccagtgcatgatgccgttgtgaatgataaccttgagaccatttggctccttttgagctacggcgccgatccaaccttggcaacctatagcgggcaaacggccatgaagctcgccagctcagacaccatgaaaaggttcctgagcgaccacttatctgacctccagggcagggccgaaggagacccaggtgttagttgggacttctatagctcaagtgttttggaagagaaggacgggttcgcttgtgacctgctccacaaccctccggggtcctccgaccaggagggcgatgacccaatggaggaagatgacttcatgtttgagctcagcgacaaaccgctgttgccctgctacaacttacaggtgtccgtgagcagagggccatgtaactggttcctcttcagtgatgtgcttaagagactgaagcttagtagtcggatattccaggccaggttcccacatttcgaaatcacaaccatgcccaaggccgagttctatcggcaagtagcctcttcccagctcctgaccccagctgagagacctggggggctagatgatcgatctcccccaggctcatccgagactgttgaactggtgagatacgagcccgacctcttgcgactcctgggcagcgaggtggagtttcagtcatgtaacagctag

SEQ ID NO: 210280 - DNA, 5136 bp, Artificial Sequence
  derived and/or modified sequence
atgataagtacagccccactgtattctggggtgcacaattggacatcaagcgacaggattagaatgtgtggtatcaatgaggagcgcagagctcccctctcagatgaagagtccacgacaggcgattgtcagcactttggctctcaggagttctgcgttagcagctccttctctaaagttgagctgaccgccgtgggaagtggatccaacgccagaggggctgatccagatggctccgctaccgagaaattgggccataagtccgaggacaagcctgacgaccctcagcccaagatggattacgccggaaacgtggcagaagctgagggatttcttgttccgttgtctagtccaggggatggtctcaagctgccagcctcagattccgctgaagctagtaactcgagggccgattgctcatggacaccactgaacacccagatgagcaagcaggtcgactgcagtcccgctggtgtgaaggccctggacagcaggcagggggtgggtgagaagaataccttcatcctggctacgttggggacaggtgtccccgtggaaggtaccttgcctctcgtcaccacgaatttttctcctttgcccgctcccatttgtcctcctgcccctggctcagccagtgtcccgcattccgttcctgacgctttccaggtgccactctccgtaccggcacccgtgcctcactcaggactggtgcctgttcaggtggctacttccgtgcccgctccgagcccaccgcttgccccagtgccagctctggcccctgcccctcctagtgtccctacccttattagtgatagcaaccctttgtcagtctcggccagcgtcctagttcccgtgccagccagcgctcctcctagcgggccagtacctctctccgcccctgctccggctccgctgtccgtgcccgttagtgccccacccctggccctgatccaggcacctgtgcccccatccgccccaaccctcgtgctggcccctgtccccacgcctgttctggccccaatgcccgcaagcactccacccgcagcgccagctcctccctctgtgcccatgccaacaccgacgccttcatccggacctccgtccacaccaactctgattcccgcattcgcgcctacacctgtcccagctcctacccccgctcctatcttcacccctgcccctacccccatgcctgcggctacacccgctgccatccccacctcggctcccattcctgcaagcttctctttgagtagggtgtgcttcccagcagcacaggcccctgcaatgcaaaaggtgccactgtcatttcagccgggaactgtactgactccatcacaaccactagtctacattcctcctccttcatgcgggcagcctctttctgtcgctactttgcctaccaccctgggtgtgagctcaacacttactctgcccgtcctaccatcgtacctgcaggaccggtgtctgcccggagtgttggctagcccagagctacgctcttacccctatgcattctctgtggctcgccctttgaccagcgactcaaagctagtgagcctggaggtcaaccgacttccgtgtacctctccttctgggagcaccaccacccagcccgcacctgacggggttcccggtccattggccgacacatctctggtcactgcctcggctaaagttctccccaccccccagcctttgttgccggcaccatcagggagcagtgccccaccccaccctgcgaagatgccctccggcaccgagcagcagacagaaggcacatccgtcactttcagccccctgaagagtccaccccagcttgaacgggaaatggcctcaccgcctgagtgctcagaaatgccactggatctgtcctctaagtctaaccgtcagaaactccccctgcctaaccagaggaaaactcctcccatgccagttcttacccctgtgcatacatcgtctaaggcactgctctccacggtcctgagcaggtcacaacgcacaacacaggctgctggcggtaatgtgacatcctgcctaggatctacttcttctcccttcgtgatttttcccgagattgtaaggaacggcgatccttctacctgggttaaaaattcaactgccctgataagcaccatccccggaacgtacgtcggggtcgctaatccagtgcccgcatcattactacttaataaggacccaaatctcggcctgaacagagaccccaggcatcttcctaaacaggagcccatttctatcattgatcagggagaacccaagggaactggagctacctgcggcaagaaggggagtcaggctggcgcagaaggacagcccagcacagtcaagcggtataccccagctcggatagccccaggacttccaggctgtcagaccaaagaactgagtctgtggaagcctaccgggccagccaatatctatccgaggtgtagtgtgaacggaaagcccacatcaacgcaagtgctgccagtgggctggtcaccttaccaccaggcgtctctcctgtctatcggaatctccagcgccggtcagctcactccctcccagggagcgccaattcgtccaacatcagttgtgagtgaattttctggggtgccctcactctcttccagcgaagctgtgcatgggttgcctgaaggtcaacctagacccggtgggtccttcgtcccagagcaggatccggttactaagaacaaaacttgtcgcatagccgctaagccctacgaggaacaggtgaatccagttcttctcactctgagcccacagacaggaacgcttgccctgagtgtccagccaagcggcggagatataagaatgaaccaaggacccgaagaaagcgagtcccacctctgctccgactctacccctaagatggaaggtccccaaggggcatgcgggttaaagctggccggtgacaccaagccgaaaaatcaagtgctggccacctatatgtcccatgaactggtgttggccactccccagaacctgcccaaaatgcccgagctacccctgctgccacacgacagtcaccccaaagagttgatcctggatgttgttccaagcagcaggaggggctccagtactgagcggccacagcttgggtcacaggtggatttgggacgcgtgaagatggagaaggtagacggagacgtggttttcaatcttgccacctgctttcgcgctgatggccttccagtcgcaccccagcgtggccaggctgaagtaagagccaaagcaggccaagcccgagtaaagcaggagtctgtcggcgttttcgcctgtaaaaataaatggcagcccgatgacgtgaccgagtcattgccccctaaaaaaatgaaatgcgggaaagaaaaggactctgaagagcagcaacttcagcctcaggccaaggctgtcgtcagaagttcccaccgaccaaagtgcaggaagctgccttccgatccacaggaatccactaaaaagtctccgcgaggagcctctgattctgggaaagaacacaatggcgtacgtgggaagcataagcatcgaaaacccaccaagccagagtcacagtcgcctgggaaaagggccgatagccatgaggagggttccttagagaagaaagccaagtcgtcatttagggacttcatccccgtcgtacttagcacacggactaggtctcagagcggcagtatctgcagtagcttcgcagggatggccgattcagacatgggcagccaggaggttttccccaccgaagaggaagaagaggtcacgccaacgcccgcaaagaggagaaaggttcgcaaaacgcagagggacacccagtataggtcgcatcacgcacaagataaatcgcttctatcccaggggaggcgacacttgtggagagcccgtgaaatgccgtggaggactgaggcagctagacagatgtgggacacaaatgaggaggaagaggaggaggaggaggagggcctgctgaagagaaagaagagacggagacaaaagtctcgcaaataccagaccggagagtatctaacggagcaggaggatgaacagcggaggaaaggtcgggcagacttgaaggcaagaaagcagaagacatccagctcccagtcactggaacatcgcctgcggaatagaaacctgcttttgcccaacaaagtgcaaggtattagcgacagccccaacggattcctccctaataacctggaggaaccagcttgcctggagaactccgaaaaaccaagtggcaaacgcaaatgcaaaacaaagcacatggcaacagtcagcgaggaggcaaaggatgtggtgctttattgcctccagaaagatagcgaggatgtcaatcatagagataatgctggctataccgcgctgcacgaagcctgcagcaggggctggacagacattttaaacatacttctggaacacggtgccaatgttaattgttccgcccaggacggtacacgaccggtgcacgacgccgttgtcaacgacaacctggagacaatttggctcttgctgtcctatggggcagaccccaccctggctacctatagcggtcaaaccgcaatgaagctcgcctcatctgatactatgaagagatttctcagcgatcacctctcagatctccagggaagggccgaaggcgaccctggagtttcttgggacttctacagttccagtgtgctagaagaaaaagatggcttcgcttgtgacctactccacaatccacctgggtcttccgatcaggaaggagatgacccaatggaggaggatgacttcatgtttgagttgtccgacaaacccctgttgccctgttataatctgcaggtaagcgtgagtcgcggaccttgcaattggttcctgttctccgacgtgcttaaaaggctaaaattgtcctcacgaatattccaagccaggttcccacatttcgaaattactacaatgcccaaggccgaattttaccgacaagtagcctcctctcagctgctgacaccagcagaacgtcctggaggactggatgatagatcacctccaggaagcagcgagaccgtggagttggtgcgatatgagcctgatctgcttcgcttactcggttctgaggtggaattccagtcatgcaactcataa

SEQ ID NO: 210281 - DNA, 5136 bp, Artificial Sequence
  derived and/or modified sequence
atgatttccaccgcaccactttacagtggcgttcataactggaccagctcagaccgcattaggatgtgcggcatcaatgaggaacgccgcgcaccactgagcgacgaagagtccactaccggggactgccagcacttcggctcgcaggagttttgtgtctcaagcagtttttccaaagtagagctgaccgctgtggggagcggctccaatgcccgtggtgccgaccctgacggaagcgccacggaaaagttgggccataaatcagaggataaacccgatgacccccagccaaagatggactatgcgggtaacgttgccgaagccgagggcttcttggtccccttgagttctcccggagacgggttgaagttacctgcatctgattccgctgaggcctccaattccagagccgattgttcatggacgccacttaacacccaaatgagcaagcaggtggactgcagtcctgcgggcgtgaaggccctcgacagccgccagggcgtgggggagaagaatacatttatcctggctaccctgggtaccggcgtgccagtggagggcaccctacccttggtcacgacaaatttctcacctttgcccgcccctatttgtcctcccgctcccggctctgcctcagtcccgcatagcgtgcctgacgcgtttcaggtaccactgtccgtcccagccccagtaccccactcagggttagtgcccgtccaagttgcaactagtgtgccagccccctccccaccactggctcccgtacctgctttggcccccgcaccaccatcagtgcccacgctgatctccgattctaacccattatcagtgagcgcttccgtcctggtcccggtcccagcttccgcaccccctagcgggccggtacctcttagcgcccctgcccccgcccccctgagcgtgccagtgtccgcccctccactggctctcattcaagccccagtgccccctagtgcccccaccctcgtgttggcgccagtgcctactcctgtgcttgcaccaatgcctgcctcaactcccccagcggcccccgctcccccttcagtgccaatgcctaccccaacacctagctctggtcctcctagtaccccgactctaatccctgcctttgccccgactccggttcctgccccaacccctgcgcccatctttaccccagcccccactccaatgccagccgccacacccgctgccatccccacatccgctcctattccagccagcttcagcttgagccgcgtctgtttccccgctgcgcaggcaccagcaatgcaaaaggtgccattgagttttcaaccaggcaccgtcctgacaccctcccaaccgttagtgtatataccccccccttcatgtggccagcctctgagcgtcgctactttaccaacaaccttgggcgtgtcaagtactttaacgttaccagtgctcccatcttatcttcaggacaggtgtttgccaggtgtgttggcttctcccgaattgcgaagttatccttacgccttctccgttgcccgccctctaaccagcgactctaaactcgtttccttggaagtcaaccgtctgccctgcacatctccaagcggatcaacaacaacacagcctgcgcccgatggggtgccggggccacttgcggacacttcactggtgaccgcaagtgccaaggtgttgccaacaccacaaccgcttttgccagccccgtccggctcttccgcaccaccccatcctgccaaaatgcccagtggcactgagcagcaaacagagggcacctctgttaccttcagtcctctcaagtcacctccacaattggagcgggaaatggccagcccccctgagtgcagcgaaatgccactggatttgtcatctaaatctaaccgacagaaactgcccctcccgaaccagagaaagacaccaccaatgcctgtgctcactcctgtgcacacttcttctaaagcacttttaagtactgttctctcccgatcacagaggaccacccaagccgccggtggcaatgtgacatcttgtttgggatcaacatcttctccattcgtcatcttccccgagatcgtccgcaatggggaccctagcacatgggtgaaaaattcaacagccctcatttcaaccattccaggaacatacgtcggcgtagcaaaccccgtgcctgcctccctgctcctgaacaaagatccaaatctgggtctaaatcgcgacccccggcaccttccgaagcaggagccaataagcataatcgaccagggtgaaccaaaggggaccggcgctacgtgcggcaaaaaaggcagccaggccggtgccgagggccagcctagcaccgtgaaaagatatactcccgcgcggatcgcccccggtttgcccgggtgccagacaaaggagctgagcttgtggaaacctaccggaccagccaacatttatcctaggtgcagtgtaaacggcaagcccacatctacccaagtcttgccagtcggctggtcgccttaccatcaggcctccctcctgtcgatcggaatttctagcgctgggcaactcacgccgagccagggcgctccaattagacctacctccgtcgtgtccgagttttccggagtcccgtccttaagcagctcagaagccgtgcacgggttgcccgagggacaaccgagaccagggggctcgtttgtgcccgagcaagaccctgtgacaaagaataaaacttgccggatcgccgccaagccttatgaggaacaggttaacccagtgctcctgactttaagcccgcagactggcaccctcgctttaagcgtccagccatctggcggtgacatcaggatgaaccaggggccggaggaaagcgagagtcatctatgttcagatagtactcctaagatggagggcccacagggtgcatgcggcttaaagctcgcaggggacactaaaccaaagaatcaggtgctcgcaacatacatgagccatgaattagtcctggcgactccgcaaaacctgccgaagatgcccgagctgccactcctacctcacgatagccatccgaaagagttaatactggacgttgtcccaagcagcaggaggggcagcagtacagagcgccctcagttaggctcccaggtagatcttggtagggtcaagatggagaaagtggacggcgacgtagttttcaacctcgcaacttgcttccgcgccgacgggctccccgtagccccgcaaaggggacaggctgaggtgcgggctaaggctggccaggctcgagttaaacaggagagcgttggtgtgttcgcttgtaagaacaaatggcagccagatgacgttacagagagtctgccgcctaagaaaatgaagtgtgggaaggagaaagatagcgaggaacagcagctccagcctcaggcaaaggctgttgtgaggtcctcgcaccggcctaagtgtaggaagctgccgtccgatccccaagagtctactaaaaaaagtcctcgcggggcatcggattcgggtaaagagcataacggcgtaagaggcaagcacaaacatcgtaagcccacaaagcccgagagtcaatctcccggtaaacgggccgattcccacgaagagggtagtttggaaaaaaaagcaaagagttcattccgtgacttcatccctgtggtgctgtcaactcgaaccagatctcagagtggatctatctgttccagtttcgctggaatggccgactcagatatgggcagccaggaggtgtttccgaccgaagaagaagaggaggtcacgcccactccagcaaagcggagaaaagttagaaagacacagcgagatacccagtaccgctctcaccacgcccaggacaaatctcttctcagccaggggcgacgccatttatggcgagcacgagagatgccatggagaactgaggctgcccggcagatgtgggatacaaacgaggaggaggaagaggaggaggaggaggggctccttaaacgcaagaaaaggaggcgccagaaatctcgcaaataccagacaggggagtatctcactgagcaggaggacgaacagaggcggaaggggcgggcagacctgaaagctcgcaagcagaagactagtagcagccagtcactagaacacagactacggaatcggaacctcttgctcccgaacaaagtccaaggaatctcggactcacccaacggcttcctacccaataaccttgaggagcctgcatgcttggaaaattctgagaaaccttcaggcaagcgtaaatgtaagacaaaacatatggctacggtcagcgaagaagccaaggacgttgtcctgtactgtttacagaaagatagtgaagatgtgaatcaccgcgataacgccggttataccgccttgcacgaagcgtgttctagggggtggaccgacatactcaacatcctccttgagcatggcgcgaatgtgaattgttctgctcaggacgggactagacctgtccatgatgcggtggtcaacgacaatctagaaaccatctggttattgctctcctacggagctgaccccacgttggccacctacagtggacagacagccatgaagttggcatcctccgataccatgaagcgattcctgtccgatcacttaagtgacctgcaaggtcgcgcagaaggcgaccctggggtgagctgggacttctactccagttcagtgctggaggaaaaagatggtttcgcctgtgacttactccacaatcccccaggatctagcgaccaggagggagatgatcctatggaggaagatgacttcatgtttgagctgtcagacaagccattactaccatgttacaatctgcaggtgtcagtcagccggggcccatgtaactggttcttgttcagtgacgtcctgaaaagactgaagctgagctcgagaatcttccaggcaagatttccacatttcgagatcaccacaatgcccaaggccgagttttaccgccaggtggctagcagtcaactcctaacaccagctgagcggccaggaggactggacgacagatcccccccaggaagctctgagacagtggaacttgtgaggtacgagcccgacctactcagactactggggagtgaagtcgagttccagagttgtaactcatag

SEQ ID NO: 210282 - DNA, 5136 bp, Artificial Sequence
  derived and/or modified sequence
atgatcagcaccgcccccctgtacagcggcgtgcacaactggacctcctcagaccggatccgtatgtgcgggattaatgaggagaggcgcgcccccctgtccgatgaggaaagcactacaggcgattgccagcatttcggcagccaggagttttgtgtaagctcaagcttttccaaggttgagttgacggctgtgggatccggcagcaatgctcgcggagcagaccctgacggttctgctactgagaagctcggccataagtctgaggataagcctgacgaccctcagccgaagatggactatgccgggaacgtcgctgaggcagaaggctttctggtgcccctgtcttcccccggagatggactcaagctgcctgcctcagactcagcagaggcttccaatagcagagctgactgttcttggacaccgctgaacactcaaatgagtaagcaagtcgactgttcacccgccggggtaaaggccctggactctaggcagggggtcggcgagaagaacaccttcatactggctactctgggcaccggagtgcccgtcgagggtacccttcctcttgttaccacaaactttagcccactgccagcccccatatgcccccccgccccaggatctgccagtgtcccacactccgttccagacgcttttcaagtaccgctaagtgtccctgcgccagtgccccatagcgggcttgtgcctgttcaggtggctacaagtgtccctgcaccatccccgcctttagcccccgtccctgccttggccccagcccccccatcagtgcccacactaatctcggatagcaaccctttgagtgtctctgcctccgtgctggtacccgtcccggcgtcagcccccccttccggccccgtgcctcttagcgctcccgcacccgccccactgtccgtgcccgtgtctgcccctcctctggctctgatccaggcaccggtcccaccgagtgcaccaaccctggtactggcccccgtccccaccccagtcctggccccaatgccggcctccacacctcctgccgccccggcacctccttccgtgccaatgcctacacctaccccatcttctggacccccgtcaactcctaccctcatccccgccttcgcccctacgcccgttcctgcccccactccagcaccgatcttcacccctgcgccgactccgatgcccgccgccaccccggcggctattcccaccagcgcccccatccctgcttctttctccttatcaagggtgtgtttccctgccgcccaggctcctgcaatgcagaaggtgcccctctcctttcaacctggaacagtgctgaccccaagtcagccacttgtgtacattccccctccaagctgcggccaacccctttctgttgccaccctccctacgacactgggcgtgagcagcacccttaccttaccggttctccctagctatctacaggacaggtgcttgccaggtgtcttagcgagtcccgagctcaggagctacccctacgcattctcagtcgcaaggcccttgacaagcgattctaagctggtgtccctggaagtcaaccggctgccctgtacttcacctagcggatcgaccactactcaacccgcacccgacggcgtgccaggacctcttgcggatacatccctggtgaccgcgagcgctaaggtccttcctacacctcagcccctccttccagcacccagcggcagcagtgccccaccccacccagctaaaatgccatcagggaccgaacaacagacagagggcacctccgtgacattctccccactcaagagcccacctcagcttgaaagggaaatggcatcaccacccgagtgctctgaaatgcctttagacctgtcgtccaagtcaaacaggcaaaagttacctttacccaatcagcggaagactcctcccatgccggttttgactcctgtccatacatcatccaaagccctcctatcaactgtgctgtcgaggtcacaacggacgacccaggcggccggcggaaacgtaacttcatgccttggtagcacaagttcgccttttgtgatcttcccagaaattgtgaggaatggggacccaagcacctgggtgaaaaatagcacagcccttatctcaactatccctgggacgtacgtgggggttgccaatccagtaccagcatctcttctccttaataaagatccaaacctcgggctgaaccgtgaccctagacatctgccaaaacaggagcctattagtattatcgaccagggcgaaccgaaagggaccggcgcgacatgtggcaagaaagggtctcaagctggtgccgagggtcaacccagtacagtgaaacggtatacccctgctcgaatcgcaccaggcctgcccggatgccagacgaaagaactgtccctctggaaacctacaggacccgcaaacatctatcccagatgcagcgtgaacggcaaacctacctcaacccaagttttgccagtgggttggagtccataccaccaagcaagcctgctctccatcggcatctccagcgctggccagctgacaccaagccagggggcccctatccggcctacgagtgttgtctccgagttcagtggggtcccaagcctctctagtagcgaagcagtgcatggcctgccagagggacagccccgcccaggggggtcctttgtgcctgagcaagatcctgtcaccaagaataaaacatgccgcattgccgcaaagccttacgaagagcaggtgaacccagtgctactcacgcttagcccccagacaggcactttggctcttagtgtccaaccaagcggaggcgacatccgaatgaatcagggaccagaggaatcagaatcacatctgtgcagtgattcaacgcctaaaatggaggggccgcagggagcgtgcggccttaaacttgccggggacacaaaacctaagaaccaggtgctggctacctacatgagccacgagctggtgttggcaactccacaaaacctgccaaaaatgcctgagctgccccttcttcctcacgattctcatcctaaagaacttattcttgacgtggtaccttccagccgccggggatcatctacagaaaggccacagcttgggtcgcaggtcgacctgggacgagtgaagatggagaaagtcgacggggatgtagtgttcaaccttgctacctgtttcagagcagacggcctccccgtggcgccgcaacgcggtcaggctgaggtaagggcgaaagcaggccaggcgcgcgtgaaacaggagtctgtgggggtcttcgcctgcaaaaacaaatggcagccagacgatgtcactgagtcgttgccccccaagaagatgaagtgtggaaaggagaaggactcagaggaacagcaacttcagccccaggccaaggccgtggtaaggagctcccacaggcctaagtgtcggaaactgccatccgatccacaggagagcacgaagaaatctcctcggggcgcctctgattcgggcaaggagcacaatggggtcagaggaaaacacaaacataggaagcccacgaagccagagtctcagagtcccgggaaacgggcggactctcatgaggaaggaagcttagaaaagaaggccaagtctagctttagggatttcatccccgtcgtgctgtctacccgaacaaggtcacagtctggatctatctgttctagctttgcgggaatggccgattccgacatgggatcgcaggaggtttttcccacagaagaggaggaggaggtgacaccaacccctgcaaagagaaggaaggtgcggaagacccagagggatactcagtacagatcccaccatgcccaggataagtcactcctcagccaggggaggcgacacttgtggcgcgctagagagatgccttggaggacagaagcagccaggcagatgtgggataccaacgaagaggaggaggaagaggaagaggaggggttgctgaagcggaagaagcggaggcgccaaaaatctaggaaataccagacgggagagtatcttacagagcaggaggacgagcagcgcaggaagggacgagctgacttgaaagcccggaagcaaaagacctcttccagtcagtccttagagcataggttgagaaaccgcaacctcctcctgcctaacaaagtccaaggcatttctgattcccccaacggttttttgcccaacaatctggaggaacccgcttgccttgagaattccgagaaaccttcaggcaagagaaagtgcaagactaaacatatggctaccgtatccgaggaggctaaggacgttgttctgtactgcctgcagaaggatagtgaagatgtgaaccaccgggacaacgcaggctacaccgctttgcatgaggcctgcagtcggggatggacagacattctgaacatcttgctcgagcacggcgcgaacgtgaattgttccgctcaggacggaacacgaccagtgcatgatgccgtggttaatgacaatttggagactatttggctgctgctgagttacggggctgaccccactctcgctacatatagcgggcaaaccgccatgaaactggcctcatctgacacaatgaaacgttttttatccgatcatctcagtgacctgcaggggcgagccgagggcgatccaggagtcagctgggacttttactccagttctgttttggaagagaaggacggattcgcctgcgaccttttgcataatccgcccggttctagcgatcaggaaggcgatgatcccatggaggaggatgatttcatgttcgagctatctgacaagccactgctcccctgttataacctgcaagtatctgtcagccggggtccatgtaactggtttctattttcagacgtcctgaaacggcttaagctctcttcacgaatttttcaggcgcgctttccacacttcgaaataaccaccatgccaaaagccgagttctataggcaagttgcatcaagccagctgctgactcccgccgagcggcctggcggcctcgacgacagatcacccccaggttcttcagagacggtggagttagtgcgctatgagcccgaccttctgaggttattgggatctgaggtggaattccagagctgcaattcttag

SEQ ID NO: 210283 - DNA, 5135 bp, Artificial Sequence
  derived and/or modified sequence
atgatttccaccgctccgctgtactccggcgtgcataactggacctcctccgatcgaatccggatgtgcggtattaacgaggaacggagagcccctctttcagatgaggaatcaaccacaggtgactgccagcacttcgggagccaggaattttgcgttagttcgtctttctccaaggtggaattgactgctgttgggagcggctctaatgccaggggcgcagaccctgatgggagtgctactgaaaaacttgggcacaagtctgaggataaaccagatgatcctcagccgaaaatggactacgccggaaacgtggcggaggctgagggctttctagtgcctctgagcagccccggagacggcctgaagctgcccgcttcagattccgcagaagcctccaatagccgggcagattgttcttggactcctttaaatacacagatgtccaagcaagtggattgctctcccgctggagtcaaggccctggactcccgccagggagtaggggagaaaaatacatttatcctggcgacactggggacaggggtcccagtggagggaacgctgcccttagtgactactaacttctcaccccttccagccccaatctgcccccctgcacctggatctgcgtctgttccccattccgtaccagacgctttccaggtgcccctttctgtgcctgcacccgtccctcactcaggcctcgttccggtacaggttgctacaagcgtaccggctccttctcctcctttggcaccagtgccagctctggctcctgcgcctccgagtgtacctacattgatcagcgatagcaatccactctctgtgtccgcaagcgtgctggttcccgttcctgcttccgctccgccatcagggcctgtcccactgtcagcgcctgcaccagcacctctttccgtcccagtgtcagcccctcctctggcgttaatccaagctcccgtacctcccagcgcaccgactctcgtcctcgcgccagtcccaacgccagtcttggcccctatgcctgcatcaactcctccggctgccccagccccacctagcgtgccaatgcctaccccaaccccaagttctggccctccatcgacacctaccttgattccagctttcgcaccaactcctgtgccagcccctacgcccgcacccatctttactcccgctcctacaccaatgcctgccgcaacgccagcagccattccgacctccgcaccaatacccgctagtttcagcctttcacgggtgtgcttccccgcagcacaggctccagccatgcagaaagtccctttatcgtttcagcccggaacagttttgacgccaagtcagccactggtgtatataccccctccttcatgcggacagccattatctgtagcaacattgcccaccaccctgggtgtatcctctaccctcaccttacctgttcttcctagttacctacaggacaggtgtctaccaggcgtcctggcatcccctgagctgaggagctacccatatgccttctcagtagcacgccctctgacatccgacagcaagctggtatccctggaagttaacagactgccgtgcacaagtccttctggaagcacaactacccagccagcgcctgacggagttccgggaccgctggcggacactagcctggtgacagccagcgccaaagtgttgcccacaccacagcctctgctgcctgcgccttctggcagcagtgcgccaccacaccccgcaaaaatgccctccgggaccgaacaacagacagaaggcacttctgtcaccttttcacccctgaagtccccgcctcagctcgagagagaaatggcttctccgccagagtgcagtgaaatgccactggacctgtcctcgaagtcaaaccgccagaagcttcctttacctaatcagcggaaaacacctccaatgccagtattaaccccagtgcacacgtctagcaaggcactgcttagtactgtacttagcaggagtcagcgtacgacgcaggcggcaggtggtaacgtcacatcatgcctgggatctacttcatcccccttcgtgatttttccggagattgtgcgcaacggggaccctagcacctgggtgaagaattccaccgctctgatctctacgatccctggcacttatgtgggcgtcgcgaaccctgtcccagcctcactgcttctgaataaggaccccaatctgggactgaacagggacccacgccacttacccaagcaggaaccaatttctatcatcgatcaaggagagccgaagggcaccggggctacctgtggaaagaaagggtcacaggccggtgccgaaggccagccctcgacagttaaacgatacactccggctcggatcgcccctggcctgcctggctgtcagacaaaagagctgtccctgtggaaaccaaccggccctgcgaatatttaccccaggtgctccgtgaatggaaaacccacatccacccaggtgctacccgtcggctggtccccatatcatcaggctagcttactatccatcggcatcagctcagctgggcagttaactccttctcagggcgctcccatcaggcccactagtgtggtgagcgagttttcaggagttcccagcctttcctcttctgaggctgtgcacgggctgccggaggggcagcctcgcccaggcggatcgttcgttccagaacaagacccggtcaccaagaacaaaacatgtcgcatcgctgccaagccttacgaggagcaagtgaatccagtgttgcttaccctcagcccccagactggaacactggctctgtccgtgcagccctctggtggggatatccggatgaaccagggaccagaggaaagtgagtcacacctgtgcagcgattctacccctaaaatggaaggccctcagggcgcttgtgggctgaaactcgcaggggacaccaagccaaaaaaccaggttctggcaacgtacatgtcacacgaactggtgctggcaacaccacagaacttgccgaaaatgcccgagctgcccttacttccccacgactcacaccctaaagaattgatcctggacgtcgtgccgtcatcgagaaggggttcctctaccgaacggccacagcttggatcacaggtcgaccttggcagggtcaaaatggaaaaagtcgatggagatgtcgttttcaacctagcaacgtgtttccgcgcagacggtctccctgtggcaccacagcgaggtcaggccgaggtgagggctaaggccggtcaggcacgtgttaagcaggagtccgtgggggtctttgcctgtaagaacaaatggcagcctgacgacgtgacagagagtctccctccaaaaaagatgaagtgcggcaaggaaaaggattccgaagagcagcagctccagccccaagccaaggctgttgtgcggtcaagtcaccgcccaaagtgcaggaaactgcccagtgacccacaggagagcaccaaaaagagcccacgaggagcatcggattcaggcaaggagcataacggcgtgagaggcaagcacaaacaccggaagccgaccaaaccagagtctcaatcccccggtaagagggcagatagccacgaggaggggagtctggagaagaaagctaagagctctttcagggactttattccagtggtgctgtccacacgaacccggtcacaaagtgggtccatctgttcctccttcgctgggatggctgattcagatatggggtctcaggaggtgttccccaccgaggaagaagaggaggtcactcctacccccgcaaagcggaggaaggtgcgaaagacccagcgagacactcagtatcgctcacaccatgctcaggataaaagcctgctcagccaggggagacgacacctgtggcgcgcacgtgagatgccatggcgtacggaagcggctcggcagatgtgggatacaaatgaggaggaagaggaggaggaggaggaaggcctgctcaaacgaaaaaagcgtcggaggcaaaagagtaggaaatatcagacaggtgaatatctcaccgagcaggaggacgaacagcgaagaaagggcagagccgacctgaaggctcgaaaacagaagacctcatcatcccagagtctggagcaccggctgcgcaacagaaacctcctgctgcctaataaggtgcaaggaatctcagattcaccgaatgggttcctccccaataacctggaggagcctgcgtgcttggaaaattctgagaaaccctccgggaaaagaaagtgtaaaaccaaacacatggcaactgttagtgaggaagccaaggatgttgttctgtactgtctccaaaaggacagtgaagatgtcaaccaccgagacaatgcaggctacacagctcttcatgaggcctgcagcagagggtggaccgatatcctgaacattctgcttgaacatggggctaacgtaaactgtagcgctcaggatggcacacgtccagtccatgatgcagtcgtgaatgataatcttgaaacaatctggcttctgttatcttatggggctgacccaactctggccacctacagcgggcagacggccatgaagctggcgagcagcgacactatgaagaggtttctctccgatcatctaagcgaccttcagggtcgtgctgagggggaccccggtgtgtcttgggatttttactcgagctcagtgttagaggaaaaagacggctttgcatgtgaccttctccataatccacctggctctagcgatcaggagggggacgatccgatggaggaggacgattttatgtttgaactttctgacaagcctttgctcccttgttataatttgcaggtgtctgtctcacgcggaccgtgtaattggttcttgttttcggacgtcctcaagcgcctgaaactcagcagtaggattttccaggctcgattcccacatttcgaaataactaccatgccgaaggccgaattttatcgccaggttgcgtcatctcagctcttgacccccgctgaacgtcccggtggtttggatgatcggagcccacctggatcgtcagagaccgtggaactggtgaggtacgaacccgatctcctccggctgctgggaagcgaggtggagttccagtcctgcaatagcta

SEQ ID NO: 210284 - DNA, 6860 bp, Artificial Sequence
  derived and/or modified sequence
acacacacacaccgctctccccctcactctttcgctcgccgcggctgctgccagtgtgtggctctgtctctcctccgctttgctgagccctcccttcttcctctcagttcctagagtccgaccgccgccgccgccgagagagaggagaaggagggggagtggccacagcaggtcctatctggtggtgagtggctgtcatgatctctacagcaccgctctacagcggcgtgcacaactggaccagttctgaccggattcgcatgtgtggcatcaacgaggagagaagagcacctctttctgatgaggagtcaacgacaggcgactgccagcactttggatctcaggagttttgtgtcagcagcagtttttccaaggtggagctcacggcagttggaagtggcagcaatgcccggggggcagacccagatggcagtgctacagaaaaacttgggcacaagtcagaagacaagcctgacgatccccagccaaaaatggactacgctgggaacgtggcagaggctgagggcttcttggtgcccctgagcagcccaggagacgggctcaagcttcccgcatctgacagcgccgaggccagcaacagcagggccgactgctcctggactccactcaacacccaaatgagcaaacaggttgactgctcacccgccggagtaaaggctttggactctcggcaaggtgttggagagaagaatactttcattttggcaactctgggaactggagtccctgtggaggggaccctgcccctggttaccactaacttcagtcctctgccagcccctatctgtccccctgctcccggttcggcctctgtgccccactctgttccagatgcattccaggttcccctctccgtccctgccccagtcccccattcagggcttgttccagtccaagttgccacttcggttccagctccttcccctcccttagcacctgtcccggctctggctccagcgccaccgtcagtgcccacgctcatctctgactcgaaccccctttctgtttcggcctcagtcttggtgcctgtgccagcttctgctcccccttcaggcccggttcccttgtcggctccagctcctgccccgctttcagtcccagtttcagctcctcccttggctctcatccaggctcctgtgcccccttcagctccgaccttggttctcgctcccgtccccactccggttctggctcccatgccagcatccacgcctccagcggcccctgcccctccgtctgtgcccatgcccactccaaccccatcttccggcccaccttctacccccaccctcatccccgcctttgctcctacaccggtgcctgcacccaccccagcccccatctttactccagcccctacacccatgcctgctgccacgccagctgccattcccacctctgcacccatcccggcctccttcagtttgagtagagtgtgctttcctgcagctcaggcaccagctatgcaaaaagtccccctgtcctttcagccagggacagtgctgaccccgagccagccgctggtatatatcccgcctccaagctgtgggcagccactcagtgtggccacactgccaaccactctaggggtttcctccactcttacgctccctgtcctgccgtcctacctgcaggacaggtgtctcccaggcgtgctagcctcccccgagctccgttcttacccgtatgcattttctgtggcccggcctctgacttcggattccaagctggtatctctggaggtgaacaggctcccctgcacttccccatccggtagcaccaccacccagcctgcacccgatggggtccctgggcctttggcagatacctcccttgttactgcttctgccaaggtgcttccaactccacagcctctgctgccagcccccagtgggagctcagccccaccgcaccccgccaagatgcccagtggcaccgagcagcaaacagaagggacttccgttaccttctctcctcttaagtcaccgccacagctggaacgagagatggcctctccacctgagtgcagcgagatgccccttgatctgtcctccaagtccaaccgccagaagcttccattgccgaaccagcgcaagacaccccccatgcctgtgttgacccccgtgcacaccagcagcaaggccctcctctccacagtcctgtctaggtctcagcgcacaacccaggctgccggtggcaatgtcacctcctgcctgggctccacttcctcgccctttgtcatctttcccgagatcgtgaggaatggggacccgagcacctgggtgaagaactcaactgcactgatcagcaccattcctggcacctacgtgggagtggccaacccagtgcctgcatccctgctgctgaacaaagaccccaacctgggcctcaaccgtgacccccgccatctccccaagcaggagcccatctccatcattgatcaaggagagcctaagggcactggtgccacgtgtggcaaaaagggcagccaggctggtgctgagggacagccaagcacagtgaaacgatatactccagcccgcattgcccctgggctgccagggtgccaaaccaaggaactctctttgtggaaacccacggggccggcaaatatttatccccggtgttcagtcaatgggaaacctaccagcacccaggtcctgcctgttggctggtccccgtaccaccaggcgtctctgctttccattggcatttccagtgccgggcagctgacccccagtcagggggcgcccatcaggcccaccagcgttgtttcggagttttctggtgtgccatctctcagctccagcgaagccgtgcacggacttcctgaggggcaaccacggcctgggggctccttcgttccagagcaggaccctgttacaaagaacaaaacttgccggattgctgccaagccttatgaagaacaagtcaatcctgtcctcttgaccctcagccctcagactgggaccctggcactgtctgttcagcctagcggtggggacattcgaatgaatcaggggcctgaggaatcagagagccacctctgctctgacagcactcctaagatggaaggcccccagggggcttgtggcctgaagctggcaggagacacgaagcctaagaaccaagtgctggccacctacatgtcccatgagctggtcctggccaccccccagaacctgcctaagatgcctgagctgcctttgctacctcacgacagccaccccaaggaacttatattggacgtggttccgagcagcaggaggggctccagcacagagcgcccacagcttggaagccaggtggatctggggcgagtgaaaatggagaaggtggatggtgatgtggtcttcaatttagccacctgcttccgggctgatggcctcccagtggctccccagaggggccaagctgaagttcgggctaaggccgggcaggctcgagtgaaacaggaaagcgtaggggtctttgcttgcaagaacaagtggcagccagatgatgtgacggaatctctgccgcccaagaagatgaagtgcggcaaagagaaggacagtgaagagcagcagctccagccacaagccaaggccgtggtccggagttcccacagacccaagtgccggaagctgcccagtgacccccaggaatccaccaagaaaagccccaggggggcttcagattcaggaaaagagcacaatggagtcaggggaaagcacaagcaccggaagccgacaaagccggagtcccagtctccaggaaaacgagccgacagccacgaggaaggttccttggaaaagaaagcaaagagcagtttccgtgactttattcctgtggttctgagcacccgcacgcgcagtcagtctggaagcatctgtagctcctttgctggcatggcagacagtgacatgggaagccaggaagtcttccccacagaagaagaagaggaggtaacccccaccccagctaagcgtcgaaaggtgagaaagacccaacgggacacccagtatcgcagccaccatgcccaggacaagtctctgctgagccagggccgaaggcacctgtggcgagcccgagaaatgccctggaggacagaggctgcccggcaaatgtgggacaccaatgaggaggaggaggaagaagaggaggagggcctgctgaagaggaagaaacgaagacggcagaagagccgaaaatatcagactggggagtacctgacagagcaagaagacgagcagcggcggaaagggagagcagatttaaaggcccgtaagcagaagacttcctcctcccaaagtttggagcaccgcctcaggaacaggaaccttctcttgcccaacaaagtccaggggatctcggattcaccaaacggtttcctcccaaataacctggaagagccagcctgccttgaaaattcagaaaagccatcaggaaaacgaaagtgcaagaccaagcacatggcaaccgtctcagaagaggcaaaggatgttgttctctactgcctccagaaagacagtgaagatgtgaatcaccgtgacaatgctggctacacagccctgcatgaggcttgttcccggggctggaccgacatcctgaacatcctgctggagcacggggccaacgtgaactgcagtgcgcaggacggcacgaggccagttcatgatgcggtggtcaatgacaacctggagaccatctggctcctgctgtcctatggggccgatcccacactggctacctactcgggtcagacagccatgaagctggccagcagcgacaccatgaagcgctttctcagtgatcacctctcggatcttcagggccgggcagagggtgatcccggtgtatcctgggatttttacagcagttctgtgttggaggaaaaagacgggtttgcctgtgacctcctacataatcctcctgggagctcagatcaagaaggagacgatccgatggaggaggatgatttcatgtttgaactctcagacaagcctcttctcccttgctacaacctccaagtgtcagtgtcccgcgggccctgcaactggttcctcttttccgatgtcttgaagaggctgaagctttcctcgaggatctttcaggcccggttcccgcactttgaaatcaccaccatgcccaaggccgagttctacaggcaggtggcctccagtcagctgctgacccctgccgagaggcctggaggcttggacgacagatcccccccaggctcctctgagactgtggagctggtgcggtacgagccagacctacttcggctcctagggtccgaggtggaattccagtcttgcaacagttgaccgggaaaacagcccctcctcttctttctccttccgagttcgcccttcccccacctccttgtctttccccgaccgagcaccagactgcagaatgaggcaataatacggaccaacaagaagccgccttatcaatgccagcattagcgactggactgtttttgtttttttggttacaattagttctcatctccctgtcgtcgtcattgttatcgtggttgctgatgggggtggaaagttgaactccatgtctgaggacaagaggtcccgggggtggtgggaggtggcgccggggtcccttggactggcctccttgttcatgaccaagaccaaacctgggccctggatggccttggcctgtcccgaggagaaatgagaaaatcccagatctctgagcgccccccaactccattcccctgtgttcttctgtcttctgtagtatttattttattagtatttaatttgtattgtttcattggtttctgataagtctgtatcactgtgacgatttgagacaacttgttgtattgagggactttctgtacctccttttctttttctttgttgatgagctctgacaaagctattccctggtgtttttttcccccactggggagggggtgaggtggaatggggtgggggaacatggacttgtgactaacgaagctggttgctgctggcccagggctgggggcttgggggtaaatcctgaggctttggtgctcccccacccacccattcccgccctttgcagcagccccgctatcttgagattagtgttgacagggaggggaggattgtgaggtgaggggttaataagttactctaataaaggagcgtggagaagggatctgaggggtgagggtggcccccctcctcacgccttcttcactgcccccctcagagtgcacaatacgagtttgttcctgcctccactctcccaccccgttctggcctccctgtctcaagatactgagcctctcacctcccagccctcagccacccccatccctgccccttctgagactcacagcacccctttccttcctctcctcccacctcctccctcagcccctcattctccttgggaatctgcagagggctctgggactcactgccggatgtgaaatccaggcgtcagctgtttcctaggcaagggcaggaaagtggtctccagcccttgctccactcatgcctgggggcctggggctgagtggtatccctacctggcctccccctggcctctgggcctccagcgctgggtttgtcgagtgagagagagagaggagcttgggttgcttccctgtccccgccccctctgtggcattgtccctcccactcttatttttctaccaattgctatttttccgaacaatccttgtagagtatgtaccatccaaaggcaggagggcctcgccgtggccggctctggttggagatggtacagttttattgtacaggtgctaaaacaacaacaacaaaaaagaaaatggaaaaaaaaaagattaaaaaaaaaaggaaaaaaaaaaa

SEQ ID NO: 210285 - DNA, 7127 bp, Artificial Sequence
  derived and/or modified sequence
ggggagtggccacagcaggtcctatctggtggtgagtggctgtcatgatctctacagcaccgctctacagcggcgtgcacaactggaccagttctgaccggattcgcatgtgtggcatcaacgaggagagaagagcacctctttctgatgaggagtcaacgacaggcgactgccagcactttggatctcaggagttttgtgtcagcagcagtttttccaaggtggagctcacggcagttggaagtggcagcaatgcccggggggcagacccagatggcagtgctacagaaaaacttgggcacaagtcagaagacaagcctgacgatccccagccaaaaatggactacgctgggaacgtggcagaggctgagggcttcttggtgcccctgagcagcccaggagacgggctcaagcttcccgcatctgacagcgccgaggccagcaacagcagggccgactgctcctggactccactcaacacccaaatgagcaaacaggttgactgctcacccgccggagtaaaggctttggactctcggcaaggtgttggagagaagaatactttcattttggcaactctgggaactggagtccctgtggaggggaccctgcccctggttaccactaacttcagtcctctgccagcccctatctgtccccctgctcccggttcggcctctgtgccccactctgttccagatgcattccaggttcccctctccgtccctgccccagtcccccattcagggcttgttccagtccaagttgccacttcggttccagctccttcccctcccttagcacctgtcccggctctggctccagcgccaccgtcagtgcccacgctcatctctgactcgaaccccctttctgtttcggcctcagtcttggtgcctgtgccagcttctgctcccccttcaggcccggttcccttgtcggctccagctcctgccccgctttcagtcccagtttcagctcctcccttggctctcatccaggctcctgtgcccccttcagctccgaccttggttctcgctcccgtccccactccggttctggctcccatgccagcatccacgcctccagcggcccctgcccctccgtctgtgcccatgcccactccaaccccatcttccggcccaccttctacccccaccctcatccccgcctttgctcctacaccggtgcctgcacccaccccagcccccatctttactccagcccctacacccatgcctgctgccacgccagctgccattcccacctctgcacccatcccggcctccttcagtttgagtagagtgtgctttcctgcagctcaggcaccagctatgcaaaaagtccccctgtcctttcagccagggacagtgctgaccccgagccagccgctggtatatatcccgcctccaagctgtgggcagccactcagtgtggccacactgccaaccactctaggggtttcctccactcttacgctccctgtcctgccgtcctacctgcaggacaggtgtctcccaggcgtgctagcctcccccgagctccgttcttacccgtatgcattttctgtggcccggcctctgacttcggattccaagctggtatctctggaggtgaacaggctcccctgcacttccccatccggtagcaccaccacccagcctgcacccgatggggtccctgggcctttggcagatacctcccttgttactgcttctgccaaggtgcttccaactccacagcctctgctgccagcccccagtgggagctcagccccaccgcaccccgccaagatgcccagtggcaccgagcagcaaacagaagggacttccgttaccttctctcctcttaagtcaccgccacagctggaacgagagatggcctctccacctgagtgcagcgagatgccccttgatctgtcctccaagtccaaccgccagaagcttccattgccgaaccagcgcaagacaccccccatgcctgtgttgacccccgtgcacaccagcagcaaggccctcctctccacagtcctgtctaggtctcagcgcacaacccaggctgccggtggcaatgtcacctcctgcctgggctccacttcctcgccctttgtcatctttcccgagatcgtgaggaatggggacccgagcacctgggtgaagaactcaactgcactgatcagcaccattcctggcacctacgtgggagtggccaacccagtgcctgcatccctgctgctgaacaaagaccccaacctgggcctcaaccgtgacccccgccatctccccaagcaggagcccatctccatcattgatcaaggagagcctaagggcactggtgccacgtgtggcaaaaagggcagccaggctggtgctgagggacagccaagcacagtgaaacgatatactccagcccgcattgcccctgggctgccagggtgccaaaccaaggaactctctttgtggaaacccacggggccggcaaatatttatccccggtgttcagtcaatgggaaacctaccagcacccaggtcctgcctgttggctggtccccgtaccaccaggcgtctctgctttccattggcatttccagtgccgggcagctgacccccagtcagggggcgcccatcaggcccaccagcgttgtttcggagttttctggtgtgccatctctcagctccagcgaagccgtgcacggacttcctgaggggcaaccacggcctgggggctccttcgttccagagcaggaccctgttacaaagaacaaaacttgccggattgctgccaagccttatgaagaacaagtcaatcctgtcctcttgaccctcagccctcagactgggaccctggcactgtctgttcagcctagcggtggggacattcgaatgaatcaggggcctgaggaatcagagagccacctctgctctgacagcactcctaagatggaaggcccccagggggcttgtggcctgaagctggcaggagacacgaagcctaagaaccaagtgctggccacctacatgtcccatgagctggtcctggccaccccccagaacctgcctaagatgcctgagctgcctttgctacctcacgacagccaccccaaggaacttatattggacgtggttccgagcagcaggaggggctccagcacagagcgcccacagcttggaagccaggtggatctggggcgagtgaaaatggagaaggtggatggtgatgtggtcttcaatttagccacctgcttccgggctgatggcctcccagtggctccccagaggggccaagctgaagttcgggctaaggccgggcaggctcgagtgaaacaggaaagcgtaggggtctttgcttgcaagaacaagtggcagccagatgatgtgacggaatctctgccgcccaagaagatgaagtgcggcaaagagaaggacagtgaagagcagcagctccagccacaagccaaggccgtggtccggagttcccacagacccaagtgccggaagctgcccagtgacccccaggaatccaccaagaaaagccccaggggggcttcagattcaggaaaagagcacaatggagtcaggggaaagcacaagcaccggaagccgacaaagccggagtcccagtctccaggaaaacgagccgacagccacgaggaaggttccttggaaaagaaagcaaagagcagtttccgtgactttattcctgtggttctgagcacccgcacgcgcagtcagtctggaagcatctgtagctcctttgctggcatggcagacagtgacatgggaagccaggaagtcttccccacagaagaagaagaggaggtaacccccaccccagctaagcgtcgaaaggtgagaaagacccaacgggacacccagtatcgcagccaccatgcccaggacaagtctctgctgagccagggccgaaggcacctgtggcgagcccgagaaatgccctggaggacagaggctgcccggcaaatgtgggacaccaatgaggaggaggaggaagaagaggaggagggcctgctgaagaggaagaaacgaagacggcagaagagccgaaaatatcagactggggagtacctgacagagcaagaagacgagcagcggcggaaagggagagcagatttaaaggcccgtaagcagaagacttcctcctcccaaagtttggagcaccgcctcaggaacaggaaccttctcttgcccaacaaagtccaggggatctcggattcaccaaacggtttcctcccaaataacctggaagagccagcctgccttgaaaattcagaaaagccatcaggaaaacgaaagtgcaagaccaagcacatggcaaccgtctcagaagaggcaaaggatgttgttctctactgcctccagaaagacagtgaagatgtgaatcaccgtgacaatgctggctacacagccctgcatgaggcttgttcccggggctggaccgacatcctgaacatcctgctggagcacggggccaacgtgaactgcagtgcgcaggacggcacgaggccagttcatgatgcggtggtcaatgacaacctggagaccatctggctcctgctgtcctatggggccgatcccacactggctacctactcgggtcagacagccatgaagctggccagcagcgacaccatgaagcgctttctcagtgatcacctctcggatcttcagggccgggcagagggtgatcccggtgtatcctgggatttttacagcagttctgtgttggaggaaaaagacgggtttgcctgtgacctcctacataatcctcctgggagctcagatcaagaaggagacgatccgatggaggaggatgatttcatgtttgaactctcagacaagcctcttctcccttgctacaacctccaagtgtcagtgtcccgcgggccctgcaactggttcctcttttccgatgtcttgaagaggctgaagctttcctcgaggatctttcaggcccggttcccgcactttgaaatcaccaccatgcccaaggccgagttctacaggcaggtggcctccagtcagctgctgacccctgccgagaggcctggaggcttggacgacagatcccccccaggctcctctgagactgtggagctggtgcggtacgagccagacctacttcggctcctagggtccgaggtggaattccagtcttgcaacagttgaccgggaaaacagcccctcctcttctttctccttccgagttcgcccttcccccacctccttgtctttccccgaccgagcaccagactgcagaatgaggcaataatacggaccaacaagaagccgccttatcaatgccagcattagcgactggactgtttttgtttttttggttacaattagttctcatctccctgtcgtcgtcattgttatcgtggttgctgatgggggtggaaagttgaactccatgtctgaggacaagaggtcccgggggtggtgggaggtggcgccggggtcccttggactggcctccttgttcatgaccaagaccaaacctgggccctggatggccttggcctgtcccgaggagaaatgagaaaatcccagatctctgagcgccccccaactccattcccctgtgttcttctgtcttctgtagtatttattttattagtatttaatttgtattgtttcattggtttctgataagtctgtatcactgtgacgatttgagacaacttgttgtattgagggactttctgtacctccttttctttttctttgttgatgagctctgacaaagctattccctggtgtttttttcccccactggggagggggtgaggtggaatggggtgggggaacatggacttgtgactaacgaagctggttgctgctggcccagggctgggggcttgggggtaaatcctgaggctttggtgctcccccacccacccattcccgccctttgcagcagccccgctatcttgagattagtgttgacagggaggggaggattgtgaggtgaggggttaataagttactctaataaaggagcgtggagaagggatctgaggggtgagggtggcccccctcctcacgccttcttcactgcccccctcagagtgcacaatacgagtttgttcctgcctccactctcccaccccgttctggcctccctgtctcaagatactgagcctctcacctcccagccctcagccacccccatccctgccccttctgagactcacagcacccctttccttcctctcctcccacctcctccctcagcccctcattctccttgggaatctgcagagggctctgggactcactgccggatgtgaaatccaggcgtcagctgtttcctaggcaagggcaggaaagtggtctccagcccttgctccactcatgcctgggggcctggggctgagtggtatccctacctggcctccccctggcctctgggcctccagcgctgggtttgtcgagtgagagagagagaggagcttgggttgcttccctgtccccgccccctctgtggcattgtccctcccactcttatttttctaccaattgctatttttccgaacaatccttgtagagtatgtaccatccaaaggcaggagggcctcgccgtggccggctctggttggagatggtacagttttattgtacaggtgctaaaacaacaacaacaaaaaagaaaatggaaaaaaaaaagattaaaaaaaaaaggaaaaaaaaaaagccagtttgaggatgggacaatctgttctctagaggctcctgagccatgcgggagcattggtggttattttctttgtattgtgtttgttctttgttcctgggggggaagttctcggcccccttctgtaggactgctccccacccccaccatactgcccagttggttttgaacagttgttttccctttttaagaaaaaaaaatacatatatatatacatatatatatataaagttgaggggttttggactttaatttgttggttttgttggggttcctggtattgtgtagtttatttcatgttctgtttgcctttccttttttcgcatttgggtgtatattctggctgccctttatgtttcattttaagcaactggctgtggagtcaaaaacacttgcatactgaaaaacctgtgtcaggg

SEQ ID NO: 210286 - protein, 297 aa, Artificial Sequence
  derived and/or modified sequence
MTTPRNSVNGTFPAEPMKGPIAMQSGPKPLFRRMSSLVGPTQSFFMRESKTLGAVQIMNGLFHIALGGLLMIPAGIYAPICVTVWYPLWGGIMYIISGSLLAATEKNSRKCLVKGKMIMNSLSLFAAISGMILSIMDILNIKISHFLKMESLNFIRAHTPYINIYNCEPANPSEKNSPSTQYCYSIQSLFLGILSVMLIFAFFQELVIAGIVENEWKRTCSRPKSNIVLLSAEEKKEQTIEIKEEVVGLTETSSQPKNEEDIEIIPIQEEEEEETETNFPEPPQDQESSPIENDSSP

SEQ ID NO: 210287 - protein, 284 aa, Artificial Sequence
  derived and/or modified sequence
MTTPRNSVNGTFPAEPMKGPIAMQSGPKPLFRRMSSLVGPTQSFFMRESKTLGAVQIMNGLFHIALGGLLMIPAGIYAPICVTVWYPLWGGIMYIISGSLLAATEKNSRKCLVKGKMIMNSLSLFAAISGMILSIMDILNIKISHFLKMESLNFIRAHTPYINIYNCEPANPSEKNSPSTQYCYSIQSLFLELVIAGIVENEWKRTCSRPKSNIVLLSAEEKKEQTIEIKEEVVGLTETSSQPKNEEDIEIIPIQEEEEEETETNFPEPPQDQESSPIENDSSP

SEQ ID NO: 210288 - DNA, 894 bp, Artificial Sequence
  derived and/or modified sequence
atgaccacccccagaaacagcgtgaacggcaccttccccgccgagcccatgaagggccccatcgccatgcagagcggccccaagcccctgttcagaagaatgagcagcctggtgggccccacccagagcttcttcatgagagagagcaagaccctgggcgccgtgcagatcatgaacggcctgttccacatcgccctgggcggcctgctgatgatccccgccggcatctacgcccccatctgcgtgaccgtgtggtaccccctgtggggcggcatcatgtacatcatcagcggcagcctgctggccgccaccgagaagaacagcagaaagtgcctggtgaagggcaagatgatcatgaacagcctgagcctgttcgccgccatcagcggcatgatcctgagcatcatggacatcctgaacatcaagatcagccacttcctgaagatggagagcctgaacttcatcagagcccacaccccctacatcaacatctacaactgcgagcccgccaaccccagcgagaagaacagccccagcacccagtactgctacagcatccagagcctgttcctgggcatcctgagcgtgatgctgatcttcgccttcttccaggagctggtgatcgccggcatcgtggagaacgagtggaagagaacctgcagcagacccaagagcaacatcgtgctgctgagcgccgaggagaagaaggagcagaccatcgagatcaaggaggaggtggtgggcctgaccgagaccagcagccagcccaagaacgaggaggacatcgagatcatccccatccaggaggaggaggaggaggagaccgagaccaacttccccgagcccccccaggaccaggagagcagccccatcgagaacgacagcagcccctag

SEQ ID NO: 210289 - DNA, 855 bp, Artificial Sequence
  derived and/or modified sequence
atgaccacccccagaaacagcgtgaacggcaccttccccgccgagcccatgaagggccccatcgccatgcagagcggccccaagcccctgttcagaagaatgagcagcctggtgggccccacccagagcttcttcatgagagagagcaagaccctgggcgccgtgcagatcatgaacggcctgttccacatcgccctgggcggcctgctgatgatccccgccggcatctacgcccccatctgcgtgaccgtgtggtaccccctgtggggcggcatcatgtacatcatcagcggcagcctgctggccgccaccgagaagaacagcagaaagtgcctggtgaagggcaagatgatcatgaacagcctgagcctgttcgccgccatcagcggcatgatcctgagcatcatggacatcctgaacatcaagatcagccacttcctgaagatggagagcctgaacttcatcagagcccacaccccctacatcaacatctacaactgcgagcccgccaaccccagcgagaagaacagccccagcacccagtactgctacagcatccagagcctgttcctggagctggtgatcgccggcatcgtggagaacgagtggaagagaacctgcagcagacccaagagcaacatcgtgctgctgagcgccgaggagaagaaggagcagaccatcgagatcaaggaggaggtggtgggcctgaccgagaccagcagccagcccaagaacgaggaggacatcgagatcatccccatccaggaggaggaggaggaggagaccgagaccaacttccccgagcccccccaggaccaggagagcagccccatcgagaacgacagcagcccctag

SEQ ID NO: 210290 - DNA, 894 bp, Artificial Sequence
  derived and/or modified sequence
atgactacgccgaggaattcagtcaatggcactttccccgcggaacccatgaaagggcctattgcgatgcagagcggtcccaaaccattgttccgccggatgtcgagcctagtcggcccaacacagagctttttcatgcgcgagagcaaaactctcggcgcagtgcagatcatgaacggactgttccatatagctctggggggcctgttgatgatccccgcggggatttacgcccctatctgtgtgacggtctggtaccctctatggggtggcataatgtacatcatatcaggcagcctcctggccgcaactgaaaaaaattcccgcaagtgtttggtcaagggcaagatgatcatgaattccctgtctctgtttgccgcaatatctggaatgatcctgtccatcatggacattctcaacattaagatttcccatttcttgaagatggagtcccttaacttcattcgcgctcatactccctacatcaatatctacaactgcgagccggcaaatccttccgaaaagaattcacccagcacccagtactgctattctatacagtctttgtttctcggaattctgtctgtgatgttaatctttgcctttttccaagaactggtgatcgccggtatagttgagaacgagtggaagagaacatgctcacgaccgaagtcgaacatcgtgcttctatcggcagaggagaagaaagagcaaacaattgagatcaaagaggaagtggtcggactcaccgaaaccagttctcagcccaagaatgaggaggatattgagataatcccaatacaagaggaagaggaagaagaaactgaaacaaattttccggaacctcctcaggaccaagaatcaagcccaatcgaaaatgatagtagtccttag

SEQ ID NO: 210291 - DNA, 894 bp, Artificial Sequence
  derived and/or modified sequence
atgacaactccacgcaactcggttaatggaacttttcccgccgaacccatgaaaggccccatcgccatgcagtcagggcctaagcccctgtttcgccgtatgtcatctctggtgggtccaactcaatctttcttcatgagggaatcaaaaacgctgggcgccgttcagatcatgaacggcctgttccacattgctctgggtggactccttatgattccggctggcatctatgccccaatatgcgttaccgtttggtatcctctgtggggtggcatcatgtacatcatctcaggaagcctgctggccgccaccgaaaaaaactccaggaagtgtctggtcaagggtaagatgatcatgaattcgctgtctctgttcgccgctatttctgggatgatcttatctatcatggatattctgaatatcaaaataagccacttcctgaagatggagtcccttaacttcattcgtgcacatacaccgtatatcaatatctataattgcgagccagctaacccaagcgagaagaattccccttcgacacaatattgttatagcattcagtcattgtttctgggaatcctttctgttatgctcattttcgccttcttccaagagctggtgattgccggcatcgttgagaacgagtggaagaggacatgtagccggcctaagtctaacatcgtgctcctgtccgctgaagaaaaaaaagagcagaccatagagatcaaggaggaagtggtggggttaacagaaaccagctctcagcccaagaacgaagaggacatcgaaattattccaattcaggaagaagaggaggaagagactgaaacaaacttcccggagccacctcaggatcaggagtcttccccgattgagaatgattcttccccatag

SEQ ID NO: 210292 - DNA, 855 bp, Artificial Sequence
  derived and/or modified sequence
atgacaacacccagaaactccgttaatgggacattcccagcagagcctatgaaggggcccattgccatgcagagcgggcccaaaccattgtttcggagaatgtccagcctcgtgggcccaacacagagttttttcatgcgtgagtctaagacactcggagccgttcagattatgaacggacttttccatattgccctaggaggtctcctgatgattcccgcgggcatctatgcccctatatgcgtcaccgtatggtaccctctatggggaggcatcatgtatataatctccggtagcctgttagctgcgaccgaaaagaatagcagaaagtgcctggtgaaggggaaaatgatcatgaattctctgtccctgttcgcggctataagtggaatgatcttaagtataatggacatcctgaatataaaaattagccatttcctgaagatggagagtctgaactttattagagcccacacaccctacattaacatctacaactgtgaaccggccaatccatctgagaaaaactcccctagtacgcaatattgttactccatacagtccctgttcctcgagctggtgatcgccggcatagtggagaatgagtggaaaaggacctgctcgcgccccaagtccaacatcgtgttactatccgctgaggaaaagaaagagcaaacaatcgagattaaagaggaagtggtgggcttgacagagactagctcacaacctaaaaatgaagaggacatagagataataccaattcaagaagaggaggaggaagaaaccgagacaaactttcccgagccgccacaggatcaagagagttctcccatcgagaatgacagctccccatag

SEQ ID NO: 210293 - DNA, 894 bp, Artificial Sequence
  derived and/or modified sequence
atgaccactccccggaactccgtcaacgggacttttcccgccgaaccaatgaaaggacccatcgcaatgcagtctgggcccaaacctctgtttagacgaatgagctccctcgtggggccaacccagagcttctttatgagagaatccaagactttgggggccgtgcaaattatgaacggactttttcatatcgcacttggaggtctccttatgattcccgccggtatctacgctcccatttgtgttacggtttggtacccactttggggcgggatcatgtatatcatcagcgggtccttattagccgcgactgagaaaaactcccgcaagtgcttggtgaagggcaaaatgattatgaattctctctccctcttcgcggctatctcaggcatgattctgagcatcatggacatcctcaatattaagatctcccattttctcaaaatggagtcactaaacttcattcgagctcataccccttatattaacatctacaattgtgaacccgccaacccctccgagaagaactctcctagtacgcagtactgctactctatccagagcttattccttggaattctcagtgtaatgcttatcttcgcctttttccaagagctggtaatcgccggtattgtggagaatgagtggaagcgtacttgctcccggccaaaatctaatatcgtcttactctcagccgaggagaaaaaggagcagacgatcgaaattaaggaggaagtggttgggttaactgagacctctagccaaccaaaaaacgaggaagatatcgaaattatcccaatacaggaagaggaggaggaggaaactgagacaaattttccagaacctcctcaggatcaggaatcttccccaattgagaacgattcttccccttag

SEQ ID NO: 210294 - DNA, 894 bp, Artificial Sequence
  derived and/or modified sequence
atgaccaccccaagaaattctgtgaatggcaccttccctgctgagcccatgaagggccccatcgccatgcagagcggccccaagcccctcttccggaggatgagcagcctggtgggccccacccagagcttcttcatgagggagagcaagaccctgggcgctgtgcagatcatgaatggcctcttccacatcgccctgggcggcctgctgatgatcccagctggcatctatgcccccatctgtgtgacagtgtggtaccccctgtggggcggcatcatgtacatcatcagcggcagcctgctggccgccacagagaagaacagcaggaagtgcctggtgaagggcaagatgatcatgaacagcctgagcctgtttgctgccatcagcggcatgatcctgagcatcatggacatcctgaacatcaagatcagccacttcctgaagatggagagcctgaacttcatccgggcccacaccccctacatcaacatctacaactgtgagcccgccaaccccagcgagaagaacagccccagcacccagtactgctacagcatccagagcctcttcctgggcatcctgtctgtgatgctgatctttgccttcttccaggagctggtgattgctggcatcgtggagaatgagtggaagaggacctgcagccggcccaagagcaacatcgtgctgctgtctgctgaggagaagaaggagcagaccatcgagatcaaggaggaggtggtgggcctgacagagaccagcagccagcccaagaatgaggaggacatcgagatcatccccatccaggaggaggaggaggaggagacagagaccaacttccctgagcccccccaggaccaggagagcagccccattgaaaatgacagcagcccctag

SEQ ID NO: 210295 - DNA, 855 bp, Artificial Sequence
  derived and/or modified sequence
atgaccaccccaagaaattctgtgaatggcaccttccctgctgagcccatgaagggccccatcgccatgcagagcggccccaagcccctcttccggaggatgagcagcctggtgggccccacccagagcttcttcatgagggagagcaagaccctgggcgctgtgcagatcatgaatggcctcttccacatcgccctgggcggcctgctgatgatcccagctggcatctatgcccccatctgtgtgacagtgtggtaccccctgtggggcggcatcatgtacatcatcagcggcagcctgctggccgccacagagaagaacagcaggaagtgcctggtgaagggcaagatgatcatgaacagcctgagcctgtttgctgccatcagcggcatgatcctgagcatcatggacatcctgaacatcaagatcagccacttcctgaagatggagagcctgaacttcatccgggcccacaccccctacatcaacatctacaactgtgagcccgccaaccccagcgagaagaacagccccagcacccagtactgctacagcatccagagcctcttcctggagctggtgattgctggcatcgtggagaatgagtggaagaggacctgcagccggcccaagagcaacatcgtgctgctgtctgctgaggagaagaaggagcagaccatcgagatcaaggaggaggtggtgggcctgacagagaccagcagccagcccaagaatgaagaagatattgagatcatccccatccaggaggaggaggaggaggagacagagaccaacttccctgagcccccccaggaccaggagagcagccccattgaaaatgacagcagcccctag

SEQ ID NO: 210296 - DNA, 3331 bp, Artificial Sequence
  derived and/or modified sequence
gtctatcagcgatttcatcttcaggcctggactacaccactcaccctcccagtgtgcttgagaaacaaactgcacccactgaactccgcagctagcatccaaatcagcccttgagatttgaggccttggagactcaggagttttgagagcaaaatgacaacacccagaaattcagtaaatgggactttcccggcagagccaatgaaaggccctattgctatgcaatctggtccaaaaccactcttcaggaggatgtcttcactggtgggccccacgcaaagcttcttcatgagggaatctaagactttgggggctgtccagattatgaatgggctcttccacattgccctggggggtcttctgatgatcccagcagggatctatgcacccatctgtgtgactgtgtggtaccctctctggggaggcattatgtatattatttccggatcactcctggcagcaacggagaaaaactccaggaagtgtttggtcaaaggaaaaatgataatgaattcattgagcctctttgctgccatttctggaatgattctttcaatcatggacatacttaatattaaaatttcccattttttaaaaatggagagtctgaattttattagagctcacacaccatatattaacatatacaactgtgaaccagctaatccctctgagaaaaactccccatctacccaatactgttacagcatacaatctctgttcttgggcattttgtcagtgatgctgatctttgccttcttccaggaacttgtaatagctggcatcgttgagaatgaatggaaaagaacgtgctccagacccaaatctaacatagttctcctgtcagcagaagaaaaaaaagaacagactattgaaataaaagaagaagtggttgggctaactgaaacatcttcccaaccaaagaatgaagaagacattgaaattattccaatccaagaagaggaagaagaagaaacagagacgaactttccagaacctccccaagatcaggaatcctcaccaatagaaaatgacagctctccttaagtgatttcttctgttttctgtttccttttttaaacattagtgttcatagcttccaagagacatgctgactttcatttcttgaggtactctgcacatacgcaccacatctctatctggcctttgcatggagtgaccatagctccttctctcttacattgaatgtagagaatgtagccattgtagcagcttgtgttgtcacgcttcttcttttgagcaactttcttacactgaagaaaggcagaatgagtgcttcagaatgtgatttcctactaacctgttccttggataggctttttagtatagtatttttttttgtcattttctccatcaacaaccagggagactgcacctgatggaaaagatatatgactgcttcatgacattcctaaactatcttttttttattccacatctacgtttttggtggagtcccttttgcatcattgttttaaggatgataaaaaaaaataacaactagggacaatacagaacccattccatttatctttctacagggctgacattgtggcacattcttagagttaccacaccccatgagggaagctctaaatagccaacacccatctgttttttgtaaaaacagcatagcttatacatggacatgtctctgccttaacttttcctaactcccactctaggctattgtttgcatgtctacctacttttagccattatgcgagaaaagaaaaaaatgaccatagaaaatgccaccatgaggtgcccaaatttcaaataataattaacatttagttatatttataatttccagatgacaaagtatttcatcaaataacttcatttgatgttccatgatcaagaaagaatccctatctctattttacaagtaattcaaagaggccaaataacttgtaaacaagaaaaggtaacttgtcaacagtcataactagtaattatgagagccttgtttcataaccaggtcttcttactcaaatcctgtgatgtttgaaataaccaaattgtctctccaatgtctgcataaactgtgagagccaagtcaacagcttttatcaagaatttactctctgaccagcaataaacaagcactgagagacacagagagccagattcagattttacccatggggataaaaagactcagactttcaccacatttggaaaactacttgcatcataaatatataataactggtagtttatatgaagcagacactaagtgctatagacactctcagaatatcatacttggaaacaatgtaattaaaatgccgaatctgagtcaacagctgccctacttttcaattcagatatactagtaccttacctagaaataatgttaacctagggtgaagtcactataatctgtagtctattatttgggcatttgctacatgatgagtgctgccagattgtggcaggtaaagagacaatgtaatttgcactccctatgatatttctacatttttagcgaccactagtggaagacattccccaaaattagaaaaaaaggagatagaagatttctgtctatgtaaagttctcaaaatttgttctaaattaataaaactatctttgtgttcttttctgcaacagatgattccaacatgggtgtttgtctattcttctttactcttgaaacattagaccatgggaggctcttacagccttgagttgatatttatacaacccaaatctaggtttgaacggtgaggtgtcaggtcatcaaatattcatgtctatatagtcttacacaggttctcaaaaaaaatgttcatgggataggtcattgataatggattccttattctgagaactccagacgactgaaatatatgagagaaggaaaaggacatagtaggagcaggcctgagaaaaaaatgaaagtcagaaatctttaaaaaaatacaagatcttatttctatcttattttttctcctcttctgaaatatatatgaggattcctctccaaacccatggtttctctaagaattttgagtcatttgtatgacctcaaataattagttttagctgacctcacataactccttataataggagacatctttaatgtctgctattaaagaaggatgaaaattcctatgaccttctccccgattatccctttggcaatatagagtcaaataataacattgaccaatagtaaacatgctttgccaagaagtagaagatatattctctagccttagtttttcctcccaatttgcatttttgtaaaaataatgttgtatccacaaaggaaataaactttaaaaacccaagtgca

SEQ ID NO: 210297 - DNA, 3372 bp, Artificial Sequence
  derived and/or modified sequence
tcagaactcagcagtaggccttgcctcagatccaaggtcactcggaagaggccatgtctaccctcaatgacactcatggaggaaatgctgagagaagcattcagatgcatgacacaaggtaagactgccaaaaatcttgttcttgctctcctcattttgttatttgttttatttttaggagttttgagagcaaaatgacaacacccagaaattcagtaaatgggactttcccggcagagccaatgaaaggccctattgctatgcaatctggtccaaaaccactcttcaggaggatgtcttcactggtgggccccacgcaaagcttcttcatgagggaatctaagactttgggggctgtccagattatgaatgggctcttccacattgccctggggggtcttctgatgatcccagcagggatctatgcacccatctgtgtgactgtgtggtaccctctctggggaggcattatgtatattatttccggatcactcctggcagcaacggagaaaaactccaggaagtgtttggtcaaaggaaaaatgataatgaattcattgagcctctttgctgccatttctggaatgattctttcaatcatggacatacttaatattaaaatttcccattttttaaaaatggagagtctgaattttattagagctcacacaccatatattaacatatacaactgtgaaccagctaatccctctgagaaaaactccccatctacccaatactgttacagcatacaatctctgttcttgggcattttgtcagtgatgctgatctttgccttcttccaggaacttgtaatagctggcatcgttgagaatgaatggaaaagaacgtgctccagacccaaatctaacatagttctcctgtcagcagaagaaaaaaaagaacagactattgaaataaaagaagaagtggttgggctaactgaaacatcttcccaaccaaagaatgaagaagacattgaaattattccaatccaagaagaggaagaagaagaaacagagacgaactttccagaacctccccaagatcaggaatcctcaccaatagaaaatgacagctctccttaagtgatttcttctgttttctgtttccttttttaaacattagtgttcatagcttccaagagacatgctgactttcatttcttgaggtactctgcacatacgcaccacatctctatctggcctttgcatggagtgaccatagctccttctctcttacattgaatgtagagaatgtagccattgtagcagcttgtgttgtcacgcttcttcttttgagcaactttcttacactgaagaaaggcagaatgagtgcttcagaatgtgatttcctactaacctgttccttggataggctttttagtatagtatttttttttgtcattttctccatcaacaaccagggagactgcacctgatggaaaagatatatgactgcttcatgacattcctaaactatcttttttttattccacatctacgtttttggtggagtcccttttgcatcattgttttaaggatgataaaaaaaaataacaactagggacaatacagaacccattccatttatctttctacagggctgacattgtggcacattcttagagttaccacaccccatgagggaagctctaaatagccaacacccatctgttttttgtaaaaacagcatagcttatacatggacatgtctctgccttaacttttcctaactcccactctaggctattgtttgcatgtctacctacttttagccattatgcgagaaaagaaaaaaatgaccatagaaaatgccaccatgaggtgcccaaatttcaaataataattaacatttagttatatttataatttccagatgacaaagtatttcatcaaataacttcatttgatgttccatgatcaagaaagaatccctatctctattttacaagtaattcaaagaggccaaataacttgtaaacaagaaaaggtaacttgtcaacagtcataactagtaattatgagagccttgtttcataaccaggtcttcttactcaaatcctgtgatgtttgaaataaccaaattgtctctccaatgtctgcataaactgtgagagccaagtcaacagcttttatcaagaatttactctctgaccagcaataaacaagcactgagagacacagagagccagattcagattttacccatggggataaaaagactcagactttcaccacatttggaaaactacttgcatcataaatatataataactggtagtttatatgaagcagacactaagtgctatagacactctcagaatatcatacttggaaacaatgtaattaaaatgccgaatctgagtcaacagctgccctacttttcaattcagatatactagtaccttacctagaaataatgttaacctagggtgaagtcactataatctgtagtctattatttgggcatttgctacatgatgagtgctgccagattgtggcaggtaaagagacaatgtaatttgcactccctatgatatttctacatttttagcgaccactagtggaagacattccccaaaattagaaaaaaaggagatagaagatttctgtctatgtaaagttctcaaaatttgttctaaattaataaaactatctttgtgttcttttctgcaacagatgattccaacatgggtgtttgtctattcttctttactcttgaaacattagaccatgggaggctcttacagccttgagttgatatttatacaacccaaatctaggtttgaacggtgaggtgtcaggtcatcaaatattcatgtctatatagtcttacacaggttctcaaaaaaaatgttcatgggataggtcattgataatggattccttattctgagaactccagacgactgaaatatatgagagaaggaaaaggacatagtaggagcaggcctgagaaaaaaatgaaagtcagaaatctttaaaaaaatacaagatcttatttctatcttattttttctcctcttctgaaatatatatgaggattcctctccaaacccatggtttctctaagaattttgagtcatttgtatgacctcaaataattagttttagctgacctcacataactccttataataggagacatctttaatgtctgctattaaagaaggatgaaaattcctatgaccttctccccgattatccctttggcaatatagagtcaaataataacattgaccaatagtaaacatgctttgccaagaagtagaagatatattctctagccttagtttttcctcccaatttgcatttttgtaaaaataatgttgtatccacaaaggaaataaactttaaaaacccaagtgca

SEQ ID NO: 210298 - DNA, 2560 bp, Artificial Sequence
  derived and/or modified sequence
actcaccctcccagtgtgcttgagaaacaaactgcacccactgaactccgcagctagcatccaaatcagcccttgagatttgaggccttggagactcaggagttttgagagcaaaatgacaacacccagaaattcagtaaatgggactttcccggcagagccaatgaaaggccctattgctatgcaatctggtccaaaaccactcttcaggaggatgtcttcactggtgggccccacgcaaagcttcttcatgagggaatctaagactttgggggctgtccagattatgaatgggctcttccacattgccctggggggtcttctgatgatcccagcagggatctatgcacccatctgtgtgactgtgtggtaccctctctggggaggcattatgtatattatttccggatcactcctggcagcaacggagaaaaactccaggaagtgtttggtcaaaggaaaaatgataatgaattcattgagcctctttgctgccatttctggaatgattctttcaatcatggacatacttaatattaaaatttcccattttttaaaaatggagagtctgaattttattagagctcacacaccatatattaacatatacaactgtgaaccagctaatccctctgagaaaaactccccatctacccaatactgttacagcatacaatctctgttcttggaacttgtaatagctggcatcgttgagaatgaatggaaaagaacgtgctccagacccaaatctaacatagttctcctgtcagcagaagaaaaaaaagaacagactattgaaataaaagaagaagtggttgggctaactgaaacatcttcccaaccaaagaatgaagaagacattgaaattattccaatccaagaagaggaagaagaagaaacagagacgaactttccagaacctccccaagatcaggaatcctcaccaatagaaaatgacagctctccttaagtgatttcttctgttttctgtttccttttttaaacattagtgttcatagcttccaagagacatgctgactttcatttcttgaggtactctgcacatacgcaccacatctctatctggcctttgcatggagtgaccatagctccttctctcttacattgaatgtagagaatgtagccattgtagcagcttgtgttgtcacgcttcttcttttgagcaactttcttacactgaagaaaggcagaatgagtgcttcagaatgtgatttcctactaacctgttccttggataggctttttagtatagtatttttttttgtcattttctccatcaacaaccagggagactgcacctgatggaaaagatatatgactgcttcatgacattcctaaactatcttttttttattccacatctacgtttttggtggagtcccttttgcatcattgttttaaggatgataaaaaaaaataacaactagggacaatacagaacccattccatttatctttctacagggctgacattgtggcacattcttagagttaccacaccccatgagggaagctctaaatagccaacacccatctgttttttgtaaaaacagcatagcttatacatggacatgtctctgccttaacttttcctaactcccactctaggctattgtttgcatgtctacctacttttagccattatgcgagaaaagaaaaaaatgaccatagaaaatgccaccatgaggtgcccaaatttcaaataataattaacatttagttatatttataatttccagatgacaaagtatttcatcaaataacttcatttgatgttccatgatcaagaaagaatccctatctctattttacaagtaattcaaagaggccaaataacttgtaaacaagaaaaggtaacttgtcaacagtcataactagtaattatgagagccttgtttcataaccaggtcttcttactcaaatcctgtgatgtttgaaataaccaaattgtctctccaatgtctgcataaactgtgagagccaagtcaacagcttttatcaagaatttactctctgaccagcaataaacaagcactgagagacacagagagccagattcagattttacccatggggataaaaagactcagactttcaccacatttggaaaactacttgcatcataaatatataataactggtagtttatatgaagcagacactaagtgctatagacactctcagaatatcatacttggaaacaatgtaattaaaatgccgaatctgagtcaacagctgccctacttttcaattcagatatactagtaccttacctagaaataatgttaacctagggtgaagtcactataatctgtagtctattatttgggcatttgctacatgatgagtgctgccagattgtggcaggtaaagagacaatgtaatttgcactccctatgatatttctacatttttagcgaccactagtggaagacattccccaaaattagaaaaaaaggagatagaagatttctgtctatgtaaagttctcaaaatttgttctaaattaataaaactatctttgtgttcttttctgcaa

SEQ ID NO: 210299 - DNA, 3475 bp, Artificial Sequence
  derived and/or modified sequence
actcaccctcccagtgtgcttgagaaacaaactgcacccactgaactccgcagctagcatccaaatcagcccttgagatttgaggccttggagactcagaactcagcagtaggccttgcctcagatccaaggtcactcggaagaggccatgtctaccctcaatgacactcatggaggaaatgctgagagaagcattcagatgcatgacacaaggtaagactgccaaaaatcttgttcttgctctcctcattttgttatttgttttatttttaggagttttgagagcaaaatgacaacacccagaaattcagtaaatgggactttcccggcagagccaatgaaaggccctattgctatgcaatctggtccaaaaccactcttcaggaggatgtcttcactggtgggccccacgcaaagcttcttcatgagggaatctaagactttgggggctgtccagattatgaatgggctcttccacattgccctggggggtcttctgatgatcccagcagggatctatgcacccatctgtgtgactgtgtggtaccctctctggggaggcattatgtatattatttccggatcactcctggcagcaacggagaaaaactccaggaagtgtttggtcaaaggaaaaatgataatgaattcattgagcctctttgctgccatttctggaatgattctttcaatcatggacatacttaatattaaaatttcccattttttaaaaatggagagtctgaattttattagagctcacacaccatatattaacatatacaactgtgaaccagctaatccctctgagaaaaactccccatctacccaatactgttacagcatacaatctctgttcttgggcattttgtcagtgatgctgatctttgccttcttccaggaacttgtaatagctggcatcgttgagaatgaatggaaaagaacgtgctccagacccaaatctaacatagttctcctgtcagcagaagaaaaaaaagaacagactattgaaataaaagaagaagtggttgggctaactgaaacatcttcccaaccaaagaatgaagaagacattgaaattattccaatccaagaagaggaagaagaagaaacagagacgaactttccagaacctccccaagatcaggaatcctcaccaatagaaaatgacagctctccttaagtgatttcttctgttttctgtttccttttttaaacattagtgttcatagcttccaagagacatgctgactttcatttcttgaggtactctgcacatacgcaccacatctctatctggcctttgcatggagtgaccatagctccttctctcttacattgaatgtagagaatgtagccattgtagcagcttgtgttgtcacgcttcttcttttgagcaactttcttacactgaagaaaggcagaatgagtgcttcagaatgtgatttcctactaacctgttccttggataggctttttagtatagtatttttttttgtcattttctccatcaacaaccagggagactgcacctgatggaaaagatatatgactgcttcatgacattcctaaactatcttttttttattccacatctacgtttttggtggagtcccttttgcatcattgttttaaggatgataaaaaaaaataacaactagggacaatacagaacccattccatttatctttctacagggctgacattgtggcacattcttagagttaccacaccccatgagggaagctctaaatagccaacacccatctgttttttgtaaaaacagcatagcttatacatggacatgtctctgccttaacttttcctaactcccactctaggctattgtttgcatgtctacctacttttagccattatgcgagaaaagaaaaaaatgaccatagaaaatgccaccatgaggtgcccaaatttcaaataataattaacatttagttatatttataatttccagatgacaaagtatttcatcaaataacttcatttgatgttccatgatcaagaaagaatccctatctctattttacaagtaattcaaagaggccaaataacttgtaaacaagaaaaggtaacttgtcaacagtcataactagtaattatgagagccttgtttcataaccaggtcttcttactcaaatcctgtgatgtttgaaataaccaaattgtctctccaatgtctgcataaactgtgagagccaagtcaacagcttttatcaagaatttactctctgaccagcaataaacaagcactgagagacacagagagccagattcagattttacccatggggataaaaagactcagactttcaccacatttggaaaactacttgcatcataaatatataataactggtagtttatatgaagcagacactaagtgctatagacactctcagaatatcatacttggaaacaatgtaattaaaatgccgaatctgagtcaacagctgccctacttttcaattcagatatactagtaccttacctagaaataatgttaacctagggtgaagtcactataatctgtagtctattatttgggcatttgctacatgatgagtgctgccagattgtggcaggtaaagagacaatgtaatttgcactccctatgatatttctacatttttagcgaccactagtggaagacattccccaaaattagaaaaaaaggagatagaagatttctgtctatgtaaagttctcaaaatttgttctaaattaataaaactatctttgtgttcttttctgcaacagatgattccaacatgggtgtttgtctattcttctttactcttgaaacattagaccatgggaggctcttacagccttgagttgatatttatacaacccaaatctaggtttgaacggtgaggtgtcaggtcatcaaatattcatgtctatatagtcttacacaggttctcaaaaaaaatgttcatgggataggtcattgataatggattccttattctgagaactccagacgactgaaatatatgagagaaggaaaaggacatagtaggagcaggcctgagaaaaaaatgaaagtcagaaatctttaaaaaaatacaagatcttatttctatcttattttttctcctcttctgaaatatatatgaggattcctctccaaacccatggtttctctaagaattttgagtcatttgtatgacctcaaataattagttttagctgacctcacataactccttataataggagacatctttaatgtctgctattaaagaaggatgaaaattcctatgaccttctccccgattatccctttggcaatatagagtcaaataataacattgaccaatagtaaacatgctttgccaagaagtagaagatatattctctagccttagtttttcctcccaatttgcatttttgtaaaaataatgttgtatccacaaaggaaataaactttaaaaacccaagtgcactcattga

SEQ ID NO: 210300 - DNA, 894 bp, Artificial Sequence
  derived and/or modified sequence
atgaccaccccccggaacagcgtgaacggcaccttccccgccgagcccatgaaaggtccaattgcaatgcagtcagggcccaagcctttatttcgtcgcatgtcctctctggttggccccacccagtcctttttcatgcgtgaaagcaagactttgggagcagtgcagatcatgaacggactgtttcacatagctcttggcggacttctgatgattcccgccggaatatatgcccccatctgcgtcacagtgtggtatcctctttgggggggtatcatgtacataatttccggcagtctgcttgccgccacagaaaagaattcccgaaagtgcctggtgaagggcaagatgatcatgaattccctgtccctgtttgcagccatcagtgggatgattctctctattatggatattcttaacattaagattagccacttcctcaaaatggaatcactcaactttatcagagctcacacaccatacattaatatctataactgcgagcctgctaaccccagcgaaaagaactccccttcaacacagtactgttactctattcagagtctgtttttgggcatcctctcagtcatgcttattttcgctttttttcaggaactggtcatcgccgggattgtcgaaaacgaatggaagcgcacttgttcgagacctaagagtaacatcgtcctgctcagcgcagaggagaagaaagagcagactatagaaatcaaggaggaggtggtgggtctgacggaaacgagttcccagcccaagaatgaagaggatatcgaaatcataccgattcaggaggaggaggaggaggaaactgaaaccaactttcctgaacccccgcaggatcaagagagctcgcccattgaaaatgacagctctccctag

SEQ ID NO: 210301 - DNA, 894 bp, Artificial Sequence
  derived and/or modified sequence
atgaccaccccccggaacagcgtgaacggcaccttccccgccgagccgatgaagggccccattgcgatgcagtctggacccaagccactgtttcggcgcatgtcaagcttagttgggccaacccagtctttttttatgagagaatccaagaccctgggcgccgtacagatcatgaacggcctgttccatatcgcccttggcgggttgttgatgatccctgcggggatctatgcacctatctgtgtgaccgtgtggtacccgttgtggggtggcataatgtacatcatttctggcagtttacttgcagcaacagagaaaaattcacgaaaatgtctggtgaaggggaaaatgattatgaacagcttgagcctctttgccgcaatttccggcatgatcttgagcattatggacatcctaaacattaaaatttcacatttccttaaaatggagagccttaacttcatcagagcccatacgccatacatcaacatctacaactgcgagcctgccaatcctagcgaaaagaacagcccatccacccagtattgttattcaatccaatccttgtttctggggatcctgtccgtgatgcttattttcgcgttttttcaggagttggttatcgcgggaatcgtagagaatgaatggaagaggacatgttctaggccgaaatcaaatatcgtgcttttgtccgccgaggaaaagaaagagcagaccatcgagatcaaggaggaggtcgttggactcacggaaaccagctcacagccgaagaacgaggaagacattgaaataatcccaatccaggaagaggaagaggaggagacagagactaatttcccagaaccaccacaggatcaggagagtagccccattgaaaatgactcttcgccttag

SEQ ID NO: 210302 - DNA, 855 bp, Artificial Sequence
  derived and/or modified sequence
atgaccaccccccggaacagcgtgaacggcaccttccccgccgagccaatgaaaggtcccattgcgatgcagagcggaccaaagcccctgtttcgccgtatgtcctctctggtgggcccaactcagtctttcttcatgcgcgagagtaaaactctgggagctgtgcaaatcatgaatggcctcttccacatcgccttgggaggtctactaatgattcctgcaggtatctacgcaccaatctgtgtgaccgtttggtacccactctggggcggcattatgtatatcatctcaggctcgctgttggcagccacagagaagaacagccggaagtgccttgtgaagggcaaaatgatcatgaacagcttgtctctcttcgccgccatcagtggcatgattcttagcataatggacatcctcaatataaagatctctcacttcctgaaaatggagtccctcaattttatccgagcccatactccttatattaacatctataactgcgaacccgcaaatccttctgaaaagaattcaccaagtacccagtactgttactctatacagtcactcttcctggagctggtaatcgcaggcatagtggagaatgaatggaagagaacttgctcacgcccaaaaagtaatatcgtgttgctcagcgctgaggagaagaaagaacagactattgagatcaaagaagaggtcgtcgggctcaccgaaactagttctcagccaaagaacgaagaagacatcgagataattcctatccaagaggaggaagaagaagagacagaaactaactttcccgagcctccccaggaccaggaatcctctccaattgagaatgatagtagtccttag

SEQ ID NO: 210303 - DNA, 894 bp, Artificial Sequence
  derived and/or modified sequence
atgaccaccccccggaacagcgtgaacggcaccttccccgccgagcccatgaaagggcccattgcaatgcagtccggacctaagcccctgttcagacgcatgagcagcttggtcggaccgacccagtcattttttatgagggaaagtaaaaccttaggtgcggtgcagatcatgaacggtctgttccacatcgctctcggcggcctgctgatgatacccgcgggcatatatgcaccaatctgcgtgacagtgtggtacccactgtggggcggcatcatgtatattatttccggatcccttctcgccgctaccgagaaaaacagcagaaaatgcctggtgaaagggaagatgataatgaactctctgtcgcttttcgcagctatttccggaatgattcttagtatcatggacattttaaacatcaagatctcacacttcctgaagatggagtctttaaatttcattagagctcacacaccgtatattaacatctataattgtgagccggcaaaccctagtgagaaaaactccccctccacacagtactgttactctatacaatcattgttcctggggatattaagtgtgatgctcattttcgcgttctttcaggaacttgtgatagcagggatagtcgaaaacgagtggaagcgcacgtgtagcaggcctaaaagcaatatagttctcttgtccgcagaggaaaaaaaggaacagacgatcgaaattaaggaagaggtggttgggcttactgaaacgagttctcagccaaaaaatgaggaagatatcgaaataatccccattcaagaggaggaggaggaggaaactgaaactaatttccctgagcctccacaggaccaggaatctagccccatcgaaaatgactctagtccctag

SEQ ID NO: 210304 - DNA, 894 bp, Artificial Sequence
  derived and/or modified sequence
atgactacccctcgaaattccgtgaacggaactttcccagccgaacctatgaaaggcccaattgccatgcagtccggccctaaacctctcttccggcgtatgtcaagcctcgtcggacccacccagtctttcttcatgcgcgagagcaaaacgctgggagcagtgcaaatcatgaacggcttattccatattgccctagggggactcctcatgatcccagccggaatttatgctcctatctgcgtgacagtatggtaccccctgtggggcggaatcatgtatatcattagcggctcgcttcttgcagcaacagagaagaattctcgtaaatgtttagttaagggaaaaatgatcatgaatagcctgtctctttttgccgctattagcggtatgatcctgagcataatggacatattgaatatcaaaattagccactttctgaagatggaaagtttgaacttcattagggctcacacgccttatattaatatttataactgcgagcccgctaaccctagcgagaagaattcaccttcaactcagtattgctattcaattcagtcgctgtttctggggatcctatcagtgatgttgatttttgcctttttccaggaattagtgatagctggcatagttgagaatgagtggaagagaacctgtagtaggccaaaatcaaacattgtcctgctgtctgcagaggaaaaaaaggaacagaccattgagattaaagaagaagtcgtgggtctgaccgagacatcttcacagccgaagaacgaagaggacatagagatcattccaatccaggaagaggaggaagaggagacagagaccaactttcccgaaccacctcaggaccaggagtcaagccccatagaaaatgattcatctccttag

SEQ ID NO: 210305 - DNA, 894 bp, Artificial Sequence
  derived and/or modified sequence
atgacaaccccgcgtaacagcgtcaacggaacgttccctgctgagccgatgaagggcccaatcgcaatgcaatcgggcccaaaacctcttttccgtcggatgtccagtctggtggggccaacacagtctttcttcatgcgagaatccaagaccctgggtgcagtgcagattatgaacggactcttccatatcgcccttggtgggttactcatgataccagccggtatctatgcacccatctgcgtcaccgtttggtatcctctgtggggcggtataatgtacattatttctggctctctcctggctgcgacggagaagaattctcgcaaatgccttgtgaagggcaaaatgattatgaacagcttgtccctgttcgcagctataagcggcatgattctctccattatggacatcttgaacataaagataagtcacttccttaagatggaatccctaaactttattcgggcacatactccttatattaacatctacaactgcgaacccgcaaaccctagtgagaagaatagcccttccacgcagtattgctactctattcagagtctcttcctgggcattctcagcgtgatgcttatctttgcattcttccaagagctggtgatcgctggcatagtggagaatgaatggaagcggacctgctccaggcccaagtctaacatcgtactcctttctgcagaggaaaaaaaggagcagaccatcgagatcaaagaagaggtggtcggactgaccgagacgtcttcacagccgaagaacgaggaggacatagaaataatcccaatacaggaggaggaggaagaggagacagaaactaacttcccagaaccgccacaggaccaggagagctcacctatcgagaacgactccagtccatag

SEQ ID NO: 210306 - DNA, 855 bp, Artificial Sequence
  derived and/or modified sequence
atgactactccaagaaattcagtcaacggaacatttcctgccgagccaatgaaaggacccattgccatgcagagcggacccaaaccactctttaggcggatgtcgagcctcgtcggcccaacgcagagcttttttatgcgcgaatctaagacacttggggctgtgcagatcatgaacggcctgttccatattgccctggggggtctactcatgatccccgctgggatctatgccccaatctgcgtgaccgtgtggtaccctttatggggaggtatcatgtacatcatctctggctcgctcctggctgctactgaaaaaaacagccggaagtgcctggtcaaggggaagatgattatgaacagtttgtcattatttgctgcaatcagcggcatgattcttagcataatggacattctgaacattaagatcagccactttctcaaaatggaatccctgaacttcatcagagcacataccccctacatcaatatctacaactgtgagccagctaaccctagtgaaaaaaattctccctctacccaatactgttacagcatccaaagcctgttcttagaattggtcatcgctggcatcgttgaaaacgagtggaagagaacttgttcgaggcccaagagtaacatcgtactcttgtccgctgaggagaaaaaagaacagaccatagaaatcaaggaagaagttgtgggcctgaccgaaaccagctcccagcctaagaacgaggaggatatcgagatcatcccaatccaagaggaggaggaggaggaaactgaaacaaatttcccagagcccccacaagaccaagaaagtagcccaatcgaaaacgattccagtccgtag

SEQ ID NO: 210307 - DNA, 894 bp, Artificial Sequence
  derived and/or modified sequence
atgactacacctcgaaatagcgtgaatgggacctttcccgctgagcccatgaagggacctattgccatgcagagcgggcctaaaccattgttccggaggatgagcagtttggtaggccctactcagagcttcttcatgagagaatctaaaactctcggagccgtacagatcatgaacggcctcttccatatagccttgggcggtcttctaatgattcccgctggaatctacgcccctatctgcgtaacggtctggtatccgttgtggggcggaataatgtatatcatttctggatcattgctggctgccactgagaagaattcacgtaaatgcctagtgaaggggaaaatgattatgaattctctctccctgtttgctgcaatttccggcatgattctctccattatggatatcctcaatataaagatctctcacttcctcaaaatggaaagcctgaactttattagggcgcatacaccatatataaacatatacaactgcgaacctgcgaatccgagtgaaaagaacagccctagcactcagtactgctattctatccagtccttgttcctggggattcttagtgtgatgctgatctttgccttttttcaagagctcgtcatcgctgggatagtagagaacgaatggaagaggacttgttccaggccaaaatcaaatattgtgctcctgtctgccgaggagaaaaaggaacaaaccatcgaaatcaaggaagaggtggttgggttgaccgaaacctcatcccaaccgaagaatgaggaggacatcgagattattcctatccaggaagaagaagaggaagagacagaaaccaacttccccgagccccctcaagaccaggagagctccccgatcgaaaatgattcatctccttag

SEQ ID NO: 210308 - protein, 373 aa, Artificial Sequence
  derived and/or modified sequence
MPNDEAFSKPSTPSEAPHAPGVPPQGRAGGFGKASGALVGAASGSSAGGSSRGGGSGSGASDLGAGSKKSPRLPKCARCRNHGYASPLKGHKRFCMWRDCQCKKCNLIAERQRVMAAQVALRRQQAQEEELGISHPIPLPSAAELLVKRENNGSNPCLMTECSGTSQPPPASVPTTAASEGRMVIQDIPAVTSRGHVENTPDLVSDSTYYSSFYQPSLFPYYNNLYNCPQYSMALAADSASGEVGNPLGGSPVKNSLRGLPGPYVPGQTGNQWQMKNMENRHAMSSQYRMHSYYPPPSYLGQSVPQFFTFEDAPSYPEARASVFSPPSSQDSGLVSLSSSSPISNKSTKAVLECEPASEPSSFTVTPVIEEDE

SEQ ID NO: 210309 - DNA, 2229 bp, Artificial Sequence
  derived and/or modified sequence
cctcgccactccagctgcgcctccggctgcagcgcacacgtctcctgcgcctcctcctccggagcgtcgctgtccgtcgggttcatccctcgcagcagtctccaggcgagagagggggccagagtgctcgcacttctcctaggggcaccatgcccaacgacgaggcattcagcaagccctctacaccgtcggaagcccctcacgcccccggggtaccgccgcagggcagagccgggggctttggcaaagcgtctggggcgctagtgggggcggccagcggctcgagcgccgggggcagcagcagaggaggcggctccggctccggggcgtcggacctgggtgccgggagcaagaagtccccgcggctgcccaagtgcgcacgctgcaggaaccacggctacgcctcgccgctcaagggccacaagcgcttctgcatgtggcgcgactgccagtgcaagaagtgcaacctgatcgccgagaggcagcgcgtgatggccgcgcaggtggccctgagaaggcagcaggcccaggaggaggaattgggtatcagccaccccatcccactgcccagtgcggccgagctgcttgtcaaaagagagaacaatggcagtaacccgtgcctcatgactgagtgcagtggcacctctcagccaccgccggccagtgtccccaccactgcagcttcagagggacgtatggtcatccaggatattcctgctgtcaccagcagagggcatgtggagaacacacctgacctggtttcagactccacctactacagcagcttctaccagccgtctctgtttccttattacaacaatctatacaactgcccgcagtactccatggccttggctgctgattctgcttctggggaggtgggaaatcccctcgggggatcccctgtgaagaacagccttcggggcctccccggaccttatgtgcctggtcagacaggaaaccagtggcagatgaagaacatggagaaccgccatgcaatgagctcccagtacaggatgcattcttactacccgcctccctcttacctgggccagagcgtgccccagttcttcacttttgaggatgctccctcttacccggaagccagggcgagcgtattctcgccgcccagcagtcaagattctggcttggtttccctctcgagcagctctcctattagtaacaagagcacaaaggcagtgcttgaatgtgagcctgcgtcggagcccagcagcttcacagtcactcccgtcatcgaggaggacgagtgagcagtgcctgctgccgatggcggttcacttggagtaacaggcttattccactttccatggggtttgttaatattttgcattgactcatactatcttaactgttgagaacgtatttggtttatattccttagagtttagtccagaggctgtaacacatttgtaatactttagggtccgtgactaccatctgcatggtttaagtgctttactcacggagtttaaataatagtgttcatttttttaatgacactggtttcatgtagttttcaagaaataaaagaattcattcaagtgaagccatttgtgtgcctctaaatgagtcatctaattagatgttacttttagttttaaaatgaaatcttaggtgccttaggggttttttttttttttaagtattttttaaaaacctgcaaagatataaatttagccaagttacctgacgggtgagaagaaaagagcaggcaaaattagtgatttttttagaagtctgctaaatggatatattgtgtgtgttgctgttggaaatagccccaccccatcctcccaatccaaaacgtaactgaaatataatcagaaacattaaagcctgtaaaaaaaaattgctgcgtttttggtaaagggtgtaatttgtaaacagtgcaatttaaagtgaccttagtgatgcagagttcctgagtggtgtttgtagaatgagtttatcatacattctttctactactggaaaaaaatggatgcagtctggactgttgtaaccttaggttgtaatctgatttggaaataagtacatctttaaaagttgctacagatttgagttcatgattttgttaaaaattgctatggagtactttgttatataacagaagccatcctgaaatgaaactagtctaaaaaaattcattgttctacttagttgcagctgtacctgaaataaaaatgttattgatgactgaaaaaaaaa

SEQ ID NO: 210310 - DNA, 1122 bp, Artificial Sequence
  derived and/or modified sequence
atgcctaatgacgaggctttcagtaagccttccacaccaagcgaggcaccgcatgctcccggagtgccgccccaagggcgagcagggggatttgggaaagccagcggggccctagtgggcgcggcctcgggtagttctgccggaggatcttccagagggggaggttccggttcaggagcctccgatttaggggccggatctaaaaagtcacctagactgcctaaatgcgctaggtgccggaatcacggctacgcttcccccctgaagggacacaagcgtttttgtatgtggcgcgactgtcagtgcaagaagtgtaacctcattgcggagcggcagcgcgtgatggccgcacaggtcgcactcagaaggcagcaggcgcaagaagaggaactgggcatttcccacccaattcctttaccctcagccgccgaactgctcgttaaaagagagaacaacggcagcaatccttgtctcatgacggaatgctcaggtacgagtcaaccacctcccgcatcagtgcccacaacagcagcctccgagggaagaatggtcatacaagatatccccgctgtgacttcgagaggacacgtggagaatacgccggatttagtgagtgactccacatattactccagtttctatcagcccagtttattcccgtattacaataacctgtacaactgtccccaatactccatggctctggctgccgattccgcctctggggaagtgggcaacccactaggcggaagccctgtcaagaattccctgagaggcttgcccggaccctatgtgcctggtcaaactggtaaccagtggcagatgaagaatatggaaaatagacatgcgatgagtagccaataccggatgcatagctattaccctcctccaagttacctaggacaatccgttccacagttttttacctttgaagatgcaccatcttaccctgaggcacgcgccagcgtcttctcgcccccgtctagtcaagacagcgggctggtgtctcttagtagtagcagcccgataagtaataaatcaacaaaagccgtgctcgagtgtgaacctgcgtctgagccttcctcctttacagtcacccctgtcattgaggaggatgagtag

SEQ ID NO: 210311 - DNA, 525 bp, Artificial Sequence
  derived and/or modified sequence
atgcccaacgatgaggctttctctaaaccttctaccccatcagaggcaccccacgctccaggggtgccaccccagggccgcgccggggggtttggaaaggcgagcggtgcgctggtcggagcagccagtggcagcagcgctgggggtagtagtagaggaggggggtccggctctggggcctccgacctgggagccggatccaaaaagagtccccggctccctaaatgtgctaggtgcaggaaccacggatacgccagcccattgaagggacataaacggttttgcatgtggcgagattgtcagtgcaagaagtgcaatttaatagcggagaggcaaagggtcatggctgcgcaggtcggcgccggggtgagggagccaggcttttcactgagtttctttttcttctttttctttcgatggagcttagcacgcctcccaagactgcagtgctcaggcgccatcctggcacactgtaactcagcctctagggtgcaggctattctgctgccccaacctcctaaatag

SEQ ID NO: 210312 - DNA, 1122 bp, Artificial Sequence
  derived and/or modified sequence
atgcccaatgatgaggccttcagcaagcccagcacccccagcgaggccccccacgcccctggggtgcccccccagggccgggccggcggctttgggaaggccagcggggccctggtgggcgccgccagcggcagcagcgctgggggcagcagcagaggaggcggcagcggcagcggggccagtgacctgggcgccggcagcaagaagagcccccggctgcccaagtgtgcccgctgcaggaaccacggctacgccagccccctgaagggccacaagcgcttctgcatgtggagggactgccagtgcaagaagtgcaacctgattgctgagcggcagagggtgatggccgcccaggtggccctgcggcggcagcaggcccaggaggaggagctgggcatcagccaccccatccccctgcccagcgctgctgagctgctggtgaagcgggagaacaacggcagcaacccctgcctgatgacagaatgttctggcaccagccagcccccaccagcctctgtgcccaccacagctgccagcgagggccgcatggtgatccaggacatcccagctgtgaccagccggggccacgtggagaacaccccagacctggtgtctgacagcacctactacagcagcttctaccagcccagcctcttcccctactacaacaacctgtacaactgcccccagtacagcatggccctggccgctgacagcgccagcggggaggtgggcaaccccctgggcggcagccctgtgaagaacagcctgcggggcctgcccggcccctacgtgcccggccagacaggcaaccagtggcagatgaagaacatggagaacagacatgccatgagcagccagtacaggatgcacagctactaccccccacccagctacctgggccagagcgtgccccagttcttcacctttgaagatgcccccagctacccagaggcccgggccagcgtcttcagcccccccagcagccaggacagcggcctggtgtccctgagcagcagcagccccatcagcaacaagagcaccaaggctgtgctggagtgtgagcccgccagcgagcccagcagcttcaccgtgacccctgtgattgaagaagatgaatag

SEQ ID NO: 210313 - DNA, 525 bp, Artificial Sequence
  derived and/or modified sequence
atgcccaatgatgaggccttcagcaagcccagcacccccagcgaggccccccacgcccctggggtgcccccccagggccgggccggcggctttgggaaggccagcggggccctggtgggcgccgccagcggcagcagcgctgggggcagcagcagaggaggcggcagcggcagcggggccagtgacctgggcgccggcagcaagaagagcccccggctgcccaagtgtgcccgctgcaggaaccacggctacgccagccccctgaagggccacaagcgcttctgcatgtggagggactgccagtgcaagaagtgcaacctgattgctgagcggcagagggtgatggccgcccaggtgggcgccggcgtgcgggagcccggcttcagcctgtccttcttcttcttcttcttcttccgctggagcctggcccggctgccccggctgcagtgcagcggggccatcctggcccactgcaacagcgccagccgggtgcaggccatcctgctgccccagccccccaagtag

SEQ ID NO: 210314 - DNA, 1122 bp, Artificial Sequence
  derived and/or modified sequence
atgcccaacgacgaggccttcagcaagcccagcacccccagcgaggcacctcatgcacccggagtgcccccccagggtagagccggaggcttcgggaaggcctccggagccctggtgggagctgcaagcggctcctcagccgggggatcgagtcgaggtggcgggagcggctccggcgcctcggatctcggggctggaagcaagaagagcccgcgcctcccaaaatgtgcaaggtgcagaaaccacgggtacgcctcaccattgaaaggacacaagcgtttctgcatgtggcgtgattgccagtgcaagaaatgtaatttgatcgccgaacggcagcgcgtgatggccgctcaagtggcactacgccgccagcaggcccaggaagaggagctcggcatctcacatcccatccctctgcccagcgccgcagagctgctggttaagcgcgaaaataatgggtctaacccttgcttaatgaccgagtgctcaggcacttcccagcctcctccggcatccgtgccgacaactgcggctagcgaaggtcggatggtgattcaggacattccagccgtcaccagtcgtggccacgtcgagaacactcccgacttggtctccgatagcacctactacagtagtttttaccagccttctctcttcccatattacaacaacctctataattgccctcagtacagtatggcccttgccgctgacagcgcaagcggcgaggtgggtaatccactaggggggtctccggtgaagaatagcttgcgaggtcttcccgggccgtacgtgcccgggcagactgggaatcagtggcagatgaagaatatggagaatagacacgccatgagctcccagtataggatgcattcatattatccacctcccagctacctcggccagtctgtgccccaatttttcacgtttgaagatgcgcctagctaccccgaggcacgggcctcagtcttctctcctccatccagtcaggactcaggcctggtgagcctgtcttccagcagccccatttccaataaatcaaccaaagcggtgttagaatgcgagcctgcctccgagccaagcagctttacggtcacaccagtcatcgaggaagacgagtag

SEQ ID NO: 210315 - DNA, 525 bp, Artificial Sequence
  derived and/or modified sequence
atgcccaacgacgaggccttcagcaagcccagcacccccagcgaggcaccacatgcccctggagtgccaccacagggacgagctggcggctttggcaaggcatcaggcgctctggtgggagctgctagtggttcatctgcgggaggaagctcacgtgggggtggctctggttccggtgcctctgatttaggtgcgggctccaaaaagagcccccggctgccaaagtgcgcacggtgtcgcaatcacgggtacgcctcacctttgaaaggtcacaagcgattctgcatgtggcgggattgccaatgtaaaaaatgtaacctgatcgcagaacggcaacgggtcatggctgcccaggtgggcgcaggggtgagagaacccggatttagtttatccttctttttcttttttttttttagatggtctctggcacgcctgcccagattgcagtgctcaggtgccatcttagcccactgcaattccgcgtccagggtacaggctatactcctgccccagccccccaaatag

SEQ ID NO: 210316 - DNA, 1122 bp, Artificial Sequence
  derived and/or modified sequence
atgcccaatgacgaagcctttagtaagccatctaccccctctgaagcccctcatgcaccgggtgtgccaccacagggaagggcagggggatttggcaaagcaagcggcgctttggtgggcgctgcctccgggtcttcagccggaggttcctcacgtggtgggggtagcggtagtggcgcttcagacctgggagccggtagtaaaaagtccccacggctgccaaagtgcgctcgctgtaggaatcacggctatgcatcccctctaaagggacataagcggttttgtatgtggagagactgccagtgtaagaagtgcaacctcattgccgaacgccagagggttatggccgctcaggtggccctgcggcgtcagcaggcacaagaagaagaactcggtatctcccaccccatcccactgccgtctgccgctgagcttctggtgaagcgcgagaataacggaagtaatccatgtctgatgactgagtgctctggaacatcccagccccctccggcaagcgtccctactaccgctgccagcgagggacggatggtgatccaggacatccctgcagtgacaagtagaggacacgttgagaatacaccagatctcgtgagcgatagtacatactacagcagcttctaccagccatcgctcttcccctactacaataacctttataattgtccacagtacagtatggctttagccgctgattctgcttctggcgaggtagggaatcctcttgggggttcccctgtgaagaatagtctccgtggactgcctggcccatacgtgcccggacaaactggcaatcaatggcagatgaagaacatggaaaaccgccatgctatgtcttctcagtacagaatgcattcttattatcccccaccaagttacctgggacagagtgttccccaattctttacattcgaggatgcacctagctaccccgaagcccgtgcatctgtgttctccccaccatcttctcaggactcgggtctggtgtccttgtctagttcctcccctatctccaataagagcactaaagccgtgctagagtgcgaacctgctagcgagccctcatccttcactgttacgccagtgatcgaggaggacgaatag

SEQ ID NO: 210317 - DNA, 525 bp, Artificial Sequence
  derived and/or modified sequence
atgccaaatgacgaagctttctctaaaccatcgaccccatccgaagctccccacgccccaggcgttccccctcagggccgagccggtggctttggtaaagcgtctggtgcattagtgggtgcagctagcgggagcagcgcaggcggatcttcaagaggtgggggttcgggaagcggagcttccgacttgggagcaggcagtaaaaagagtccccgactccctaagtgcgccagatgcagaaaccatggttacgcttctccactgaaagggcataagcggttttgtatgtggcgggactgccaatgtaaaaagtgcaacttaatcgctgaacgtcagcgcgtgatggcggcacaggtcggagccggtgttagggagcctggattctcactctcttttttttttttcttctttttcaggtggagcctggctagattacccagactgcagtgttctggggctatcctggctcactgtaactctgcctcccgagttcaggccattctgctgccccagcccccaaaatag

SEQ ID NO: 210318 - DNA, 1122 bp, Artificial Sequence
  derived and/or modified sequence
atgcccaacgacgaggccttcagcaagcccagcacccccagcgaggccccccacgcccccggcgtgcccccccagggcagagccggcggcttcggcaaggccagcggcgccctggtgggcgccgccagcggcagcagcgccggcggcagcagcagaggcggcggcagcggcagcggcgccagcgacctgggcgccggcagcaagaagagccccagactgcccaagtgcgccagatgcagaaaccacggctacgccagccccctgaagggccacaagagattctgcatgtggagagactgccagtgcaagaagtgcaacctgatcgccgagagacagagagtgatggccgcccaggtggccctgagaagacagcaggcccaggaggaggagctgggcatcagccaccccatccccctgcccagcgccgccgagctgctggtgaagagagagaacaacggcagcaacccctgcctgatgaccgagtgcagcggcaccagccagcccccccccgccagcgtgcccaccaccgccgccagcgagggcagaatggtgatccaggacatccccgccgtgaccagcagaggccacgtggagaacacccccgacctggtgagcgacagcacctactacagcagcttctaccagcccagcctgttcccctactacaacaacctgtacaactgcccccagtacagcatggccctggccgccgacagcgccagcggcgaggtgggcaaccccctgggcggcagccccgtgaagaacagcctgagaggcctgcccggcccctacgtgcccggccagaccggcaaccagtggcagatgaagaacatggagaacagacacgccatgagcagccagtacagaatgcacagctactaccccccccccagctacctgggccagagcgtgccccagttcttcaccttcgaggacgcccccagctaccccgaggccagagccagcgtgttcagcccccccagcagccaggacagcggcctggtgagcctgagcagcagcagccccatcagcaacaagagcaccaaggccgtgctggagtgcgagcccgccagcgagcccagcagcttcaccgtgacccccgtgatcgaggaggacgagtag

SEQ ID NO: 210319 - DNA, 525 bp, Artificial Sequence
  derived and/or modified sequence
atgcccaacgacgaggccttcagcaagcccagcacccccagcgaggccccccacgcccccggcgtgcccccccagggcagagccggcggcttcggcaaggccagcggcgccctggtgggcgccgccagcggcagcagcgccggcggcagcagcagaggcggcggcagcggcagcggcgccagcgacctgggcgccggcagcaagaagagccccagactgcccaagtgcgccagatgcagaaaccacggctacgccagccccctgaagggccacaagagattctgcatgtggagagactgccagtgcaagaagtgcaacctgatcgccgagagacagagagtgatggccgcccaggtgggcgccggcgtgagagagcccggcttcagcctgagcttcttcttcttcttcttcttcagatggagcctggccagactgcccagactgcagtgcagcggcgccatcctggcccactgcaacagcgccagcagagtgcaggccatcctgctgccccagccccccaagtag

SEQ ID NO: 210320 - DNA, 2222 bp, Artificial Sequence
  derived and/or modified sequence
cctcgccactccagctgcgcctccggctgcagcgcacacgtctcctgcgcctcctcctccggagcgtcgctgtccgtcgggttcatccctcgcagcagtctccaggcgagagagggggccagagtgctcgcacttctcctaggggcaccatgcccaacgacgaggcattcagcaagccctctacaccgtcggaagcccctcacgcccccggggtaccgccgcagggcagagccgggggctttggcaaagcgtctggggcgctagtgggggcggccagcggctcgagcgccgggggcagcagcagaggaggcggctccggctccggggcgtcggacctgggtgccgggagcaagaagtccccgcggctgcccaagtgcgcacgctgcaggaaccacggctacgcctcgccgctcaagggccacaagcgcttctgcatgtggcgcgactgccagtgcaagaagtgcaacctgatcgccgagaggcagcgcgtgatggccgcgcaggtggccctgagaaggcagcaggcccaggaggaggaattgggtatcagccaccccatcccactgcccagtgcggccgagctgcttgtcaaaagagagaacaatggcagtaacccgtgcctcatgactgagtgcagtggcacctctcagccaccgccggccagtgtccccaccactgcagcttcagagggacgtatggtcatccaggatattcctgctgtcaccagcagagggcatgtggagaacacacctgacctggtttcagactccacctactacagcagcttctaccagccgtctctgtttccttattacaacaatctatacaactgcccgcagtactccatggccttggctgctgattctgcttctggggaggtgggaaatcccctcgggggatcccctgtgaagaacagccttcggggcctccccggaccttatgtgcctggtcagacaggaaaccagtggcagatgaagaacatggagaaccgccatgcaatgagctcccagtacaggatgcattcttactacccgcctccctcttacctgggccagagcgtgccccagttcttcacttttgaggatgctccctcttacccggaagccagggcgagcgtattctcgccgcccagcagtcaagattctggcttggtttccctctcgagcagctctcctattagtaacaagagcacaaaggcagtgcttgaatgtgagcctgcgtcggagcccagcagcttcacagtcactcccgtcatcgaggaggacgagtgagcagtgcctgctgccgatggcggttcacttggagtaacaggcttattccactttccatggggtttgttaatattttgcattgactcatactatcttaactgttgagaacgtatttggtttatattccttagagtttagtccagaggctgtaacacatttgtaatactttagggtccgtgactaccatctgcatggtttaagtgctttactcacggagtttaaataatagtgttcatttttttaatgacactggtttcatgtagttttcaagaaataaaagaattcattcaagtgaagccatttgtgtgcctctaaatgagtcatctaattagatgttacttttagttttaaaatgaaatcttaggtgccttaggggttttttttttttttaagtattttttaaaaacctgcaaagatataaatttagccaagttacctgacgggtgagaagaaaagagcaggcaaaattagtgatttttttagaagtctgctaaatggatatattgtgtgtgttgctgttggaaatagccccaccccatcctcccaatccaaaacgtaactgaaatataatcagaaacattaaagcctgtaaaaaaaaattgctgcgtttttggtaaagggtgtaatttgtaaacagtgcaatttaaagtgaccttagtgatgcagagttcctgagtggtgtttgtagaatgagtttatcatacattctttctactactggaaaaaaatggatgcagtctggactgttgtaaccttaggttgtaatctgatttggaaataagtacatctttaaaagttgctacagatttgagttcatgattttgttaaaaattgctatggagtactttgttatataacagaagccatcctgaaatgaaactagtctaaaaaaattcattgttctacttagttgcagctgtacctgaaataaaaatgttattgatgactgaa

SEQ ID NO: 210321 - DNA, 692 bp, Artificial Sequence
  derived and/or modified sequence
cctcgccactccagctgcgcctccggctgcagcgcacacgtctcctgcgcctcctcctccggagcgtcgctgtccgtcgggttcatccctcgcagcagtctccaggcgagagagggggccagagtgctcgcacttctcctaggggcaccatgcccaacgacgaggcattcagcaagccctctacaccgtcggaagcccctcacgcccccggggtaccgccgcagggcagagccgggggctttggcaaagcgtctggggcgctagtgggggcggccagcggctcgagcgccgggggcagcagcagaggaggcggctccggctccggggcgtcggacctgggtgccgggagcaagaagtccccgcggctgcccaagtgcgcacgctgcaggaaccacggctacgcctcgccgctcaagggccacaagcgcttctgcatgtggcgcgactgccagtgcaagaagtgcaacctgatcgccgagaggcagcgcgtgatggccgcgcaggtgggtgcgggcgtgcgggagcccgggttcagccttagttttttttttttttttttttttagatggagtctcgctcggttgcccaggctgcagtgtagtggcgcgatcttggctcactgcaactccgcttcccgggttcaagcaattctcctgcctcagcctcccaagtagctgggactacaggcgcac

SEQ ID NO: 210322 - protein, 763 aa, Artificial Sequence
  derived and/or modified sequence
MKTSPRRPLILKRRRLPLPVQNAPSETSEEEPKRSPAQQESNQAEASKEVAESNSCKFPAGIKIINHPTMPNTQVVAIPNNANIHSIITALTAKGKESGSSGPNKFILISCGGAPTQPPGLRPQTQTSYDAKRTEVTLETLGPKPAARDVNLPRPPGALCEQKRETCADGEAAGCTINNSLSNIQWLRKMSSDGLGSRSIKQEMEEKENCHLEQRQVKVEEPSRPSASWQNSVSERPPYSYMAMIQFAINSTERKRMTLKDIYTWIEDHFPYFKHIAKPGWKNSIRHNLSLHDMFVRETSANGKVSFWTIHPSANRYLTLDQVFKPLDPGSPQLPEHLESQQKRPNPELRRNMTIKTELPLGARRKMKPLLPRVSSYLVPIQFPVNQSLVLQPSVKVPLPLAASLMSSELARHSKRVRIAPKVLLAEEGIAPLSSAGPGKEEKLLFGEGFSPLLPVQTIKEEEIQPGEEMPHLARPIKVESPPLEEWPSPAPSFKEESSHSWEDSSQSPTPRPKKSYSGLRSPTRCVSEMLVIQHRERRERSRSRRKQHLLPPCVDEPELLFSEGPSTSRWAAELPFPADSSDPASQLSYSQEVGGPFKTPIKETLPISSTPSKSVLPRTPESWRLTPPAKVGGLDFSPVQTSQGASDPLPDPLGLMDLSTTPLQSAPPLESPQRLLSSEPLDLISVPFGNSSPSDIDVPKPGSPEPQVSGLAANRSLTEGLVLDTMNDSLSKILLDISFPGLDEDPLGPDNINWSQFIPELQ

SEQ ID NO: 210323 - DNA, 3527 bp, Artificial Sequence
  derived and/or modified sequence
actgaaagctccggtgccagaccccacccccggccccggcccgggaccccctcccctcccgggatcccccggggttcccaccccgcccgcaccgccggggacccggccggtccggcgcgagcccccgtccggggccctggctcggcccccaggttggaggagcccggagcccgccttcggagctacggcctaacggcggcggcgactgcagtctggagggtccacacttgtgattctcaatggagagtgaaaacgcagattcataatgaaaactagcccccgtcggccactgattctcaaaagacggaggctgccccttcctgttcaaaatgccccaagtgaaacatcagaggaggaacctaagagatcccctgcccaacaggagtctaatcaagcagaggcctccaaggaagtggcagagtccaactcttgcaagtttccagctgggatcaagattattaaccaccccaccatgcccaacacgcaagtagtggccatccccaacaatgctaatattcacagcatcatcacagcactgactgccaagggaaaagagagtggcagtagtgggcccaacaaattcatcctcatcagctgtgggggagccccaactcagcctccaggactccggcctcaaacccaaaccagctatgatgccaaaaggacagaagtgaccctggagaccttgggaccaaaacctgcagctagggatgtgaatcttcctagaccacctggagccctttgcgagcagaaacgggagacctgtgcagatggtgaggcagcaggctgcactatcaacaatagcctatccaacatccagtggcttcgaaagatgagttctgatggactgggctcccgcagcatcaagcaagagatggaggaaaaggagaattgtcacctggagcagcgacaggttaaggttgaggagccttcgagaccatcagcgtcctggcagaactctgtgtctgagcggccaccctactcttacatggccatgatacaattcgccatcaacagcactgagaggaagcgcatgactttgaaagacatctatacgtggattgaggaccactttccctactttaagcacattgccaagccaggctggaagaactccatccgccacaacctttccctgcacgacatgtttgtccgggagacgtctgccaatggcaaggtctccttctggaccattcaccccagtgccaaccgctacttgacattggaccaggtgtttaagccactggacccagggtctccacaattgcccgagcacttggaatcacagcagaaacgaccgaatccagagctccgccggaacatgaccatcaaaaccgaactccccctgggcgcacggcggaagatgaagccactgctaccacgggtcagctcatacctggtacctatccagttcccggtgaaccagtcactggtgttgcagccctcggtgaaggtgccattgcccctggcggcttccctcatgagctcagagcttgcccgccatagcaagcgagtccgcattgcccccaaggtgctgctagctgaggaggggatagctcctctttcttctgcaggaccagggaaagaggagaaactcctgtttggagaagggttttctcctttgcttccagttcagactatcaaggaggaagaaatccagcctggggaggaaatgccacacttagcgagacccatcaaagtggagagccctcccttggaagagtggccctccccggccccatctttcaaagaggaatcatctcactcctgggaggattcgtcccaatctcccaccccaagacccaagaagtcctacagtgggcttaggtccccaacccggtgtgtctcggaaatgcttgtgattcaacacagggagaggagggagaggagccggtctcggaggaaacagcatctactgcctccctgtgtggatgagccggagctgctcttctcagaggggcccagtacttcccgctgggccgcagagctcccgttcccagcagactcctctgaccctgcctcccagctcagctactcccaggaagtgggaggaccttttaagacacccattaaggaaacgctgcccatctcctccaccccgagcaaatctgtcctccccagaacccctgaatcctggaggctcacgcccccagccaaagtagggggactggatttcagcccagtacaaacctcccagggtgcctctgaccccttgcctgaccccctggggctgatggatctcagcaccactcccttgcaaagtgctcccccccttgaatcaccgcaaaggctcctcagttcagaacccttagacctcatctccgtcccctttggcaactcttctccctcagatatagacgtccccaagccaggctccccggagccacaggtttctggccttgcagccaatcgttctctgacagaaggcctggtcctggacacaatgaatgacagcctcagcaagatcctgctggacatcagctttcctggcctggacgaggacccactgggccctgacaacatcaactggtcccagtttattcctgagctacagtagagccctgcccttgcccctgtgctcaagctgtccaccatcccgggcactccaaggctcagtgcaccccaagcctctgagtgaggacagcaggcagggactgttctgctcctcatagctccctgctgcctgattatgcaaaagtagcagtcacaccctagccactgctgggaccttgtgttccccaagagtatctgattcctctgctgtccctgccaggagctgaagggtgggaacaacaaaggcaatggtgaaaagagattaggaaccccccagcctgtttccattctctgcccagcagtctcttaccttccctgatctttgcagggtggtccgtgtaaatagtataaattctccaaattatcctctaattataaatgtaagcttatttccttagatcattatccagagactgccagaaggtgggtaggatgacctggggtttcaattgacttctgttccttgcttttagttttgatagaagggaagacctgcagtgcacggtttcttccaggctgaggtacctggatcttgggttcttcactgcagggacccagacaagtggatctgcttgccagagtcctttttgcccctccctgccacctccccgtgtttccaagtcagctttcctgcaagaagaaatcctggttaaaaaagtcttttgtattgggtcaggagttgaatttggggtgggaggatggatgcaactgaagcagagtgtgggtgcccagatgtgcgctattagatgtttctctgataatgtccccaatcataccagggagactggcattgacgagaactcaggtggaggcttgagaaggccgaaagggcccctgacctgcctggcttccttagcttgcccctcagctttgcaaagagccaccctaggccccagctgaccgcatgggtgtgagccagcttgagaacactaactactcaataaaagcgaaggtggacaaaaaaaaaaaaaaaa

SEQ ID NO: 210324 - DNA, 3315 bp, Artificial Sequence
  derived and/or modified sequence
cggcggcgactgcagtctggagggtccacacttgtgattctcaatggagagtgaaaacgcagattcataatgaaaactagcccccgtcggccactgattctcaaaagacggaggctgccccttcctgttcaaaatgccccaagtgaaacatcagaggaggaacctaagagatcccctgcccaacaggagtctaatcaagcagaggcctccaaggaagtggcagagtccaactcttgcaagtttccagctgggatcaagattattaaccaccccaccatgcccaacacgcaagtagtggccatccccaacaatgctaatattcacagcatcatcacagcactgactgccaagggaaaagagagtggcagtagtgggcccaacaaattcatcctcatcagctgtgggggagccccaactcagcctccaggactccggcctcaaacccaaaccagctatgatgccaaaaggacagaagtgaccctggagaccttgggaccaaaacctgcagctagggatgtgaatcttcctagaccacctggagccctttgcgagcagaaacgggagacctgtgcagatggtgaggcagcaggctgcactatcaacaatagcctatccaacatccagtggcttcgaaagatgagttctgatggactgggctcccgcagcatcaagcaagagatggaggaaaaggagaattgtcacctggagcagcgacaggttaaggttgaggagccttcgagaccatcagcgtcctggcagaactctgtgtctgagcggccaccctactcttacatggccatgatacaattcgccatcaacagcactgagaggaagcgcatgactttgaaagacatctatacgtggattgaggaccactttccctactttaagcacattgccaagccaggctggaagaactccatccgccacaacctttccctgcacgacatgtttgtccgggagacgtctgccaatggcaaggtctccttctggaccattcaccccagtgccaaccgctacttgacattggaccaggtgtttaagccactggacccagggtctccacaattgcccgagcacttggaatcacagcagaaacgaccgaatccagagctccgccggaacatgaccatcaaaaccgaactccccctgggcgcacggcggaagatgaagccactgctaccacgggtcagctcatacctggtacctatccagttcccggtgaaccagtcactggtgttgcagccctcggtgaaggtgccattgcccctggcggcttccctcatgagctcagagcttgcccgccatagcaagcgagtccgcattgcccccaaggtgctgctagctgaggaggggatagctcctctttcttctgcaggaccagggaaagaggagaaactcctgtttggagaagggttttctcctttgcttccagttcagactatcaaggaggaagaaatccagcctggggaggaaatgccacacttagcgagacccatcaaagtggagagccctcccttggaagagtggccctccccggccccatctttcaaagaggaatcatctcactcctgggaggattcgtcccaatctcccaccccaagacccaagaagtcctacagtgggcttaggtccccaacccggtgtgtctcggaaatgcttgtgattcaacacagggagaggagggagaggagccggtctcggagaaaacagcatctactgcctccctgtgtggatgagccggagctgctcttctcagaggggcccagtacttcccgctgggccgcagagctcccgttcccagcagactcctctgaccctgcctcccagctcagctactcccaggaagtgggaggaccttttaagacacccattaaggaaacgctgcccatctcctccaccccgagcaaatctgtcctccccagaacccctgaatcctggaggctcacgcccccagccaaagtagggggactggatttcagcccagtacaaacctcccagggtgcctctgaccccttgcctgaccccctggggctgatggatctcagcaccactcccttgcaaagtgctcccccccttgaatcaccgcaaaggctcctcagttcagaacccttagacctcatctccgtcccctttggcaactcttctccctcagatatagacgtccccaagccaggctccccggagccacaggtttctggccttgcagccaatcgttctctgacagaaggcctggtcctggacacaatgaatgacagcctcagcaagatcctgctggacatcagctttcctggcctggacgaggacccactgggccctgacaacatcaactggtcccagtttattcctgagctacagtagagccctgcccttgcccctgtgctcaagctgtccaccatcccgggcactccaaggctcagtgcaccccaagcctctgagtgaggacagcaggcagggactgttctgctcctcatagctccctgctgcctgattatgcaaaagtagcagtcacaccctagccactgctgggaccttgtgttccccaagagtatctgattcctctgctgtccctgccaggagctgaagggtgggaacaacaaaggcaatggtgaaaagagattaggaaccccccagcctgtttccattctctgcccagcagtctcttaccttccctgatctttgcagggtggtccgtgtaaatagtataaattctccaaattatcctctaattataaatgtaagcttatttccttagatcattatccagagactgccagaaggtgggtaggatgacctggggtttcaattgacttctgttccttgcttttagttttgatagaagggaagacctgcagtgcacggtttcttccaggctgaggtacctggatcttgggttcttcactgcagggacccagacaagtggatctgcttgccagagtcctttttgcccctccctgccacctccccgtgtttccaagtcagctttcctgcaagaagaaatcctggttaaaaaagtcttttgtattgggtcaggagttgaatttggggtgggaggatggatgcaactgaagcagagtgtgggtgcccagatgtgcgctattagatgtttctctgataatgtccccaatcataccagggagactggcattgacgagaactcaggtggaggcttgagaaggccgaaagggcccctgacctgcctggcttccttagcttgcccctcagctttgcaaagagccaccctaggccccagctgaccgcatgggtgtgagccagcttgagaacactaactactcaataaaagcgaaggtggac

SEQ ID NO: 210325 - DNA, 2292 bp, Artificial Sequence
  derived and/or modified sequence
atgaagacctcacctaggagaccccttattttaaaaagaaggcgacttcccctccctgtacaaaacgcgccatctgaaacatctgaggaagaacccaaacggtccccggcccagcaagaaagcaatcaagcagaggcatcgaaggaggtcgccgaaagtaactcatgtaagttccccgccggcatcaaaattataaaccaccccacgatgccaaatacgcaggtcgtggcaattcctaacaacgccaatatacattccattatcaccgcccttacagccaaggggaaagagtctggttcatccggcccaaacaagtttattcttatctcttgcggcggggcaccgactcaaccgccaggccttcggcctcaaacccagacttcatacgacgccaagagaacagaagtgactctcgagacccttggcccaaaacctgctgccagagacgtcaacttaccgagaccccccggggctctgtgtgaacagaaacgcgagacgtgcgctgacggggaagccgcagggtgcacgattaataactccctaagtaatattcagtggctgaggaaaatgtcgagcgatggccttggaagccggtctattaagcaggagatggaagagaaggagaactgccacttggagcagcgccaggtgaaagtagaggagccttccagaccaagcgctagttggcagaacagcgtctctgagcgacccccttatagctacatggccatgattcagttcgcgatcaatagcacggagagaaaacggatgaccctgaaggatatttatacatggatagaggatcattttccatatttcaaacatattgctaagccgggctggaaaaactctatccggcacaacctatctctccacgatatgttcgttcgagaaacctcagcaaacggcaaagtgtctttttggaccattcacccatcagccaacaggtatttgactctggaccaggtttttaaaccccttgatcccggctcacctcagctgcccgaacacttggagagccagcagaaacgaccaaaccccgaactgaggcggaacatgactatcaagactgagcttccactcggagccagacgcaagatgaagccacttctccctcgggtgagtagttacctcgtgcctatccaatttcccgtaaaccagagcctggtgctccaaccaagtgtgaaagtccccctgcccctcgcggcctctttgatgagctcagagttggcaaggcactccaagcgagttagaattgcacctaaagtcctcctggctgaggaaggtattgctcctctgtccagtgctgggcctggcaaggaagaaaagctgctgtttggagagggcttcagcccactgctgccagtacaaaccatcaaggaagaagagatccagccaggtgaggagatgccgcacttggcacgccctattaaagtagaatctccacctctggaggagtggccttcaccagcgccctcattcaaggaggagtcttcccacagttgggaggattcttcccagtcccccacaccccgacctaagaagagctacagcggccttcggagtcccacaagatgcgtgtcagagatgctggttatccagcaccgcgagagacgagagaggagcaggtctcggagaaaacagcacctcttgccaccatgtgtcgacgagcctgagcttctcttctctgaaggcccttccacaagtaggtgggccgccgaactgccttttcctgccgacagtagtgaccccgcatcacaactcagctattcccaggaggtgggcgggccgttcaaaacgcccatcaaagagactctccccatcagctccactccctccaagagtgtgttacctaggactcctgaaagctggaggctgaccccacccgctaaggttggcgggctagactttagcccagtccagaccagccagggtgcgagcgatccactccctgaccctcttgggctcatggatctgagcaccactccactacagagtgctccgcccttggagtcaccccagcgactcctgtctagcgagcctctggatctaatttccgtgccattcgggaatagctccccatcagacatcgatgtgcctaaacctggttcccctgaaccacaagtctccggcttggccgccaatcgttctctgacggaaggtttagttctagatactatgaacgacagcctgagcaagattctcttggacatttcctttccgggacttgacgaggacccgctaggaccagataacattaactggtcccagttcatcccggaactgcagtag

SEQ ID NO: 210326 - DNA, 2292 bp, Artificial Sequence
  derived and/or modified sequence
atgaagaccagcccccggcggcccctcatcctgaagagaagaaggctgcccctgcctgtgcagaatgcccccagcgagaccagcgaggaggagcccaagaggagccctgcccagcaggagagcaaccaggccgaggccagcaaggaggtggccgagagcaacagctgcaagtttcctgctggcatcaagatcatcaaccaccccaccatgcccaacacccaggtggtggccatccccaacaatgccaacatccacagcatcatcacagccctgacagccaagggcaaggagagcggcagcagcggccccaacaagttcatcctgatcagctgtggcggggcccccacccagcccccaggcctgcggccccagacccagaccagctatgatgccaagaggacagaggtgaccctggagaccctgggccccaagccagctgccagagatgtgaacctgcccaggcctcctggggccctgtgtgagcagaagcgggagacctgtgctgatggagaggccgccggctgcaccatcaacaacagcctgagcaacatccagtggctgaggaagatgagcagtgatggcctgggcagccgcagcatcaagcaggagatggaggagaaggagaactgccacctggagcagaggcaggtgaaggtggaggagcccagccggcccagcgcctcctggcagaacagcgtgtctgagaggcctccctacagctacatggccatgatccagtttgccatcaacagcacagagaggaagaggatgaccctgaaggacatctacacctggattgaggaccacttcccctacttcaagcacatcgccaagccaggctggaagaacagcatccgccacaacctgagcctgcatgacatgtttgtgcgggagaccagcgccaacgggaaggtgtccttctggaccatccaccccagcgccaaccgctacctgaccctggaccaggtgttcaagcccctggaccccggcagcccccagctgcctgagcacctggagagccagcagaagaggcccaaccctgagctgcggaggaacatgaccatcaagacagagctgcccctgggcgcccggaggaagatgaagcccctgctgccccgggtgagcagctacctggtgcccatccagtttcctgtgaaccagagcctggtgctgcagcccagcgtgaaggtgcccctgcccctggccgccagcctgatgagcagcgagctggcccggcacagcaagagggtgagaattgcccccaaggtgctgctggccgaggagggcatcgcccccctgagcagcgctggccctgggaaggaggagaagctgctgtttggagagggcttcagccccctgctgcctgtgcagaccatcaaggaggaggagatccagcccggggaggagatgccccacctggcccggcccatcaaggtggagagcccccccctggaggagtggcccagccctgcccccagcttcaaggaggagagcagccacagctgggaggacagcagccagagccccaccccccggcccaagaagagctacagcggcctgcggagccccacccgctgtgtgtctgagatgctggtgatccagcaccgggagcggcgggagaggagccgcagcaggaggaagcagcacctgctgcccccctgtgtggatgagcctgagctgctcttcagcgagggccccagcaccagccgctgggccgctgagctgcccttccctgctgacagcagtgaccctgccagccagctgagctacagccaggaggtgggcggccccttcaagacccccatcaaggagaccctgcccatcagcagcacccccagcaagtctgtgctgcccaggaccccagagagctggaggctgaccccaccagccaaggtgggcggcctggacttcagccctgtgcagaccagccagggcgccagtgaccccctgcctgaccccctgggcctgatggacctgagcaccacccccctgcagagcgccccacccctggagagcccccagaggctgctgagcagcgagcccctggacctgatctctgtgccctttggaaacagcagccccagcgacattgatgtgcccaagccaggcagccctgagccccaggtgtctggcctggccgccaacagaagcctgacagagggcctggtgctggacaccatgaatgacagcctgagcaagatcctgctggacatctccttccctggcctggatgaggaccccctgggccctgacaacatcaactggagccagttcatccctgagctgcagtag

SEQ ID NO: 210327 - DNA, 2292 bp, Artificial Sequence
  derived and/or modified sequence
atgaagaccagcccccggcggcccctgatcctgaagcggcggcggctcccattaccggtgcagaatgctccttccgagacctctgaagaggaaccaaagcggtcacctgctcaacaagagtccaatcaggccgaagcaagtaaggaggtggccgaaagcaactcatgtaaattcccagcaggcatcaagattatcaaccaccctaccatgcctaacactcaggttgttgcgatccctaacaatgcgaacatccatagtattattacagcactgaccgccaagggaaaggagtcaggcagctctggtcctaacaagtttatcctgatctcatgcggcggcgcgcccactcagcctcccgggttgagaccccagacccagacgtcttatgacgccaagcgtactgaggtcacattagaaacgttagggccgaagcccgctgctcgcgacgttaaccttcctaggcctcccggcgcgttatgcgaacagaagagggaaacctgtgcagatggagaggcagccggctgcacaattaacaacagcctcagtaatatccagtggctgcggaaaatgtcttccgatggcctgggctccaggtccatcaagcaggaaatggaagagaaagaaaattgccatttggaacaacggcaggttaaagtggaagagccttctcgcccttctgcgtcctggcaaaattctgtgtcggaacgacctccctacagttacatggctatgatacagttcgcaattaactccaccgaaaggaagcgaatgaccctgaaagacatctacacctggatagaagaccactttccgtattttaagcacattgcgaaacctggatggaagaactccattcgccacaatctttccctgcacgacatgttcgtcagagaaacaagcgccaacggcaaagtttccttttggaccattcacccttccgccaaccgatacctgacgctggatcaggtgtttaagccacttgatcccggatctcctcaattgcctgagcatcttgagtcccagcagaagcggcctaatcccgagttaaggcgcaacatgaccatcaaaacggaattacctttgggagccaggagaaagatgaagccactccttccccgcgtgagctcatatctcgtgcctattcagtttccagtaaaccaatccttggtgctacagccctctgtgaaggtacccttgcctttggctgctagcctcatgtcttccgaattggctaggcacagcaaacgcgtccgtatcgcccctaaggtgctgctggccgaggaaggaatcgcccctttatcatctgcaggaccgggaaaagaagaaaaactgctgttcggggagggattttcccctctcctccccgttcagacaatcaaggaagaagaaattcagcctggtgaagagatgcctcacttggcacgacccatcaaggtggagagtccacctttggaggaatggccttcacccgccccttcgttcaaggaagagagctctcactcttgggaagatagttcccagtctccgactccgcgccccaaaaaatcttatagtggcctgagatctcccacaaggtgtgtatctgagatgctggtgatacagcatcgagaaagaagagagcgcagcagatcacggaggaaacagcatttgcttcccccttgtgtggatgaacctgaactgctgttctccgaaggaccaagcacttcccgctgggcagcagaacttccctttccggccgatagcagcgatccggctagccagctttcatactcacaggaagtggggggtcccttcaagaccccaatcaaagagacactcccaatcagtagcaccccctcaaagagtgtcttaccccggaccccggagtcttggcggctgacccccccagccaaggtgggtggccttgacttctcccccgtgcagacgagccagggtgctagtgacccactgcctgatccactcggcctcatggacctgtccacgactcccctccagtcagcacctccactcgagagtccacaaaggctgctgtcgtctgaacccctggatctgatcagcgtgccattcgggaattctagtccaagcgacatcgatgtaccaaaacccggctcaccagaaccgcaggtttccggactggcagcaaacagatccctgaccgaaggcctcgttctggatacgatgaatgactccttgtccaagatcttgctggatatcagctttccgggcctggatgaggacccgctcgggccagataacatcaattggtcacagttcattccagaactgcagtag

SEQ ID NO: 210328 - DNA, 2292 bp, Artificial Sequence
  derived and/or modified sequence
atgaaaacatcccccagaaggccccttatcctaaaacggagacggcttcccctgcccgtgcaaaatgcgccttctgaaacgtctgaggaggagcctaaaagatcccctgcacagcaggaaagcaatcaggctgaggcatccaaggaggtagctgaatctaactcttgcaaatttcccgcaggaattaaaatcatcaaccacccgacaatgccaaatacacaggtagtcgccattcccaataatgcaaatattcactctatcattaccgccttgacagctaaaggaaaggaaagcggctcttccggcccaaacaaattcatacttatctcctgtggaggtgccccaactcagcctcccggattgaggccccaaacccagacttcctatgatgcgaaacgcaccgaagtgacattagaaacactgggtcctaagccagctgcgagggatgtcaatctgccaagaccgcctggggcactgtgcgagcagaagagagaaacctgcgcggacggtgaggcagcaggctgcacaattaacaattccctcagtaacattcagtggttgcggaagatgagtagtgatggtctcggctctcggtcaattaagcaggaaatggaagaaaaagaaaactgccacttggagcagcgacaagttaaggtcgaggaaccctcaagacctagcgcctcatggcagaattccgtttcagaaaggcccccatatagctatatggcaatgatccagttcgctataaactctacggagcgcaaaagaatgaccctaaaggacatttacacttggatcgaggatcatttcccctactttaagcatatcgcaaaacccggatggaaaaattcaatcaggcacaacttgtccctgcatgacatgtttgttcgggagacgtcagctaatggtaaggtgtccttttggaccattcatccaagcgcaaataggtacttgacacttgaccaagtgttcaaacccctggaccctggttcacctcagctcccagagcacttagaatctcagcagaagcgtcccaatcccgagctgcgtaggaacatgacaatcaagacggaactgccgctgggtgccaggcgcaagatgaagcctctgctcccgagagttagctcctacctggtgcccattcaattccccgttaatcagagtctggtgctgcaaccaagcgtcaaggtacccttgcccttggccgcttcgctcatgagcagcgagctggccaggcactccaaacgcgtcaggatcgccccaaaggttctattagctgaggagggtattgcacccctgagtagcgccggacccggtaaagaagagaagttgctgtttggcgagggcttttcgcctcttctgcctgttcagacgattaaagaggaggaaatacagcccggtgaagaaatgccacacctagcgaggcctatcaaggttgagagcccgccacttgaagaatggccctctcctgccccttcctttaaggaggagagcagccactcctgggaggacagcagtcagtcaccgactccacggccaaaaaagtcatacagcggtctcagatctcccaccaggtgcgtttctgagatgctcgtcatccagcatcgtgaacgaagggaaagatcgcggagcaggagaaaacaacatctgctgcctccatgcgtcgacgaacctgaactgcttttttctgaaggcccaagcacttcaagatgggctgcagaactgccatttcccgcagattccagcgacccggcatctcagctgtcctacagtcaggaggttggcggtccatttaaaactcccataaaagagacccttcccatcagtagcaccccatctaaatctgttctgcctcgcaccccggaatcctggagacttacccccccagccaaagtgggaggtctggatttcagccccgtccaaacaagccagggtgcaagcgatcccctgcctgacccattagggctcatggacctgagcaccactccgcttcagtccgcccctcctctggaatccccacagaggctgctctcatccgaacctttggatcttatttctgttccgtttggtaatagcagtccatcggacatagatgttcccaagccaggatccccagaaccacaggtaagtggactggccgctaaccgttctcttactgagggcctggtgctggatacaatgaacgatagtctctcaaagatcctgttagatataagttttcctggcctcgatgaagacccactgggccctgacaatatcaactggtcacagtttatccctgagttgcaatag

SEQ ID NO: 210329 - DNA, 2292 bp, Artificial Sequence
  derived and/or modified sequence
atgaagaccagccccagaagacccctgatcctgaagagaagaagactgcccctgcccgtgcagaacgcccccagcgagaccagcgaggaggagcccaagagaagccccgcccagcaggagagcaaccaggccgaggccagcaaggaggtggccgagagcaacagctgcaagttccccgccggcatcaagatcatcaaccaccccaccatgcccaacacccaggtggtggccatccccaacaacgccaacatccacagcatcatcaccgccctgaccgccaagggcaaggagagcggcagcagcggccccaacaagttcatcctgatcagctgcggcggcgcccccacccagccccccggcctgagaccccagacccagaccagctacgacgccaagagaaccgaggtgaccctggagaccctgggccccaagcccgccgccagagacgtgaacctgcccagaccccccggcgccctgtgcgagcagaagagagagacctgcgccgacggcgaggccgccggctgcaccatcaacaacagcctgagcaacatccagtggctgagaaagatgagcagcgacggcctgggcagcagaagcatcaagcaggagatggaggagaaggagaactgccacctggagcagagacaggtgaaggtggaggagcccagcagacccagcgccagctggcagaacagcgtgagcgagagacccccctacagctacatggccatgatccagttcgccatcaacagcaccgagagaaagagaatgaccctgaaggacatctacacctggatcgaggaccacttcccctacttcaagcacatcgccaagcccggctggaagaacagcatcagacacaacctgagcctgcacgacatgttcgtgagagagaccagcgccaacggcaaggtgagcttctggaccatccaccccagcgccaacagatacctgaccctggaccaggtgttcaagcccctggaccccggcagcccccagctgcccgagcacctggagagccagcagaagagacccaaccccgagctgagaagaaacatgaccatcaagaccgagctgcccctgggcgccagaagaaagatgaagcccctgctgcccagagtgagcagctacctggtgcccatccagttccccgtgaaccagagcctggtgctgcagcccagcgtgaaggtgcccctgcccctggccgccagcctgatgagcagcgagctggccagacacagcaagagagtgagaatcgcccccaaggtgctgctggccgaggagggcatcgcccccctgagcagcgccggccccggcaaggaggagaagctgctgttcggcgagggcttcagccccctgctgcccgtgcagaccatcaaggaggaggagatccagcccggcgaggagatgccccacctggccagacccatcaaggtggagagcccccccctggaggagtggcccagccccgcccccagcttcaaggaggagagcagccacagctgggaggacagcagccagagccccacccccagacccaagaagagctacagcggcctgagaagccccaccagatgcgtgagcgagatgctggtgatccagcacagagagagaagagagagaagcagaagcagaagaaagcagcacctgctgcccccctgcgtggacgagcccgagctgctgttcagcgagggccccagcaccagcagatgggccgccgagctgcccttccccgccgacagcagcgaccccgccagccagctgagctacagccaggaggtgggcggccccttcaagacccccatcaaggagaccctgcccatcagcagcacccccagcaagagcgtgctgcccagaacccccgagagctggagactgaccccccccgccaaggtgggcggcctggacttcagccccgtgcagaccagccagggcgccagcgaccccctgcccgaccccctgggcctgatggacctgagcaccacccccctgcagagcgccccccccctggagagcccccagagactgctgagcagcgagcccctggacctgatcagcgtgcccttcggcaacagcagccccagcgacatcgacgtgcccaagcccggcagccccgagccccaggtgagcggcctggccgccaacagaagcctgaccgagggcctggtgctggacaccatgaacgacagcctgagcaagatcctgctggacatcagcttccccggcctggacgaggaccccctgggccccgacaacatcaactggagccagttcatccccgagctgcagtag

SEQ ID NO: 210330 - protein, 435 aa, Artificial Sequence
  derived and/or modified sequence
MGDWSFLGRLLENAQEHSTVIGKVWLTVLFIFRILVLGAAAEDVWGDEQSDFTCNTQQPGCENVCYDRAFPISHIRFWALQIIFVSTPTLIYLGHVLHIVRMEEKKKEREEEEQLKRESPSPKEPPQDNPSSRDDRGRVRMAGALLRTYVFNIIFKTLFEVGFIAGQYFLYGFELKPLYRCDRWPCPNTVDCFISRPTEKTIFIIFMLAVACASLLLNMLEIYHLGWKKLKQGVTSRLGPDASEAPLGTADPPPLPPSSRPPAVAIGFPPYYAHTAAPLGQARAVGYPGAPPPAADFKLLALTEARGKGQSAKLYNGHHHLLMTEQNWANQAAERQPPALKAYPAASTPAAPSPVGSSSPPLAHEAEAGAAPLLLDGSGSSLEGSALAGTPEEEEQAVTTAAQMHQPPLPLGDPGRASKASRASSGRARPEDLAI

SEQ ID NO: 210331 - DNA, 1308 bp, Artificial Sequence
  derived and/or modified sequence
atgggtgactggagctttctggggcgcctcttagaaaacgcccaggaacattcaactgttatcggcaaggtgtggctcactgtgctctttatcttcagaatcttagtgctgggcgccgctgccgaagatgtttggggagatgagcagagtgatttcacttgtaacacacagcaacccggatgcgagaacgtctgctatgacagagccttcccaatcagtcatatccgattctgggcactgcagatcatttttgtttcaacccctaccttgatttacttaggccacgttctccacattgtgagaatggaggagaagaaaaaggagcgcgaggaggaagaacagctcaagcgggagtcaccttcacccaaagaacctccccaggataaccccagctccagggacgacagaggccgtgttcggatggcaggcgcattgctcagaacttacgtatttaacatcatttttaagactctgttcgaagtaggattcatcgctggccagtatttcctgtatgggtttgagctcaagcccctgtaccggtgcgataggtggccttgtccaaacacagtagactgtttcatttcccgtcccactgaaaagacaattttcatcatatttatgctcgcagtggcctgtgcctccctgctgttaaacatgctggagatctaccacttaggctggaagaagttaaagcagggggtgacatcccggttaggtcctgacgcctctgaggcacctctgggaaccgcggatcccccccccctcccaccctcgagtcgccctcccgcagtcgcgattgggttccccccgtactacgcccacaccgcagctcccctggggcaggcaagagcagtgggataccccggtgcacctccacccgccgcagactttaaactgctcgccttgacagaagccagaggcaagggccaaagtgccaagctctacaacggtcatcaccacctgcttatgacagagcagaattgggccaatcaagccgctgaacgtcagccccccgcattgaaggcatacccggccgcctcaacccctgctgccccatccccagtgggatcttcgtctccaccactcgcccatgaagcggaggctggggccgcgcccctcttgttggatggcagtgggtcatcattagaaggaagcgcacttgctggtacacccgaagaggaagagcaagccgtgactactgctgcacagatgcaccagccaccgctccccttaggagatccaggtcgcgccagcaaagctagccgcgcttctagcggccgggcacgccccgaggacttagcaatatag

SEQ ID NO: 210332 - DNA, 5211 bp, Artificial Sequence
  derived and/or modified sequence
cactggggctgcagggatggcgatcagggcggggaggtcgggccctggcgcggggcgcacgcgtgaagcagcaccgcacgtgtgaaaggaattcttttcagagcggccgggagccctgctccggaggaacgcacccgggtcgccgccgcggcagagcggggttaggaatctgaagcaatgggcgactggagctttctgggaagactcttagaaaatgcacaggagcactccacggtcatcggcaaggtttggctgaccgtgctgttcatcttccgcatcttggtgctgggggccgcggcggaggacgtgtggggcgatgagcagtcagacttcacctgcaacacccagcagccgggctgcgagaacgtctgctacgacagggccttccccatctcccacatccgcttctgggcgctgcagatcatcttcgtgtccacgcccaccctcatctacctgggccacgtgctgcacatcgtgcgcatggaagagaagaagaaagagagggaggaggaggagcagctgaagagagagagccccagccccaaggagccaccgcaggacaatccctcgtcgcgggacgaccgcggcagggtgcgcatggccggggcgctgctgcggacctacgtcttcaacatcatcttcaagacgctgttcgaggtgggcttcatcgccggccagtactttctgtacggcttcgagctgaagccgctctaccgctgcgaccgctggccctgccccaacacggtggactgcttcatctccaggcccacggagaagaccatcttcatcatcttcatgctggcggtggcctgcgcgtccctgctgctcaacatgctggagatctaccacctgggctggaagaagctcaagcagggcgtgaccagccgcctcggcccggacgcctccgaggccccgctggggacagccgatcccccgcccctgccccccagctcccggccgcccgccgttgccatcgggttcccaccctactatgcgcacaccgctgcgcccctgggacaggcccgcgccgtgggctaccccggggccccgccaccagccgcggacttcaaactgctagccctgaccgaggcgcgcggaaagggccagtccgccaagctctacaacggccaccaccacctgctgatgactgagcagaactgggccaaccaggcggccgagcggcagcccccggcgctcaaggcttacccggcagcgtccacgcctgcagcccccagccccgtcggcagcagctccccgccactcgcgcacgaggctgaggcgggcgcggcgcccctgctgctggatgggagcggcagcagtctggaggggagcgccctggcagggacccccgaggaggaggagcaggccgtgaccaccgcggcccagatgcaccagccgcccttgcccctcggagacccaggtcgggccagcaaggccagcagggccagcagcgggcgggccagaccggaggacttggccatctagtgcccgggtgcctgcctccagacagctgtgtagtgatctttttcttagaaaccaaaaccaaagtgcacttcccaccagcagatagaacctgaaagtcccaggaggtgggagcgactggagtcccaggaggtggacgatggaggagagatcaggtttccgtgttcaatgcttgctgttcttagcactgtgagttacagtggggataactcccactttctgagtttgggggtggcggggacaagggttgtgggcctttaagatcttcacagcagcccagaaatctggtcgctgagggctgtctctgggggtaactgttctgtagtggtaaagcaacaggtatcctgcagtccctttagctcctgggcaattgggtttgctattcctaagctctccagagcctctgggcggcccagagggtcttagctctgggccagagcacttagctctatctctttgatacttttaacttagagttgaatttcatttgggatatttgccaaactgcactaaaaaaagatttacagcaagtctatgtagtgtcatttgagtttccgaaattgcatgtgaagcccaggatatcaagcttcaggcctcatgacaagtgacaaagagcagttgccctccagaggcaggctcagtgggcaagggccccagaggttgctggcagaaggcaggtggaaacgcagccacgcctgaggccatttttaaacagttgaggaaattgacataaaagtgtgtcgggtatgccgtaggtatttattttctaaatgattattttgtgctttgaatggtgcagctatgcctattttctcccactttctttcaggaaaaatgaaagaaaaatagtgtttttctttctttaaatactgttagaatgattgctgaccaagacagtgctaatttgccctaatgcatgctactagcatctttactaaagattttgaactttcttgtaaaagaaattctttaatttcatgagtcacctaattataatgagaatgtattatataaaacaaaagcaggggaaagttttaagtgcattcaaatagaagttctgaagattttgaatgggaagtgaaaagtgaactactgttgccaggaaaattatttatacagatgaatctatgacaatctacacttttaaaaagtacagaataaaacacttcaagcttcctaatcattctttgtgggcagcctgtttgctttctccagtgtaaataatataagtgtctggggatccctgcctgggggagggcgcgtgctcatgcaggctgtatgccccattctgcctccacaccagagctgtcctgacagggaaggctatttatgtgtgtgggcatggctggaagacggcagaattttctgtcctgcacacacagctgtagtatcttggtcaccatttgtttataaaatgaacgatggtcatgttgagcctgtttctactcacacttttcacctccaacttctactgagtatcattagcccttgttcagcgagaccaatgtaatacatttctttttataaattaacttctcgatgatgcatttgggaccacactccaaacatactttctgttttctatcataaagggtgctccactaacaatctgatgaaaggaatgcaatttccaagtctcagattcttgcatgcaactagtttttcatgtcagtcaaacacaaagaatttgttagtacattctgcttgctgtaggatgcactggacaggctcctaggcttgaaaaatgctaacttttccatacgtctcctcagagactttctcaaccagattgacaagagagaaattagccctttggaaaactgtgagtgactttctcactcctctccaggctggtgcataactacagccattctagatgcataacttctctccgaagttcactcattacatgcagtgtatgccataggcctagggcagcaggacttagttcttgtgagtgataagggctgctagaagatcctagtgtgagaagcattccgataaaaagctttggccattttagaaaatgcaatagcaatcatccaagagcacaagtacagctcaagtacaagtggatgtcaatacttggttctttaagttctaccataataaatgttcataacagtaacaagcttcttatttacccacaatttgattttgagtggggttggagatgagcatgagaactcaaattgtatctagtttttacattttaaaattgaatttagtcacaatatgtttatggaaatgccagtattgtaccattgaccatagtctagtgggtccatttagagtggataggagtgtagaattagattcacctacttgaaaatcactaatctataaagaagtgaggttttgcaatagaacagtgcctgtggtgttttttcaggttagcatactgatttcagttcatgtaagaaatgaacgcatgtttcacatccttttgctctttgaggtatccatgattctaaaggctgggtccttctctctcaggcagtgtggaattgttctctactcaactagtcctttaagacattgaaacatgcaataaaaatagaaattgcctctctctgtgggcaagattccagacctatttttttctagcctggaaatttcactgaaactattttgttcttgattcattagaaagttttaaaaaatctctaagcctattttaaaactcaaatgctatacctatagcatttgagtattatatttacatacatggtttttaagctgctgtatacaattacttcttatatccctgtttttataaaatgttaaacatcactatagttacagtaccaaaaatcattttttaaattctaaaactattacttatattatcactcactttctcctttttaaacttttaatggttattcttgtattttttaataaaattgacacgaataaatccttaaatttacaaaagaaaaatagcaagccagcatctttctcatttatcctggatttcttcggctctggacaagtaagtggataggtcatagaattcctacacaagaatacctggactaataactatgaatataatttaaacatcactttacaaaaaattaatccaatagggtttaggtctcctttcacgttaggctttttaaaaagtattattaacactttctttattttgtattactgaataaactccttttttctgaattttttgaacttctgatatttgtaacactaattcatgaatctccaccaaaataaatacttatagagagtattgcatgatttaagagagtaaatgtgttttccaaagatgaatagagtcctgccaccatcaccacccgccacccctacaaattgaggatatcctaaataacctttaatatagcatatggacattgtacatttaaggtcagggaaggcacttttcttcctaattttatattacagtgcaaatcttgggttgactcactttaaggtttctgactgcccaaaatattttttcccctttacgttacagaacattataataaggcaaacaagttagggatttgaataacactcaaagcaacaaactgtttccagaaagtaccatatttgaagctgtttggtgtgtaaatgttcatttagctcatgtatttacaaaactcttactaaaacttaatttttgtgccataacagtgtctttcctggattacattgtaactggaagtaagcattttctaaaataataaaagtgcccttaagtttaaa

SEQ ID NO: 210333 - DNA, 1308 bp, Artificial Sequence
  derived and/or modified sequence
atgggagactggagcttcctgggccgcctgctggagaatgcccaggagcacagcacagtgattggcaaggtgtggctgactgtgctcttcatcttccgcatcctggtgctgggcgctgctgctgaagatgtgtggggagatgagcagagcgacttcacctgcaacacccagcagcccggctgtgaaaatgtgtgctatgaccgggccttccccatcagccacatccgcttctgggccctgcagatcatctttgtgtccacccccaccctcatctacctgggccacgtgctgcacatcgtgaggatggaggagaagaagaaggagcgggaggaggaggagcagctgaagcgggagagccccagccccaaggagcccccccaggacaaccccagcagcagagatgaccggggccgggtgaggatggccggggccctgctgcggacctacgtgttcaacatcatcttcaagaccctgtttgaggtgggcttcatcgccggccagtacttcctgtatggctttgagctgaagcccctgtaccgctgtgaccgctggccctgccccaacacagtggactgcttcatcagccggcccacagagaagaccatcttcatcatcttcatgctggccgtggcctgtgccagcctgctgctgaacatgctggagatctaccacctgggctggaagaagctgaagcagggcgtgaccagccggctgggcccagatgccagcgaggcccccctgggcacagctgaccccccacccctgccccccagcagcaggcctcctgctgtggccatcggcttccccccctactatgcccacacagctgcccccctgggccaggcccgggctgtgggctacccaggggcccctcctcctgctgctgacttcaagctgctggccctgacagaggcccggggcaagggccagagcgccaagctgtacaacggccaccaccacctgctgatgacagagcagaactgggccaaccaggccgctgagcggcagcccccagccctgaaggcctacccagctgccagcaccccagctgcccccagccctgtgggcagcagcagcccccccctggcccacgaggccgaggccggggccgcccccctgctgctggatggcagcggcagcagcctggagggcagcgccctggccggcaccccagaggaggaggagcaggccgtgaccacagctgcccagatgcaccagccccccctgcccctgggggaccccggccgggccagcaaggccagccgggccagcagcggccgggcccggcctgaggacctggccatctag

SEQ ID NO: 210334 - DNA, 1308 bp, Artificial Sequence
  derived and/or modified sequence
atgggcgactggagcttcctgggccggctgctggagaacgcccaggaacactcgactgtcattggtaaggtttggctgacagtattattcatattccgcatcctcgtgctcggcgccgcagctgaggacgtctggggagatgaacagagcgacttcacctgtaacacccagcagccggggtgcgagaacgtgtgctatgacagggcattcccgatctcccatatccgattttgggctctccaaatcatcttcgtgtcaacccctaccctcatctacctgggacacgtcctgcacatcgtgcggatggaagaaaagaagaaggaacgcgaggaggaggagcagctgaagcgtgaatccccctcaccaaaagaaccaccccaggataatccttcctctcgcgatgacagagggagggtgagaatggccggtgcgcttctgcggacgtatgtgtttaacattatattcaagaccctgttcgaggtggggttcatcgcggggcagtattttctgtatggctttgagctgaaacctctctaccgctgcgatcgctggccatgcccaaatacagtagattgtttcatttctagacccaccgagaagacgatcttcatcatttttatgctggcagtagcttgcgcatctctcctgttaaatatgctggagatctaccacctagggtggaagaagctgaagcagggcgtgacaagcagactcgggcccgacgcctcagaggctcctttgggtaccgccgacccgcctcccttacctccatccagtcggccgccggccgtcgccatcgggttccctccgtattacgctcataccgccgcaccccttggacaggccagagctgtgggatacccaggcgcacccccgcctgccgcagacttcaagctccttgccctgacagaagcacggggcaagggacaaagtgccaagttgtacaatggacatcaccatcttctcatgacagagcaaaattgggctaatcaggccgctgagcgtcagccccccgcacttaaggcataccccgcggcaagtacaccagccgctccaagtccagtcggcagctcatcccccccactggctcacgaagccgaagcgggggccgcccctctgctcctggatgggtccggatcatccctagaaggtagcgccctcgcaggaacccccgaggaggaggaacaggctgttactacagccgcccagatgcatcagcctccattgccacttggagaccccgggagagcatctaaagcctcgagggcttcatccggcagagctagacctgaggacttagccatatag

SEQ ID NO: 210335 - DNA, 1308 bp, Artificial Sequence
  derived and/or modified sequence
atgggtgattggagcttccttggccgtctcctggagaacgcacaggagcattccaccgtgatagggaaagtatggctgactgttctcttcatcttccggatcctggttcttggggcagctgccgaggacgtgtggggcgatgagcagtctgattttacttgcaacacccagcaaccaggctgtgaaaacgtgtgctacgatcgagcctttccgatttctcatatcagattttgggccctgcagattatttttgtatcaaccccgactcttatttacctgggccacgtgctgcatatcgtgcgcatggaggagaagaagaaggaaagagaagaggaggagcagttaaagcgggagtcccctagccctaaggagccccctcaggacaaccctagcagccgcgatgaccgaggccgagtcaggatggctggggcactcctgcgcacctacgtctttaacataatctttaagaccttatttgaggtcggcttcattgccggtcagtactttctgtatggcttcgaactcaagcccctctaccggtgcgacaggtggccttgcccaaacaccgtagattgttttatctctaggcctacagaaaagactatctttatcatctttatgctggccgtggcttgcgcctcactcctgttgaacatgctggagatctaccatttgggctggaaaaaacttaagcagggcgtgacctcacggcttggaccagacgcctctgaggctccattgggaaccgccgatccccctcctctccctcctagttcccgaccaccggcagtggcaattggttttcccccatactacgcccacacagcagcgccactgggacaagccagagcggttggctatccaggagctcctcctcccgctgccgacttcaagctgctggcccttacggaagctcggggtaaaggccaatcagccaaactatataacggccaccatcacctgctgatgacggagcagaattgggccaatcaggcagccgagagacagccaccagcactgaaagcataccctgctgcaagtacccctgccgcaccttcccccgtggggagcagctccccacccctggcacacgaggcagaggctggcgcagccccactgctgttagatggatctggctcgtcgttggaggggagcgcgttagccggaactccagaagaagaagagcaggcagttactacagctgctcagatgcaccagcccccactaccactaggagatccgggtagagctagcaaggcatcccgggcttcttccggcagagcacggcctgaagaccttgcgatttag

SEQ ID NO: 210336 - DNA, 1308 bp, Artificial Sequence
  derived and/or modified sequence
atgggcgactggagcttcctgggcagactgctggagaacgcccaggagcacagcaccgtgatcggcaaggtgtggctgaccgtgctgttcatcttcagaatcctggtgctgggcgccgccgccgaggacgtgtggggcgacgagcagagcgacttcacctgcaacacccagcagcccggctgcgagaacgtgtgctacgacagagccttccccatcagccacatcagattctgggccctgcagatcatcttcgtgagcacccccaccctgatctacctgggccacgtgctgcacatcgtgagaatggaggagaagaagaaggagagagaggaggaggagcagctgaagagagagagccccagccccaaggagcccccccaggacaaccccagcagcagagacgacagaggcagagtgagaatggccggcgccctgctgagaacctacgtgttcaacatcatcttcaagaccctgttcgaggtgggcttcatcgccggccagtacttcctgtacggcttcgagctgaagcccctgtacagatgcgacagatggccctgccccaacaccgtggactgcttcatcagcagacccaccgagaagaccatcttcatcatcttcatgctggccgtggcctgcgccagcctgctgctgaacatgctggagatctaccacctgggctggaagaagctgaagcagggcgtgaccagcagactgggccccgacgccagcgaggcccccctgggcaccgccgaccccccccccctgccccccagcagcagaccccccgccgtggccatcggcttccccccctactacgcccacaccgccgcccccctgggccaggccagagccgtgggctaccccggcgcccccccccccgccgccgacttcaagctgctggccctgaccgaggccagaggcaagggccagagcgccaagctgtacaacggccaccaccacctgctgatgaccgagcagaactgggccaaccaggccgccgagagacagccccccgccctgaaggcctaccccgccgccagcacccccgccgcccccagccccgtgggcagcagcagcccccccctggcccacgaggccgaggccggcgccgcccccctgctgctggacggcagcggcagcagcctggagggcagcgccctggccggcacccccgaggaggaggagcaggccgtgaccaccgccgcccagatgcaccagccccccctgcccctgggcgaccccggcagagccagcaaggccagcagagccagcagcggcagagccagacccgaggacctggccatctag

SEQ ID NO: 210337 - protein, 46 aa, Artificial Sequence
  derived and/or modified sequence
MPVINIEDLTEKDKLKMEVDQLKKEVTLERMLIPARHLQNQSLMDY

SEQ ID NO: 210338 - protein, 74 aa, Artificial Sequence
  derived and/or modified sequence
MPVINIEDLTEKDKLKMEVDQLKKEVTLERMLVSKCCEEVRDYVEERSGEDPLVKGIPEDKNPFKELKGGCVIS

SEQ ID NO: 210339 - DNA, 141 bp, Artificial Sequence
  derived and/or modified sequence
atgcccgtgatcaacatcgaggacctgaccgagaaggacaagctgaagatggaggtggaccagctgaagaaggaggtgaccctggagagaatgctgatccccgccagacacctgcagaaccagagcctgatggactactag

SEQ ID NO: 210340 - DNA, 141 bp, Artificial Sequence
  derived and/or modified sequence
atgcctgtaattaacattgaagacttaaccgagaaagataaactgaaaatggaggtggatcagctgaagaaagaggtgacactggagaggatgttgatccccgccaggcatttgcagaaccaatccctcatggattattag

SEQ ID NO: 210341 - DNA, 141 bp, Artificial Sequence
  derived and/or modified sequence
atgccggtgattaatatcgaagacctgaccgagaaggacaagcttaagatggaggttgatcaattgaagaaggaggtgacgctggaacggatgctgatccccgctcgtcatctccaaaaccagtctctcatggattattag

SEQ ID NO: 210342 - DNA, 141 bp, Artificial Sequence
  derived and/or modified sequence
atgcctgtgatcaatattgaggatctgaccgagaaggataagctcaagatggaggtcgaccagctgaaaaaggaggtgaccctagagagaatgctgatcccagcacgtcacttgcagaatcagtcccttatggactattag

SEQ ID NO: 210343 - DNA, 731 bp, Artificial Sequence
  derived and/or modified sequence
gaaattggttatcgtgggatatttaaaataaaacaaagaacagtttactttcaggcaaaaagatgccagtaatcaatattgaggacctgacagaaaaggacaaattgaagatggaagttgaccagctcaagaaagaagtgacactggaaagaatgctaatcccagccaggcaccttcaaaaccaatcccttatggactactgaattaaggacagcaagttacacctctgttcctgtcatctgggtgaagccaaaagtagtgacttttagagagagagtgtgggaccactgaggaagagggaaaaaagtgaatctaaattaatgcatatttcaaaagttatgtgaatctgcaagtatcatcctttgaaggaagaaactaacctgacaaatgcttcctggctccagttgaaaataatttgttttactatgtaattaatgagtctgcctagttataaaataatcttaagtcttatatcaaatgttccttggaatttacataaaagcggactaaagatttcatttgaaaaaaaaaaaaacagtaaattggttaaatgacttatggaatggccacttaatagactgacaaaaataaagtagcttagtgttactgtcatgaaagatacactaactgaaaacaaacaagttgaagctaaaagagtttgaataatttgatttcgtgtgtatgtatatatatgtatatttatatatgtatagaacatcacctctctctac

SEQ ID NO: 210344 - DNA, 628 bp, Artificial Sequence
  derived and/or modified sequence
atgaaattggttatcgtgggatatttaaaataaaacaaagaacagtttactttgtaagttaagagctgagggaattgttggctaagactgacttgaaataactccagcaattcatgcatagctgctaaccttctacatcttcagcaggcaaaaagatgccagtaatcaatattgaggacctgacagaaaaggacaaattgaagatggaagttgaccagctcaagaaagaagtgacactggaaagaatgctaatcccagccaggcaccttcaaaaccaatcccttatggactactgaattaaggacagcaagttacacctctgttcctgtcatctgggtgaagccaaaagtagtgacttttagagagagagtgtgggaccactgaggaagagggaaaaaagtgaatctaaattaatgcatatttcaaaagttatgtgaatctgcaagtatcatcctttgaaggaagaaactaacctgacaaatgcttcctggctccagttgaaaataatttgttttactatgtaattaatgagtctgcctagttataaaataatcttaagtcttatatcaaatgttccttggaatttacataaaagcggactaaagatttcatttgaaaaaaaaaaaaa

SEQ ID NO: 210345 - DNA, 1943 bp, Artificial Sequence
  derived and/or modified sequence
gagtgaggcaatgcctcaccctgcttcggctcgcgcacggtgcgcgcacccactgacctgcgcccactgtctggcactccctagtgagatgaacccggtacctcagatggaaatgcagaaatcaccgtcttctgcgtcgctcgcgctgggagctgtagaccggagctgttcctattcggccatcttggctcctccacaattatgatcctcttctgaaatcaggaatacgaccccaagaaatgacaggcaaaaagatgccagtaatcaatattgaggacctgacagaaaaggacaaattgaagatggaagttgaccagctcaagaaagaagtgacactggaaagaatgctaatcccagccaggcaccttcaaaaccaatcccttatggactactgaattaaggacagcaagttacacctctgttcctgtcatctgggtgaagccaaaagtagtgacttttagagagagagtgtgggaccactgaggaagagggaaaaaagtgaatctaaattaatgcatatttcaaaagttatgtgaatctgcaagtatcatcctttgaaggaagaaactaacctgacaaatgcttcctggctccagttgaaaataatttgttttactatgtaattaatgagtctgcctagttataaaataatcttaagtcttatatcaaatgttccttggaatttacataaaagcggactaaagatttcatttgaaaaaaaaaaaaacagtaaattggttaaatgacttatggaatggccacttaatagactgacaaaaataaagtagcttagtgttactgtcatgaaagatacactaactgaaaacaaacaagttgaagctaaaagagtttgaataatttgatttcgtgtgtatgtatatatatgtatatttatatatgtatagaacatcacctctctctacaaggaatgttaagtggtaccttaacaggctatagctgaagccattaaaatattaaggcctgattttttactaaatcattaaacaataatggtgcagataagtgaagagcaagctcaaaaacaacatgaataattcagtccagcaaattattcactgagcactaaagaacacagcctctgttctagatggctgggatacactgaacaaatcagccaaaggtccctgaccccttgaagctcacctagtgcaccaccatgctcaatcattgtagatgagtgtaaagaaaaattacatgtgtatacttctgagaatttagggatggtgataagccaggaatttaataattattcattctcctccacctttactagtcacatttttgggatgaggaaaaagatttaatcaatatgaactctggtgacacccttgacttctgttgccagctgtgttgtgaaccctgggtcttgtctcctttgatgttggaggcagtgtctgctgggaatctttagctggagtgtggccagctgtttttcctttgtctggagatatatccagaaggagtgggaagggtgcaactttcttctttcctacaaagtaaatatgcattggtgtaaagtagagagaatcaaactgaaattatacaacctgaaaatttattgtaataaataaattcctggcatctggagtattctgttttaaaccaaatgagtcatccctttttccttccccttaaggtttccaaatgttgtgaagaagtaagagattacgttgaagaacgatctggcgaggatccactggtaaagggcatcccagaggacaaaaatcccttcaaggagctcaaaggaggctgtgtgatttcataatacaaacaaaaagaaaaaaaattaaacaaattcttggaaatatctcaaatgttaataacaatatgaatttttctcatgcatactattactactaagcatgtacgtgaatttttaaatttatagatgtaaacttttaataaaaattggggtgtggtaa

SEQ ID NO: 210346 - DNA, 141 bp, Artificial Sequence
  derived and/or modified sequence
atgcctgtgatcaacatcgaggacctgacagagaaggacaagctgaagatggaggtggaccagctgaagaaggaggtgaccctggagaggatgctgatcccagcccggcacctgcagaaccagagcctgatggactactag

SEQ ID NO: 210347 - DNA, 141 bp, Artificial Sequence
  derived and/or modified sequence
atgcccgtgatcaacatcgaggacctgaccgagaaggacaagctgaagatggaggtggaccagttaaagaaagaggtgacgctcgaacgaatgctgattccagctagacatttgcaaaaccagtctcttatggactattag

SEQ ID NO: 210348 - DNA, 141 bp, Artificial Sequence
  derived and/or modified sequence
atgcccgtgatcaacatcgaggacctgaccgagaaggacaagctgaagatggaagtggaccagcttaagaaggaggtgactctcgaacgtatgctgatcccagcaaggcacctgcagaaccagtcccttatggactactag

SEQ ID NO: 210349 - DNA, 141 bp, Artificial Sequence
  derived and/or modified sequence
atgcccgtgatcaacatcgaggacctgaccgagaaggacaagctgaaaatggaggtcgaccagttgaaaaaagaggtgacgcttgagcgtatgctaatcccagcccggcatctccagaaccagtctctaatggactactag

SEQ ID NO: 210350 - DNA, 141 bp, Artificial Sequence
  derived and/or modified sequence
atgcctgtcatcaacattgaggatttgactgagaaggataaactgaagatggaggtggaccagctgaagaaggaagtgacactcgaaaggatgcttatacccgctcggcacttacagaatcagtccttgatggactactag

SEQ ID NO: 210351 - DNA, 141 bp, Artificial Sequence
  derived and/or modified sequence
atgccggttatcaacatcgaagacctgacggaaaaagataaactgaaaatggaggtggaccaattgaaaaaggaggtgaccttggaacgcatgcttattcctgcacggcatttgcagaatcagagcctgatggattattag

SEQ ID NO: 210352 - DNA, 141 bp, Artificial Sequence
  derived and/or modified sequence
atgcccgtcattaatatcgaggaccttactgaaaaggataagttaaaaatggaggtggaccagcttaagaaggaggtgacactagagcgcatgctgatacccgcacgccatcttcagaatcaaagccttatggactactag

SEQ ID NO: 210353 - DNA, 225 bp, Artificial Sequence
  derived and/or modified sequence
atgcctgtaattaatatagaggacttgaccgagaaggacaaactgaagatggaagtggatcaactgaaaaaagaggtcacgctggaaagaatgctagtttccaagtgctgcgaggaagtgagggattatgtggaagagcggagcggagaggacccacttgtgaagggaatacctgaagacaagaacccctttaaggagctgaaaggaggatgtgtcattagttag

SEQ ID NO: 210354 - DNA, 225 bp, Artificial Sequence
  derived and/or modified sequence
atgccagtgattaatattgaggacctgactgaaaaggataaactcaagatggaagtagatcagcttaagaaggaagtgacacttgagagaatgctcgtgagtaagtgttgcgaagaggtgagagattatgtggaagaacgcagtggtgaagatccacttgttaaggggatcccagaagataagaacccattcaaagagctgaagggcggctgcgtcatctcctag

SEQ ID NO: 210355 - DNA, 720 bp, Artificial Sequence
  derived and/or modified sequence
aatcatattagtgaagattaggaagaagctttaaaatcccaaggctagtgtgcattgctagaattgttaagagagagagctcatatgaaattggttatcgtgggatatttaaaataaaacaaagaacagtttactttcaggcaaaaagatgccagtaatcaatattgaggacctgacagaaaaggacaaattgaagatggaagttgaccagctcaagaaagaagtgacactggaaagaatgctagtttccaaatgttgtgaagaagtaagagattacgttgaagaacgatctggcgaggatccactggtaaagggcatcccagaggacaaaaatcccttcaaggagctcaaaggaggctgtgtgatttcataatacaaacaaaaagaaaaaaaattaaacaaattcttggaaatatctcaaatgttaataacaatatgaatttttctcatgcatactattactactaagcatgtacgtgaatttttaaatttatagatgtaaacttttaataaaaattggggtgtggtaacccatcattctatgtttttcttaacatagctggcacagggtttaacacataattgccaataaatattgcttaaagttctttaaaaagaactatgttttataaatgattctatattattctgagttgtcagcatatatttactgttttatgttttttcacttccctttcaacacttacaattttctaccca

SEQ ID NO: 210356 - DNA, 538 bp, Artificial Sequence
  derived and/or modified sequence
gctcatatgaaattggttatcgtgggatatttaaaataaaacaaagaacagtttactttgtaagttaagagctgagggaattgttggctaagactgacttgaaataactccagcaattcatgcatagctgctaaccttctacatcttcagcaggcaaaaagatgccagtaatcaatattgaggacctgacagaaaaggacaaattgaagatggaagttgaccagctcaagaaagaagtgacactggaaagaatgctagtttccaaatgttgtgaagaagtaagagattacgttgaagaacgatctggcgaggatccactggtaaagggcatcccagaggacaaaaatcccttcaaggagctcaaaggaggctgtgtgatttcataatacaaacaaaaagaaaaaaaattaaacaaattcttggaaatatctcaaatgttaataacaatatgaatttttctcatgcatactattactactaagcatgtacgtgaatttttaaatttatagatgtaaacttttaataaaaattggggtgt

SEQ ID NO: 210357 - DNA, 225 bp, Artificial Sequence
  derived and/or modified sequence
atgcctgtgatcaacatcgaggacctgacagagaaggacaagctgaagatggaggtggaccagctgaagaaggaggtgaccctggagaggatgctggtgtccaagtgctgtgaggaggtgcgggactatgtggaggagaggtctggagaggaccccctggtgaagggcatccctgaggacaagaaccccttcaaggagctgaagggcggctgtgtgatctcctag

SEQ ID NO: 210358 - DNA, 225 bp, Artificial Sequence
  derived and/or modified sequence
atgcccgtgatcaacatcgaggacctgaccgagaaggacaagctgaagatggaggtggatcagttgaagaaagaagtcactcttgagcggatgcttgtgtcgaaatgttgcgaggaggtccgagactacgtagaagagcggtcaggagaggatcccttggtcaaagggatcccagaagacaagaacccgttcaaggaattgaaaggcggctgcgtgatcagttag

SEQ ID NO: 210359 - DNA, 225 bp, Artificial Sequence
  derived and/or modified sequence
atgcccgtgatcaacatcgaggacctgaccgagaaggacaagctgaagatggaggtggatcagcttaagaaagaggtgacacttgagaggatgttggtcagcaagtgttgtgaagaagtgcgcgactacgtcgaagaacggtcaggtgaagaccctctcgtcaaagggatcccagaggacaaaaatccctttaaagagctcaagggcgggtgcgtcatttcttag

SEQ ID NO: 210360 - DNA, 225 bp, Artificial Sequence
  derived and/or modified sequence
atgccggtgataaacatagaggatctgacggagaaggacaagctcaagatggaagtggaccagctgaaaaaagaagtcacgctggaacggatgcttgtaagcaaatgctgcgaagaggtgcgagactacgtcgaagagcggagcggggaggatcccctggtcaagggaattcctgaagataaaaatccttttaaggaactcaaaggaggctgtgttatctcctag

SEQ ID NO: 210361 - DNA, 225 bp, Artificial Sequence
  derived and/or modified sequence
atgcccgtcattaacattgaagatctcacagaaaaggacaagcttaaaatggaggtggaccagctcaaaaaagaggtgactcttgaacgcatgctcgtgtccaagtgttgcgaggaagtaagagattacgttgaggagaggagtggtgaagaccctttagtgaagggcataccagaggacaaaaacccttttaaagaactgaaaggaggctgtgtgatctcatag

SEQ ID NO: 210362 - DNA, 225 bp, Artificial Sequence
  derived and/or modified sequence
atgcccgtgatcaacatcgaggacctgaccgagaaggacaagctgaagatggaggtggaccagctgaagaaggaggtgaccctggagagaatgctggtgagcaagtgctgcgaggaggtgagagactacgtggaggagagaagcggcgaggaccccctggtgaagggcatccccgaggacaagaaccccttcaaggagctgaagggcggctgcgtgatcagctag

SEQ ID NO: 210363 - protein, 703 aa, Artificial Sequence
  derived and/or modified sequence
MLRGRSLSVTSLGGLPQWEVEELPVEELLLFEVAWEVTNKVGGIYTVIQTKAKTTADEWGENYFLIGPYFEHNMKTQVEQCEPVNDAVRRAVDAMNKHGCQVHFGRWLIEGSPYVVLFDIGYSAWNLDRWKGDLWEACSVGIPYHDREANDMLIFGSLTAWFLKEVTDHADGKYVVAQFHEWQAGIGLILSRARKLPIATIFTTHATLLGRYLCAANIDFYNHLDKFNIDKEAGERQIYHRYCMERASVHCAHVFTTVSEITAIEAEHMLKRKPDVVTPNGLNVKKFSAVHEFQNLHAMYKARIQDFVRGHFYGHLDFDLEKTLFLFIAGRYEFSNKGADIFLESLSRLNFLLRMHKSDITVMVFFIMPAKTNNFNVETLKGQAVRKQLWDVAHSVKEKFGKKLYDALLRGEIPDLNDILDRDDLTIMKRAIFSTQRQSLPPVTTHNMIDDSTDPILSTIRRIGLFNNRTDRVKVILHPEFLSSTSPLLPMDYEEFVRGCHLGVFPSYYEPWGYTPAECTVMGIPSVTTNLSGFGCFMQEHVADPTAYGIYIVDRRFRSPDDSCNQLTKFLYGFCKQSRRQRIIQRNRTERLSDLLDWRYLGRYYQHARHLTLSRAFPDKFHVELTSPPTTEGFKYPRPSSVPPSPSGSQASSPQSSDVEDEVEDERYDEEEEAERDRLNIKSPFSLSHVPHGKKKLHGEYKN

SEQ ID NO: 210364 - protein, 14 aa, Artificial Sequence
  derived and/or modified sequence
TQVEQCEPVNDAVR

SEQ ID NO: 210365 - DNA, 2109 bp, Artificial Sequence
  derived and/or modified sequence
atgctgcggggccgctccctgtcggttactagcttgggtggactgcctcaatgggaagtggaggagcttcctgtggaagagttgcttctgtttgaagtcgcatgggaggtgaccaacaaggtgggaggtatttacaccgtgatacaaaccaaggcaaagaccaccgcagatgaatggggtgagaattactttctgattggcccttactttgagcataacatgaaaacccaggtggagcagtgtgaacctgtgaatgatgcagtcagacgagccgtggatgcaatgaataaacatggttgccaggtgcattttggaaggtggcttatcgaaggttccccttacgtcgtcctgtttgacattgggtacagcgcatggaatctggatagatggaaaggggacctttgggaagcgtgttcagtgggcatcccataccacgatagagaggcgaatgacatgctgatctttggttcccttaccgcttggttcctgaaggaagtgactgaccatgcagatggaaagtatgtcgtggcccaatttcacgaatggcaggctggtatcgggcttattctttcgcgggcccggaagctgccgattgctaccattttcactacccacgcaacgctcctgggaagatacctctgtgcagccaatatcgatttctacaaccaccttgataagttcaacattgataaggaagcgggagaacgccagatatatcacaggtattgcatggagcgcgcgagcgtccattgcgcgcatgtctttactaccgtgtccgagattaccgcaattgaggccgaacacatgctcaaaaggaaacctgatgtggtcaccccaaacggactgaacgtgaagaagttttcagccgtccacgagtttcaaaatctgcacgctatgtacaaggcgcgaatacaagatttcgtccggggccatttctacggacatctcgatttcgacctggaaaagaccctgttcctctttatagcaggtaggtacgagttttcaaacaagggagcggacatatttctggagtcgctctcgagactgaactttctccttcgaatgcataagtcggacataactgtgatggtgtttttcattatgcccgcaaaaaccaacaatttcaacgtggaaacccttaaaggtcaagcagtgcggaagcagctgtgggatgtggcacattccgtcaaggagaagtttgggaaaaagttgtacgatgcacttctgagaggagagattcctgacctgaatgacatcctcgatagagatgatctgaccatcatgaagcgggccattttctcaactcaaaggcaaagcctgcctcccgtgaccacccataacatgattgacgattcaaccgaccctatcctcagtaccatccggcgcatcggactgttcaataacagaactgacagagtcaaggtgattctgcatcctgaattcctttcgtccacttcgcctctgcttccaatggattacgaggagttcgtccgcggctgtcatctcggagtgtttccgtcctactacgaaccatggggatacactcctgcagaatgtaccgttatgggcatcccttcggtgactactaatctgtcgggttttggatgttttatgcaagaacacgtcgcagaccctaccgcgtatggaatctacatcgtggatcggagattcagaagccccgatgattcctgcaaccagctcaccaagtttctgtacggattttgcaagcaaagcagaaggcagagaatcatccagcgtaaccgaaccgaacggctcagcgaccttctcgattggaggtaccttggccgatactaccaacatgcaagacacctcacgctttccagagcgttcccagacaaatttcacgtggagcttacttccccacctaccaccgagggcttcaagtaccctcgaccttccagcgtgccgccgtcaccatcaggaagccaagcaagctcacctcaatcatccgatgtggaagatgaggttgaagatgagcggtacgacgaagaagaggaagcagaacgggatcgcctgaacattaagtccccattttcactcagccacgtccctcatggtaagaagaagctgcatggagaatacaaaaat

SEQ ID NO: 210366 - DNA, 2109 bp, Artificial Sequence
  derived and/or modified sequence
atgttgcgagggagaagcttgtctgtgacgagcctgggaggcctgcctcagtgggaggtagaagagctccccgttgaagagctactactgttcgaggttgcctgggaggttactaacaaggtcggcggcatatatactgtaatacagaccaaggctaagactaccgcagacgagtggggcgaaaactacttcctgatcgggccgtatttcgagcataatatgaagacccaggtggagcagtgcgaacctgtgaatgatgcggtgcgccgagcagtggatgccatgaacaagcacggatgtcaggtccactttggccgttggctcatcgaggggagcccatacgttgtgctgttcgatatcggctatagcgcctggaatttggatcgttggaagggcgacctttgggaggcctgttccgtcggaatcccttaccacgatagggaggcgaatgatatgctaattttcggatcacttaccgcctggtttctgaaggaagtaaccgatcacgctgatggcaaatatgtggttgcgcagttccacgagtggcaggctgggataggtctcatactcagcagagcgagaaaactccccatagcaactattttcacgacccatgccaccttgctaggcaggtatctttgcgcagcaaatatagacttctataaccatctggacaaattcaacatagataaggaggctggtgagagacaaatttaccaccgatactgcatggaacgtgcttccgtgcactgtgctcatgtgtttacaaccgtctcagagataacagctatcgaagccgagcatatgcttaagcgaaagcccgatgtggtgacacccaacggcctaaatgtcaagaaatttagcgccgtgcatgagttccagaacctccatgcaatgtacaaagcccgaattcaggattttgtcagagggcacttttacgggcacttagattttgacctggagaagaccctattcctgttcatcgccggccgatacgaattctccaacaagggtgccgacatcttcttggaatccctttcacgactcaacttcctactacgaatgcacaaatctgatattactgtgatggtcttctttattatgccagccaagactaataacttcaatgtggagacgttgaaaggtcaggccgttaggaaacagctctgggatgtggcgcacagcgtgaaagagaagtttggcaagaagctgtacgacgcattgctgcgaggtgaaatccccgaccttaatgacatcctggatagagatgacctcactattatgaagcgtgctatttttagtacgcaacgtcagagtttgccccctgtgaccacacataatatgattgatgacagcacagatcccattcttagcaccataagaaggatcgggctgttcaataatcgtacagatagggttaaggtcatccttcaccctgaatttctttcttcgacttcccctctgctgcccatggactacgaggaattcgtgaggggatgccaccttggtgtgttcccgtcctattatgagccctgggggtatacccctgcagagtgcaccgtcatggggatcccttcggtgaccaccaatctatcaggcttcggatgtttcatgcaggaacacgttgcagaccccaccgcgtatggaatatatatcgtggataggagatttcgatctccagatgactcctgtaaccagctcacaaagttcctctatggtttttgcaagcagtctaggaggcagagaattattcagcgaaaccgtacagaaagactgtccgacctgctcgattggcggtatctgggtcgatactaccagcatgcacggcatctcacacttagcagggccttccccgataagtttcatgtggaacttacttctcctccgactactgaaggctttaaatatccgagaccttccagcgtgcctcctagcccaagtgggtcacaggcgagtagcccgcagtcaagtgatgtggaagacgaagtggaggacgaacgatacgacgaagaggaagaggctgaaagagaccgcttaaacatcaagtctccatttagcctgagtcatgtgcctcacggcaagaagaagctgcacggagagtacaaaaat

SEQ ID NO: 210367 - DNA, 2109 bp, Artificial Sequence
  derived and/or modified sequence
atgctgcggggaagatcactttccgtgacctcccttgggggacttcctcagtgggaagtcgaagagctgccggtggaagaactgctgctctttgaagtggcttgggaagtgactaacaaggtcggtggcatctacaccgtcatccagaccaaggcaaagaccactgccgatgagtggggtgagaattactttctgattggtccatactttgaacataacatgaaaactcaagttgagcaatgtgaaccagtcaacgatgcagtcagaagagcagtggacgctatgaataagcacggatgtcaggtgcattttggtaggtggctgattgagggttccccttacgtcgtgttgttcgacattgggtactcggcatggaaccttgacaggtggaaaggggatctctgggaagcctgctccgtcggaattccttaccatgaccgcgaggccaatgatatgcttatcttcgggtccttgaccgcttggtttctgaaggaagtgactgatcacgcagatgggaaatatgtcgtggcacaattccacgaatggcaagcaggaatcggccttatcctttccagagcacgtaaactccctatagcgaccatattcactacccatgcaacccttctcggacggtacctgtgtgccgccaacattgacttttacaatcacctggataagttcaacattgataaggaagcaggagagagacagatctaccatcggtactgtatggaaagggcgtcagtccactgtgcacatgtgtttacgaccgtcagcgaaattacggcaattgaagcagagcatatgctgaagagaaaacccgatgtggtgactcctaatggattgaatgtgaagaagttttcggccgtccacgaatttcagaacctgcatgccatgtacaaggcacgtatacaagattttgtgcgaggtcatttctatggacatctcgattttgatttggaaaagaccttgtttttgtttattgcaggccgctatgaattttccaataagggtgcagacatttttcttgagtcactgtcgagactgaacttcctccttcggatgcataagtcggatattactgtgatggtgtttttcatcatgcctgcaaagaccaacaactttaacgtggaaactttgaaggggcaagcagtccgcaagcaactctgggacgtggcgcattctgtcaaagagaagttcggtaaaaagctgtacgatgcactgcttcgaggtgaaatcccggaccttaatgacattctggatagggatgatctcaccatcatgaagagagctattttctcaactcaacgtcagtcgctgcctcctgtcactactcacaatatgatcgatgattccacggaccctatcctctcgaccataaggcgcatcggtttgtttaacaaccggactgacagggtcaaggtgatcctccatccagaattcctctcgtcaacgtcccccctgcttcccatggactacgaagaatttgtcaggggctgtcatctcggtgtgtttccttcctactacgagccctggggatacaccccagctgaatgtaccgtcatggggattccttcggtgacgactaacctttccggatttgggtgttttatgcaagaacacgtcgctgaccctaccgcatacggaatctacattgtggaccggagattcaggagcccagatgactcctgcaaccagctgaccaaatttctctatggattctgcaagcaatcaagacgacaaagaatcattcaacggaaccgcaccgagcgtctttcagatcttctggattggaggtacttggggagatactaccagcatgcgcgccatctcactttgagccgagccttccctgataagttccacgtagagttgacctcgcccccaactaccgaggggtttaagtacccacggccctccagcgtgccgccttctccgtcaggatcccaagcgtcctcaccacagtcatcggacgtggaggatgaagtggaggatgagaggtacgacgaggaggaagaagccgagagagatagactcaacatcaagtcgcccttctccctgtcgcatgtgcctcacgggaagaagaagctgcacggagagtacaaaaac

SEQ ID NO: 210368 - DNA, 2109 bp, Artificial Sequence
  derived and/or modified sequence
atgttaagaggaagatcattgtcagttacatcattgggaggtttaccacaatgggaagtagaggaattaccagtagaagaacttttgttattcgaagttgcatgggaagttactaataaagtaggaggaatttatacggttattcaaacaaaggctaaaactacagctgatgaatggggagaaaattattttttaattggaccatattttgaacataatatgaaaactcaagttgaacaatgtgaaccagttaatgatgcagttcgtagagctgttgatgctatgaataaacatggatgtcaagttcatttcggtagatggcttatcgaaggaagtccttatgttgttttatttgatattggatattctgcatggaatttagatagatggaaaggagacctttgggaagcatgttcagttggtattccttatcacgatagagaagcaaatgatatgttaatttttggatctcttactgcttggttcttgaaggaagtaactgatcatgcagatggaaaatacgttgttgctcagtttcatgaatggcaagccggaatcggtttaattctttcaagagctagaaaacttccaattgcaaccatttttacaactcacgctactttacttggtagatatttatgtgcagctaacattgatttttataatcacttagataagtttaatattgataaagaagctggtgaaagacaaatttatcatagatattgcatggaaagagcatctgttcattgcgctcatgtatttactacagttagtgaaataactgcaattgaagcagaacatatgttaaagagaaagccagatgtagtaactccaaatggattaaacgtgaaaaaatttagtgcagttcatgaattccaaaatttacatgccatgtataaagctaggatacaagatttcgttagaggacacttttatggacatcttgattttgatcttgaaaaaactttatttctttttatagccggtcgttacgaattctcaaacaaaggagcagatatttttttagaatcattaagtaggttaaatttccttttaagaatgcataaatcagacattactgtaatggttttttttattatgccagcaaaaactaataattttaatgttgaaacattaaaaggtcaagctgttagaaaacaactttgggacgttgctcattcagttaaagagaaattcggaaaaaaactttatgatgcacttttacgtggagaaattccagatcttaacgacatattagatagagatgatttaacaattatgaagagagcaatattttcaactcaaagacaatcacttccaccagttactactcataatatgattgatgactcaactgatccaatcctttctacaattagacgaattggactttttaataatagaacagacagagttaaagtaattcttcatcctgaatttctttcatctacatcaccacttttaccaatggattatgaagaatttgtaagaggatgtcatttaggagtgtttccaagttattatgaaccatggggatatacaccagctgaatgtacagttatgggaattccttcagttactactaatctttctggatttggatgtttcatgcaagaacatgtagctgatccaactgcttatggaatctatattgttgacagaagattcagatctccagacgattcatgtaatcaacttacaaaatttttatatggtttttgtaaacaaagccgtagacaaagaataattcaaagaaatagaactgaaagattgtcagatttattagattggagatatcttggtagatattatcaacatgctagacatcttactctttctagagcatttccagataaatttcatgtagaacttacaagtccaccaacaacagaaggatttaaatacccaagaccatcttctgttccaccttcaccaagcggatcacaagcatcttctccacaatcatcagatgttgaagacgaagttgaagatgaaagatatgatgaagaagaagaagcagaaagagatagattaaatattaaatctccttttagtttatctcatgtaccacatggaaaaaaaaagttacatggtgaatataaaaat

SEQ ID NO: 210369 - DNA, 2109 bp, Artificial Sequence
  derived and/or modified sequence
atgctgaggggcaggtctctatcggtgacgtcgctgggcggtttgccgcaatgggaggtggaggagctccctgtcgaggagcttctgctgtttgaggttgcctgggaggtaaccaataaggttggcggcatctataccgtcatccagactaaggccaagaccacagccgacgagtggggtgagaactactttctgataggtccgtattttgagcacaacatgaagacacaagtggagcagtgtgagcccgtcaacgatgccgtgcgtagagccgttgacgcaatgaacaagcacggttgccaggttcacttcggtcgctggctgattgagggctctccctacgtcgtcctgttcgacatcggctactcagcttggaacctcgatcgttggaaaggcgatctctgggaggcttgctctgttggtatcccttaccacgatcgtgaggccaacgacatgctgatcttcggttctctcactgcctggttccttaaggaggttactgaccacgcagatggcaagtacgtggtagcgcagttccacgagtggcaggccggtatcggtctcattctaagccgtgcccgcaagttacctatcgcaaccatattcaccactcatgcgactcttttgggacgctacttgtgcgccgcaaatattgatttttataaccatttggacaagttcaacattgataaggaagctggtgagagacagatctaccaccgttactgtatggagcgtgcctcggtccactgcgcccatgtcttcaccacggtgtcggagatcaccgccatcgaagccgaacacatgctgaagcggaaacctgacgtcgtgacccccaacggcctaaacgttaagaagttctctgctgtccatgagtttcaaaacctccatgccatgtacaaagcccgcatccaagacttcgtccgcggacacttctacggccacctcgatttcgatttggaaaagacactgtttctattcatcgcgggaagatacgaattctctaataagggagccgacattttcctggagtcgctctcccgtttgaacttccttctccggatgcataagtctgacatcaccgtcatggtgttcttcatcatgcctgccaagaccaacaacttcaacgtggagactctcaagggtcaggctgtgcgtaagcaactttgggatgttgcacactccgtcaaggagaagtttggtaagaagttatacgacgctcttcttcgtggcgagattcccgacctgaacgatatccttgatagggacgatcttaccattatgaagcgtgctatcttctcaacgcagcggcagtctctcccgcctgtaacgacgcataatatgattgacgattctacggacccaatccttagcacaatccgtaggatcggcttattcaacaacaggacggaccgcgtcaaggtgattctccaccccgagtttttgagtagtacgagcccattgctgcctatggattacgaggaatttgtgcggggttgccacctcggtgtcttcccttcctactatgagccgtggggctatacccccgccgagtgcactgtcatggggatcccttccgtcactacgaacctttccggttttggctgtttcatgcaagaacacgttgctgaccccaccgcctacggcatctacattgtagacaggcgctttcgcagccccgatgactcttgcaaccagttgaccaaattcctctacggtttctgcaaacaatctcgccggcaacgcatcattcagcgtaaccgcaccgaacgtctatccgatctcctcgactggcgctacctcgggaggtactaccagcatgcccgtcacctcacactttccagggcattcccggacaagttccacgtcgagctcacctctccccctacaacggagggttttaagtatccgcgcccaagctccgttcccccgtccccctcgggtagccaagcaagttcaccccagtcctcggacgttgaggacgaagtggaggacgagcgctacgatgaggaggaggaggccgagcgcgaccgtcttaacatcaaatctccgttttctctgtctcatgtaccccatggcaagaagaagctgcatggcgagtacaagaac

SEQ ID NO: 210370 - DNA, 2109 bp, Artificial Sequence
  derived and/or modified sequence
atgttgcgagggcgcagcctgtctgtgacaagtttggggggcctcccacagtgggaggtggaagagctgcctgtggaagaactgttgctgtttgaagtggcgtgggaggtgaccaacaaagtcggggggatatacacggtgatccagacaaaagcaaaaacaacagccgatgaatggggtgagaactatttccttataggcccttactttgaacataacatgaaaacccaggtggagcagtgcgagccagttaacgatgccgtgcgacgggcggtggacgcgatgaacaaacacggatgccaggttcatttcgggagatggcttatagagggttccccatacgttgtgctcttcgatataggctatagcgcgtggaatctggaccggtggaaaggcgatctctgggaggcttgttccgtcggcatcccgtatcacgatagagaggctaacgatatgctgattttcgggagcttgaccgcctggttcttgaaggaagtgaccgaccacgctgacggcaaatatgtcgttgcccagttccatgagtggcaggccggtattggtttgatactctctcgcgccaggaagcttcccatagctaccatcttcaccacccacgcaacccttttgggtaggtacttgtgcgcagctaatatcgacttttacaatcatctcgacaagtttaacatcgataaggaggctggggaaaggcagatataccatcgatattgtatggagagagcaagcgtccactgcgcccacgtgtttaccactgtttcagaaataaccgccatcgaggctgagcatatgttgaaacgtaagcctgatgtcgttacccccaacgggctgaacgtgaagaaattctcagccgtccacgagtttcagaacctccacgcgatgtataaggcccgaatacaggacttcgtacgcgggcatttttacgggcacctagactttgatctcgaaaagacactgtttctgtttattgctgggcggtacgagttttctaacaagggggcggatatcttcctcgaaagtcttagccgcctgaactttcttctcagaatgcataagtcagatattacagtaatggtcttctttataatgcctgcaaaaacgaataatttcaacgtggagaccctgaagggacaggccgtgagaaaacagttgtgggacgtggcccactctgtgaaagaaaagtttgggaagaagctttatgacgccctgctgagaggtgagattccagatttgaacgacatcctcgaccgggatgacctgacaataatgaaacgagccattttctcgacacagcgtcagagtctcccccccgtgacaacccacaatatgatcgacgactcaaccgacccaattttaagcactattagaaggattggattgttcaataaccgaacggatcgggtcaaggtgatcctgcacccggaattcttaagctccaccagcccacttctccccatggactatgaagaattcgtgaggggctgccatctcggtgtgtttcctagttattacgaaccttggggatatacccctgcggagtgtacggtgatgggcatcccttcagtcacgaccaacttaagtggttttgggtgtttcatgcaggagcatgtagccgaccccacggcctatgggatctacatagtggataggagatttcggtcacctgacgattcctgcaaccagttgacaaagtttctttatggtttctgcaaacagtcccgacggcagagaattatacaaaggaatcgcactgaaaggctttccgatctgctggactggagatatcttggtagatactaccaacacgcccgccacttgacactgagtcgcgccttccccgataagttccatgtagagctgaccagtcctcccaccacggagggctttaagtatccgagaccctccagtgtcccgccatccccctcggggtcgcaggcctcttccccccagtccagtgacgtggaggacgaggtggaggatgaaaggtacgacgaagaggaggaagctgaacgggatcgcttaaatattaagtcccccttctcactgagtcatgtgccccatgggaagaagaagctgcatggcgaatacaaaaac

SEQ ID NO: 210371 - DNA, 2109 bp, Artificial Sequence
  derived and/or modified sequence
atgcttcgcggacgctcgctttccgtaacttctcttggaggtctgccgcaatgggaagtggaagaactcccggtggaagaactattgttatttgaagttgcttgggaagtgacgaacaaagttggtggcatttataccgttattcagacaaaagcgaagactacggccgatgaatggggtgaaaactatttcctgattgggccgtattttgaacacaatatgaaaacacaagtagagcagtgcgagccggtgaacgatgctgttcgacgggccgtggacgctatgaataaacacggttgccaagtacactttggtcggtggttgatcgaaggtagcccttatgttgtcctctttgatattgggtactcggcctggaatttagatcgatggaaaggcgatctctgggaggcctgctctgttggcataccttaccatgatcgcgaagctaacgacatgttaatctttggatcacttacggcatggtttctgaaagaagtaacagatcatgcagatggaaagtatgtcgtagctcaattccacgaatggcaagccggaatcggcttaatccttagcagagctcgtaaacttccaatcgcaactatatttacgacgcatgctacactgctaggtagatacttatgcgcggcaaatattgatttttataatcatcttgacaaatttaatattgataaagaggcgggtgaacggcaaatttatcataggtactgtatggagcgcgcatccgttcactgtgcacatgtgttcacaacagtctcagaaatcacagcaatagaagcagaacatatgctgaagcggaaacctgatgtcgtcaccccaaatgggcttaatgtgaaaaaattcagcgctgtccatgagttccagaaccttcatgcaatgtacaaagctcgtatccaagattttgtacgcggccatttttacggtcacctggatttcgatctggaaaagacactgttcctgtttatcgctggccggtatgagttttcaaacaaaggtgcggatatctttttggaatctttgagccgcctcaatttcttacttaggatgcataaatcggatataacagttatggttttcttcatcatgccggctaaaacaaataattttaacgttgaaacattaaaaggacaagccgttcgtaaacaattgtgggacgtagcacatagtgtaaaggagaaattcggaaaaaaattatacgacgccttgctgcgtggcgaaatcccagatttaaatgacattttagatcgggacgaccttacgattatgaagagagcaatcttctcaacgcagagacaaagcctccctccggtaaccacacataatatgattgacgactctactgatccgatacttagcacaatacggcgtattggtctctttaataatcgtacagaccgagtgaaagtaatcttacaccctgagttccttagctctacgtcgccattattgcctatggattatgaagaattcgtccgaggatgccatcttggtgtgtttccgtcatattatgaaccatggggatacacgcctgcagagtgcacagttatgggtattccaagtgtgactacgaatctctctggcttcgggtgttttatgcaagaacatgtcgctgatccgacggcttacgggatttatatcgttgataggcggtttcggtcgccggacgattcatgcaaccaacttactaaatttctttatggattttgcaaacagtcacgtcggcagcggataattcagcggaatcgcaccgagcggctatcagacctccttgactggcgttatttaggtcgatattatcagcacgcccgacacctgacgctgtcgcgtgcttttcccgataaatttcacgttgaattgacttctccgcctacaacagagggatttaaatacccacgtccgagctccgttcctccgagtccgtcaggaagtcaggctagttcaccgcaaagttcagatgtcgaagacgaagtggaagacgaacggtatgacgaagaggaagaagccgagcgcgaccggctgaacatcaaatcaccttttagcttgagccatgtgcctcatggtaagaaaaaactgcatggcgaatataaaaac

SEQ ID NO: 210372 - DNA, 2109 bp, Artificial Sequence
  derived and/or modified sequence
atgctgagaggccgctccctgtccgtgacttccctgggcggactcccgcaatgggaggtggaagaacttccggtggaggaactgctgctgttcgaagtggcatgggaagtcactaataaggtgggaggaatctacaccgtcatccagactaaggccaagactaccgccgatgaatggggcgaaaactacttcctgatcggaccctactttgagcataacatgaaaacccaagtggaacagtgcgagccggtgaatgatgcggtgagacgggccgtggatgctatgaataaacacggttgccaggttcatttcggaagatggctcatcgaaggcagcccgtacgtggtgctgttcgacatcggctactccgcgtggaatctcgacagatggaagggcgacctgtgggaagcatgctcagtcggaattccttaccatgatagagaggcgaacgatatgttgatctttggatcgctcactgcctggtttcttaaggaggtgactgatcacgccgacggtaagtatgtagtggcacagtttcatgaatggcaagcgggcatcgggctgattctgtcgcgggccaggaagctgcccatagctaccattttcactactcatgcgactctgctcggcagatacctgtgtgcagccaacatcgacttttacaatcacctggacaaattcaatattgacaaggaggcgggagaaagacaaatctaccatcgctactgtatggaaagagcgtctgtgcactgcgcgcacgtgttcaccaccgtgtcggagatcactgccatcgaagcagaacacatgctgaagcggaaaccggacgtcgtgaccccgaatggcctgaatgtgaaaaagttttcggccgtccatgaattccagaacctgcacgcaatgtacaaagcgcggattcaggactttgttcggggacacttttacggacatctcgacttcgacctcgagaaaaccctgtttctgtttatcgccggacgttacgaattctcgaacaaaggggccgacatcttcctggaaagcctctcgaggctgaatttcctgctgcggatgcataaaagcgatatcaccgtgatggtgttcttcatcatgcctgctaagactaacaacttcaacgtcgaaactctgaagggtcaagcagtgcggaaacagctgtgggacgttgcgcactcggtgaaggagaagtttggtaagaagctgtacgacgcgttgctccgcggagaaatccctgatctgaatgatatcctggaccgggacgatctgaccatcatgaaacgggctatcttctcaactcagcgtcaaagcctcccgccagttaccacccacaacatgattgacgattcgaccgacccgatcctgtcgaccatcaggcgcattgggcttttcaacaacagaaccgaccgcgtgaaggtgatccttcacccagaattcttgtcatcgacctcccctcttctccccatggattacgaagaatttgtccgcggttgccaccttggtgtgttcccgtcctactacgaaccgtggggctacacgccggcagagtgcactgtcatgggaatcccttccgttacgaccaacctttctggattcgggtgcttcatgcaggaacatgtggccgaccccaccgcgtacggtatttacatcgtggaccgaagatttcgctccccagacgatagctgcaaccagctgactaagtttctgtacggattctgtaagcaatcacgccgccaacggatcattcagcggaacaggactgagagactttctgacctgctcgattggcgttacctcggaagatactaccagcacgcaagacacctgacgctttcccgcgcattcccggataagttccatgtcgaactgacctcgcctccgaccactgaggggttcaagtacccgaggccctcgtccgtgccaccatcgccctcgggatcacaggcctcatccccgcaatcctccgatgtggaggacgaggtcgaggatgaacgctacgacgaggaggaagaagcggagagggacagactgaacatcaagtcccccttttcactctcgcatgtgccgcatggcaaaaagaagctgcacggagagtacaagaac

SEQ ID NO: 210373 - DNA, 2109 bp, Artificial Sequence
  derived and/or modified sequence
atgctccgcgggcgatctctaagcgtaactagcctggggggcttacctcagtgggaagtagaggaactaccagtggaagagctgctgttgtttgaagtggcctgggaggtgacaaacaaagtgggcggcatctataccgtcatccagaccaaggccaagacgaccgcggacgagtggggcgaaaactactttctcatcggaccatacttcgaacacaacatgaagacacaggtggagcagtgtgagcccgtgaatgacgccgtacggcgtgcggtagatgcaatgaataaacacggctgccaggtgcattttggacgctggcttattgagggttcgccctatgtggtgcttttcgatattggttattccgcttggaatctagataggtggaaaggggatttatgggaggcttgctcggtcggaatcccctatcatgacagggaagccaatgacatgctgatctttggaagtcttaccgcatggtttttaaaagaagtgacagaccacgccgacgggaagtacgttgtggcgcaattccacgaatggcaagctgggatcggattgattctgtctagggcacgtaagctaccaatagcaaccatctttacgacgcatgcgacactcctgggacggtatctgtgcgccgccaatatcgatttttacaaccacctggataagtttaacatcgacaaggaagctggcgagcgccagatctatcataggtactgcatggaacgggctagtgttcattgtgctcacgtcttcaccacggtgtctgagattacagctatcgaagccgaacatatgcttaagcgtaagccagacgtggttacccctaacgggctgaatgtcaagaagtttagtgccgttcatgagtttcaaaatttgcacgctatgtataaagctagaattcaggactttgtgcggggacatttttacggtcacctggatttcgatctggagaagactttgttcctgttcatagctggacgttacgagttttccaataaaggcgcagacatttttctggaatccctgagccgcctgaacttcctgctccgaatgcataagtctgatattactgtgatggtgttttttatcatgcccgccaaaacgaataacttcaacgtggaaacgctgaagggccaggccgttagaaagcagctgtgggacgttgcccattcagttaaggaaaaattcggtaagaagctgtacgacgccctgctccggggggaaattccagacttaaacgacatcctggaccgggacgacctgacaatcatgaagcgtgcaatcttctcaacccagcggcaatccctgccccctgtgacaacccacaacatgatcgatgacagtacagacccaatcctgagcaccataaggcggattggcctgttcaacaaccgaaccgaccgagtaaaggttatccttcaccccgagttcctgtcttcaacttctcccctgcttcctatggactatgaagagttcgtcagagggtgccatctgggagtttttccttcctattatgaaccctggggttatactccagccgaatgtacggtgatgggaatcccaagtgtgactaccaatctgagtggatttggatgtttcatgcaggaacacgtggcagatccaaccgcatatggaatttatattgtggaccgtcgatttcgttcaccagatgacagctgcaatcaactgaccaagtttctgtatggattctgcaaacagtctcggagacagcggatcatacaaagaaacaggactgagagactgtcagacctgctcgactggaggtacctgggacggtattatcagcacgcgcgccacttaactctgagtagggcgttccctgataagtttcacgttgaattgacgtctccaccaaccaccgaggggttcaaatatcctcggccctcatcggtaccgccgtcgccctccggttcccaggcctcgtctccacagtcatccgatgtggaagacgaggtcgaggatgagcgctacgatgaagaggaagaggcggagcgggatcgtctgaacataaagagccctttttcattgtcccatgtgccgcatggaaagaaaaaacttcatggggaatacaagaac

SEQ ID NO: 210374 - DNA, 2109 bp, Artificial Sequence
  derived and/or modified sequence
atgctgcgcggaagaagcctgtccgttacttcactgggaggacttccgcaatgggaagtcgaagagctgccggtggaagaactgctgctgtttgaggtggcttgggaagtgactaataaggtgggtggaatctatactgtgatccagaccaaggccaagactaccgcggatgaatggggagaaaactacttccttatcgggccgtacttcgagcacaacatgaaaacccaagtggagcaatgtgagccagtcaacgacgccgtgaggcgcgccgtggatgctatgaacaagcatggatgccaggtgcactttggacgctggctcattgaaggatcgccgtacgtggtgctctttgatattggttactcagcgtggaacctggacagatggaagggtgatctgtgggaggcttgctctgtcggaattccctaccacgaccgggaggcaaacgacatgctgattttcgggtccctcactgcctggttcctcaaggaagtgactgaccacgctgatgggaagtacgtcgttgcgcagttccatgagtggcaagctggcatcgggctcatcctctcgcgggcccgcaagttgccgatcgccactatcttcaccactcacgcaactctgttgggacgctacctgtgcgccgctaacattgacttttacaaccacctcgacaagttcaatattgacaaggaagccggagaaagacaaatctaccacagatactgcatggagcgcgcctcggtgcactgcgcccacgtgttcaccaccgtgagcgaaatcactgccatcgaagccgagcacatgctgaagcgcaaaccggacgtggtcaccccaaacggcctcaatgtgaaaaagttctccgcggtgcacgaattccagaatctgcacgcaatgtacaaggcgcggattcaggactttgtgcgcggtcacttctatgggcatctggattttgacttggaaaagaccctgttcttgtttatcgccggacggtacgaattctcgaataagggcgctgacatctttcttgagtcgctctctcgcctcaacttcttgttgcggatgcacaagtcagatatcaccgtgatggttttctttatcatgccagcaaagacgaacaacttcaacgtggaaaccctgaagggacaggccgtccggaagcagctgtgggatgtggcccattcagtcaaggagaagttcgggaaaaaactctatgacgcgctccttcgcggagaaatccctgatctcaacgatatccttgacagggacgacctgaccattatgaagcgcgctatcttttctacccagcggcaatcgctcccgccggtcactacccacaacatgattgacgattccaccgacccgatcctgtcgactatcaggagaatcggattgttcaacaacaggaccgatcgggtcaaggtgatcctccaccctgaattcttgtccagcaccagcccgctcctgccgatggactacgaagagttcgtgcgggggtgccatctgggagttttcccttcctactacgaaccatggggttatactccggcggaatgtaccgtgatgggaatcccgagcgtcactacgaacctgtccggattcggctgcttcatgcaggaacacgtcgcggacccaacggcttatggcatctacatcgtggaccgccggtttcggtccccagatgattcgtgcaaccaactgaccaagttcttgtacggattctgcaaacaaagccgcagacaacgcattattcagaggaaccgcactgaacgcttgagcgatctgctggactggaggtaccttggacgctactaccaacacgccagacaccttactctgtcccgtgccttcccggacaaattccacgtggagctcactagcccaccgactaccgagggatttaagtacccgcgcccttcaagcgtgcccccttccccgagcggttcacaagcctcctcacctcagtcatcagatgtggaggatgaggtggaggacgaacggtacgacgaagaggaagaggccgagagggaccgtctgaacatcaagtccccgttctcccttagccatgtcccacatggtaaaaagaaactgcacggcgagtataagaac

SEQ ID NO: 210375 - DNA, 2109 bp, Artificial Sequence
  derived and/or modified sequence
atgttgcgaggtaggagtctctcagtgacgtcgctgggaggtcttcctcaatgggaagtagaggagctgccagtcgaagagttgctcctctttgaggtggcttgggaagttacaaataaggttggtggtatttatactgtgattcagactaaagcaaagaccactgccgacgaatggggcgagaattacttccttattgggccctattttgagcacaatatgaagacacaagttgagcaatgcgaaccagttaacgatgctgtcagaagagcggtggacgcgatgaacaaacatgggtgccaagtgcatttcggaagatggttaattgagggttcaccttatgttgttcttttcgatattgggtattctgcctggaaccttgatagatggaaaggagatctttgggaagcatgctcggtggggattccctaccacgatcgtgaagctaacgacatgctgatttttggaagtttgaccgcttggtttttgaaagaagttacggatcacgctgacggtaagtacgtcgttgctcaatttcatgaatggcaggcgggcatcggtctcatcttgtctagggctaggaagttgcctattgcaacaatttttactacacatgccacactcctgggtagatatctttgcgccgctaatattgacttctataatcacttggataagttcaacatcgataaggaagcaggggaacggcagatttatcacaggtattgcatggagcgggcttcggtccactgcgcccatgtttttactacggtttctgaaattacagctatcgaggcagaacacatgttgaaaaggaaaccagatgtcgtgacacctaacggtcttaacgtgaaaaagttctctgccgttcacgaatttcaaaacttacatgctatgtataaagcaagaattcaagattttgtcaggggacatttttatggacatctcgattttgacctcgaaaagactctctttcttttcattgctggccgttatgaatttagtaacaagggagccgacatctttttggagtccctctcgagattgaacttcctgctccgtatgcacaaaagtgatatcacagttatggttttttttataatgccagccaaaacgaacaatttcaacgtggaaacccttaagggccaagctgttcgaaagcaactttgggacgtggcacattccgtaaaagaaaagttcggtaaaaagctgtatgacgcgttgctacgcggtgagatccccgatttgaatgacattctcgaccgtgatgatcttactataatgaagagagcaattttcagcactcaacgtcagagccttcctccagttactacccataatatgatcgatgattccactgaccccatactttctactatccgaaggattggattgttcaataatcgtactgatagagttaaggtcattttgcatcctgaattcctgtcgtctacttcccctttactaccaatggattatgaagagttcgttcgaggctgtcatcttggtgtgtttccgagttattatgagccttgggggtacactccagctgagtgcacagttatgggtatcccctcagtaactaccaatctctccggatttggctgcttcatgcaagagcacgttgcagatcccacggcgtacggtatttacattgttgatagaagatttcggagccctgatgactcctgcaatcagcttactaagtttctctatggattctgtaagcaatcacgtagacaaagaattattcagcgaaacaggacggagcgtctttcggatctccttgattggcgttatcttggaagatactaccaacatgcacgacacctgaccctttcacgtgcttttcctgataagtttcacgttgaattgacaagccctccgactactgaagggttcaagtaccctaggccaagttccgtccctcctagcccttcgggttctcaagcctcctcgcctcaatcaagtgatgtggaggatgaggtggaggatgagaggtatgatgaagaggaagaagcagaacgggatcgccttaatatcaaatcccctttctctctgtcgcatgttccgcatggaaagaaaaagttacatggggagtataaaaat

SEQ ID NO: 210376 - DNA, 2109 bp, Artificial Sequence
  derived and/or modified sequence
atgctgaggggcagatccttgtccgtgacctccttgggaggtctgccccagtgggaggtggaggaactccctgttgaagagctgctcctctttgaagtggcatgggaggtgactaataaggtggggggaatctacacggtgatccagaccaaggccaagaccactgcagatgaatggggagagaactacttcttgattggtccgtacttcgaacataacatgaaaactcaggtggaacagtgcgagcctgtcaacgacgccgtgcggcgggccgtggatgccatgaacaagcacggctgtcaggtgcactttggacgctggctgatcgagggaagcccatacgtggttctgttcgacatcggatacagcgcttggaacctggatcgttggaaaggtgatctgtgggaagcctgttcagtgggaattccctaccatgaccgcgaggccaatgacatgctgatattcggatcgctgaccgcttggttcttgaaggaggtcactgaccacgcagatggaaagtatgtggtggcccagtttcatgaatggcaggcgggaataggactcatcctctcgagagcacgcaaactgccgattgcgactattttcaccactcacgcgacgctgctgggcaggtacctgtgcgcggccaatatcgacttttacaatcacctcgacaagttcaacatcgacaaagaagccggggaaagacagatctaccatcgctactgcatggagagagcgtcggtgcactgcgcgcacgtgttcactaccgtcagcgagatcaccgcgattgaggcagaacatatgctcaagcggaagccggacgtcgttactccgaatggcctcaacgtgaagaagttcagcgccgtgcacgagttccagaacctgcacgcaatgtacaaggccaggattcaagacttcgtgcgggggcacttctatggacacctggatttcgacctcgagaaaactctcttcctgttcatcgcgggaaggtatgagttttcgaataagggggcagatatctttctggaatccttgtcgcggctcaatttccttctgaggatgcataagtccgacatcaccgtgatggtgttctttatcatgcctgccaagaccaataacttcaacgtggagactctgaaagggcaagctgtcagaaaacaactgtgggatgtcgcacactctgtcaaagaaaagttcggaaagaagctgtacgacgcactgcttaggggcgagatccctgatctcaatgacatcctggaccgggacgatctgacgatcatgaagcgcgccatcttctccactcagaggcaaagcctgccgcccgtcactacgcataacatgatcgacgattccaccgatccgatcctctcaaccatcagaagaatcggcctcttcaataacaggactgaccgcgttaaagtgatcctgcacccggaatttctctcctccacttcccctctgctcccaatggattatgaggaattcgtgcggggctgccacctcggagtatttccaagctactacgagccgtgggggtacaccccagcagaatgtaccgtgatgggaatcccctcggtcaccaccaacctgagcggattcggatgcttcatgcaagagcatgtggcggatcctaccgcctacggcatctacattgtggaccggcggttcagatcgcctgacgattcatgtaaccagctgaccaagttcctgtacggcttctgtaagcagtccagaaggcagcgcatcatccagcgaaatcggactgagcggttgagcgacctgcttgactggagatacctgggaagatactatcaacacgcgcggcaccttactctgtccagggccttccccgacaaattccacgtagagcttacctcgccacccactaccgagggtttcaaatacccaaggccgagctcagtgccaccgtcgccgtcgggctctcaggcttccagcccgcaatcaagcgacgtcgaggacgaggtcgaggacgaacgctacgatgaggaagaggaggccgaacgcgatcgcctgaacatcaaatccccgttttcgctgtcgcatgtgccccatggcaaaaagaagctgcacggcgagtataagaac

SEQ ID NO: 210377 - DNA, 2109 bp, Artificial Sequence
  derived and/or modified sequence
atgctccgaggtcgcagcctttcagtgacttcgcttggcggtttgccacagtgggaggtggaggaactgcctgtcgaagagctcctcttgttcgaggtggcgtgggaagtgactaacaaagtcggaggaatctacactgtcatccaaaccaaagctaagactaccgccgatgaatggggagaaaactacttcctgatcggaccgtacttcgaacacaatatgaaaactcaggtcgaacagtgcgaaccggttaacgatgccgtgagaagagcggtggacgccatgaacaagcatggttgtcaggtgcacttcggccgctggctgatcgaaggatccccttacgtcgtacttttcgacatcggatatagcgcctggaatcttgataggtggaagggtgacctgtgggaggcgtgctcggtgggcattccataccacgacagagaggccaacgacatgctgatctttggctcactgaccgcttggttcctgaaggaggtcaccgaccacgctgatggaaagtacgtggtggcccagttccacgaatggcaggccggaatcgggctcatactgtccagggctcgcaagctgccaattgccactatcttcaccacccatgcgaccctgctcgggagatacctgtgcgccgctaacattgacttctataaccacctcgataaattcaatatcgataaagaagcgggagagcggcagatctaccatcggtactgcatggagcgcgcgagcgtgcactgtgcacatgtgttcaccactgtgtcagagatcactgcaatcgaagcggagcacatgctcaagcgcaagccagacgtggtcactcctaacggactcaatgtgaagaaattctcagctgtgcacgaattccaaaatctccacgcaatgtacaaggcacggattcaagacttcgtccgtggacatttttacggccatctggactttgatctcgaaaaaacgctgttcctgtttatcgcagggcggtacgagttcagcaataagggcgccgacatctttctggaatcattgtcgcggctcaacttccttctgcggatgcacaagtcggacatcaccgtgatggtcttttttatcatgccggccaaaaccaacaacttcaatgtggagactctcaagggccaagcagtgcgcaagcagttgtgggacgttgcacacagcgtgaaagaaaagtttggaaagaagctctacgacgcactccttcgcggcgaaatccctgacctcaacgatattctggacagggacgacctgactatcatgaagagagcgatcttttcaactcagagacaaagcctgccgcccgtcactacgcacaacatgatcgatgactcgactgatccgatcctgtccaccatccggcgcatcggactgttcaacaacaggaccgatagagtgaaggtgatcctgcatcccgaatttctgagctcgacctcacctttgctgccaatggactacgaggaatttgttcgcggatgtcatttgggagtgttcccatcatactacgaaccttgggggtacacccccgccgaatgcacggtcatgggcatcccgtccgtgaccacgaacctctccggtttcgggtgcttcatgcaggagcacgtggccgatccaactgcctacggcatttacatcgtcgaccgccgcttccggtccccggacgattcctgcaatcagctgaccaagttcctgtacggattctgcaagcaaagtcgacggcagagaatcattcagcggaatagaaccgaacggctctcggacttgctggattggcgctacctgggaaggtactaccaacacgctcgacacctgactctgtcgcgcgccttcccagataaattccatgtggaacttaccagccctccgaccacggaggggttcaaatacccgcggccctcgagcgtcccgccgtctccgagcggatcccaggcgtcgtcgccacaatcctccgatgtggaggacgaagttgaggatgaacgctacgacgaggaagaggaggccgagcgcgaccggctgaatatcaagtcgccgttctctctgtcccatgtgccgcatggtaagaagaagctccacggagaatataagaac

SEQ ID NO: 210378 - DNA, 2109 bp, Artificial Sequence
  derived and/or modified sequence
atgttgagaggacggtctcttagtgtgacatccctgggtggtctgccgcagtgggaggtggaagagttgcccgttgaggagctgctgctgttcgaggttgcttgggaggttacaaataaagtcggcggtatctacaccgttatccagacaaaagctaagactaccgctgacgagtggggcgagaactattttcttatcggaccctacttcgagcacaacatgaagacccaggtcgaacagtgtgagcccgtaaacgatgcggtgcgacgggctgtggacgcgatgaacaaacatggttgccaggtgcactttggaaggtggctcatcgaagggtccccgtatgttgtgttgttcgacattgggtacagtgcatggaatttggacaggtggaagggcgacctttgggaagcttgcagtgtaggtatcccctaccacgacagggaggcaaatgacatgcttatcttcggaagtctcaccgcttggtttctgaaagaggtaacagatcacgcggacggcaaatatgtggtagcgcagttccacgaatggcaggccggaattggtctcatcttgagccgcgccagaaagcttcccatagctaccatcttcacaacgcatgctactctgcttgggcgctatctctgcgcagcaaacatagacttctataaccacctggataaatttaacattgacaaggaagcgggggagcgccagatctatcataggtactgcatggagcgcgcctccgtgcactgcgcccatgtcttcaccaccgtgtctgagatcaccgcaatcgaagctgaacacatgctcaaaaggaaacccgatgtcgttacccctaacggactgaatgtcaaaaaatttagtgccgtgcacgaattccagaacctgcacgctatgtataaagctagaatccaggacttcgtgaggggccacttttatggacatttggacttcgatctggagaaaacactgtttctgtttattgccggtagatatgaattctctaacaaaggcgctgacatctttctcgaatctctctcacgactcaattttctcctgcgcatgcataaaagcgatattactgttatggtgttcttcataatgcccgctaaaacaaataacttcaacgttgaaactctcaaagggcaggcagtgcggaaacagttgtgggacgttgcccactcagtgaaagagaagttcgggaagaaactctacgacgccttgctgaggggtgagattcctgacctgaacgacatcttggatcgcgacgatctgacaattatgaagcgcgctatcttctcaactcagcggcagtccctcccgcccgtgacaacccataacatgatcgatgactcaactgatcctatcttgtccacaatacggcgaatcggattgttcaacaatcggactgatcgagtgaaagtcatcctgcacccagagtttttgtcttccaccagtcctctcctgccaatggactacgaggaatttgtgaggggatgccacctgggagtctttccaagttactatgagccgtggggttatactccagccgaatgtactgtcatgggtatcccctcagtgacaactaacctgtcaggctttggatgcttcatgcaggagcatgtggctgaccctactgcttacggcatctatattgtggaccgcagattcagatcacccgatgatagttgcaatcagctgacgaagttcctgtacggattttgcaaacagtcacggcggcagcggatcattcagcggaataggactgagcgcctgagtgatctcttggattggaggtatctgggcagatactaccagcatgcccgccacctcacactttctagagcattccccgataagttccacgtggagctgactagtccgcccacaactgaaggatttaaataccctcggccttctagcgttcctcctagcccgtccggcagccaggcctctagcccacagagttccgacgttgaggacgaagtggaggacgagcggtacgacgaggaggaagaggctgagagggacaggctgaatataaagagcccttttagcctgagccacgtgcctcacggaaagaagaagctgcacggtgagtacaagaat

SEQ ID NO: 210379 - DNA, 2109 bp, Artificial Sequence
  derived and/or modified sequence
atgctacgcggccggtctctctccgtgacatcccttggtgggctgccccagtgggaagtcgaagagctgcctgtggaggaactactactctttgaggtggcctgggaggtgactaacaaggttggaggtatttatacggtgattcaaacaaaggctaagactacggccgatgagtggggtgaaaattactttctgatcggaccctattttgagcataacatgaagacgcaagtcgagcaatgcgagccggtgaacgacgccgtcagaagggcggttgacgcgatgaacaaacacggctgtcaggtgcacttcggccgttggcttatagagggaagcccatacgtcgtcctgtttgacataggctactcagcttggaatctggataggtggaagggtgacctctgggaagcttgcagtgtgggcatcccttaccacgacagggaggcaaacgatatgttaatttttggctctctaaccgcctggttcctgaaggaggtgactgatcatgcagatgggaaatacgtggtagcccagttccacgagtggcaggctggtatcggcctgatcctatctcgggctaggaaactgcccatcgcaaccatatttacaactcatgccactctgctaggccgttatctatgcgctgccaacattgatttctacaaccatttggataaatttaacattgataaagaggccggggagagacaaatctatcacagatactgtatggagagagcctctgtccactgcgcccatgtgttcaccaccgtgagcgagattaccgctatcgaagctgaacatatgctgaagcggaagcctgatgtcgtgaccccaaatggtctcaatgttaaaaagttctctgccgtgcacgagtttcagaatctgcacgccatgtacaaggctaggatacaggacttcgtgaggggacacttttacggccatcttgatttcgatcttgagaaaacactgttcctgttcatcgcggggaggtacgagtttagtaacaagggagccgacatctttctcgagtctcttagcagactgaacttcttactgagaatgcacaaaagcgacataaccgtcatggtgttttttattatgcctgccaagacgaataacttcaatgtggagactctgaaaggccaggctgttaggaaacaattatgggacgtggcacactccgtcaaagaaaagttcggaaaaaagctctatgacgccctgctgaggggggagattcccgaccttaacgatattcttgatcgggatgatttgaccattatgaaacgagcaattttcagcacacagcgccaaagcttgccgcctgtgacaactcacaacatgatcgacgactctactgaccctatcctgtccacaatccgtaggatcggcctgttcaacaaccgcacagatagggtgaaagtcatcctccatccagagttcctgtcttccacgtctccactgttgcctatggattacgaagagttcgttcgagggtgccacctcggtgtatttccatcttactatgaaccctggggttacacacctgctgaatgcaccgtaatggggatcccatccgtgaccaccaacctgtccggattcggctgctttatgcaggagcatgtagcggacccaactgcatacggaatttatatcgtggatcggaggttccggtccccggacgattcatgcaaccagctcacaaaatttttatacggattctgcaaacagagtcgtagacaacgcattatacagaggaacagaactgagcgcttgagcgatctgctggattggcgatatctgggccgttactaccagcacgctcgccaccttacactcagcagggcttttccagacaagttccacgtggaattgacttctcccccaacaaccgaaggtttcaaataccccaggccttcctcagtgcctcccagcccatctggctctcaagcttccagcccacaatcctccgatgtggaagacgaagtcgaagatgaaagatacgacgaagaggaagaggctgaaagagacagactgaacattaagtctcccttctccctgagccacgtcccccatgggaaaaagaagcttcacggcgagtataagaat

SEQ ID NO: 210380 - DNA, 2109 bp, Artificial Sequence
  derived and/or modified sequence
atgctgcgcggacggtccctttctgtgacctctctgggggggttgccgcagtgggaagtcgaagaactgccagtggaggaactcctgcttttcgaagttgcctgggaggtgaccaacaaggtcggaggaatctacaccgtcattcaaaccaaagcaaagaccacagccgacgagtggggtgagaactatttcctgatcggaccttacttcgaacataacatgaaaacccaggttgagcaatgtgaaccggtcaacgatgctgtgcgccgggccgtggacgctatgaacaagcatggatgtcaagtccactttggacgatggttgatcgaggggtctccatacgtggttctctttgatatcggatatagcgcctggaatctcgaccgctggaagggcgacctttgggaggcctgctccgtgggcatcccctatcacgaccgcgaagcgaatgatatgctcatcttcgggagcctgaccgcatggtttctcaaggaagtcactgatcatgcagatggaaaatatgtagtggctcagtttcacgagtggcaggcaggaattggtttgatcctgtccagagctagaaagctgcccattgctaccatcttcactacacacgccacactcctgggacgctatctctgcgccgccaacattgacttctacaaccatctcgacaaatttaacatcgataaggaggctggtgaacgacagatttatcacagatattgcatggaacgggcgagtgttcactgcgctcatgtgtttactactgtgtcagagataactgcgatcgaagcggaacatatgcttaaaagaaaaccagacgtagtgactccgaacgggctgaatgtcaagaaattctctgcagtgcacgagttccagaacctgcacgccatgtacaaagctaggatccaagacttcgttaggggccacttctacggccatctggactttgacctcgagaagacgctctttctcttcatcgctgggcgctacgagtttagcaacaagggtgcggacatctttctggagtctctgagtagactcaacttcttgctgagaatgcacaagtccgacattactgtcatggtttttttcatcatgcccgcaaagacaaataatttcaatgtggagacactcaagggccaggcagtgaggaaacagctttgggatgtggctcactccgtgaaggagaaattcggtaagaaactctatgatgcccttctgagaggggagatccccgacctgaacgatatcctggaccgagatgacttgactatcatgaaacgcgcaatcttcagtacccaacgccagtctctcccaccagtgacaacgcacaatatgattgatgacagtaccgatcctatactttcaactatccggaggattggcctgtttaataacagaacagatagggtgaaagtaatactccatcccgaatttctgtcaagcacaagtcctcttctgccaatggactatgaagaatttgttagggggtgtcacctgggagtcttcccatcttactatgagccctggggttacacaccagctgagtgtactgtgatggggataccctcagtcacgacgaacctgtctggcttcggatgttttatgcaggagcatgtggcagacccaaccgcttacgggatttatatcgtggatagacgctttagaagcccggacgacagctgcaaccagctgacgaaattcttgtacggcttttgtaagcagagccggaggcagcgaataatccagcgcaaccggaccgagaggctgtcagacctgctggattggagatatctgggcaggtattatcagcacgcgcggcatctgacacttagcagggcctttcccgataagttccatgtggagttgacctctccgccgaccacagaaggctttaaatatccaaggccttcttctgtaccaccttctccaagcggtagccaagctagtagcccccagtcctctgacgtggaagatgaggtggaggatgagcggtatgacgaggaagaagaggccgaacgcgatagactcaatataaagtcaccgttctctctttctcacgtgccacacggaaagaaaaagttgcacggagagtataaaaac

SEQ ID NO: 210381 - DNA, 2109 bp, Artificial Sequence
  derived and/or modified sequence
atgttgcggggccgaagtctgagtgtgactagcctggggggcctgcctcagtgggaagttgaggagctgcctgtcgaggagctccttcttttcgaagttgcctgggaggtgaccaacaaggttggtggaatatacaccgtgatacagactaaggcaaagacaacagcagacgaatggggtgagaattactttctgataggaccctactttgagcacaatatgaagacccaggtggaacagtgtgagccagtaaatgacgctgtgaggcgcgccgtggatgccatgaacaagcacggctgccaagtgcacttcggacggtggctgattgagggctccccttacgtcgtgttgttcgacataggctattcagcgtggaatctggatcgctggaagggagacctgtgggaagcctgcagtgtgggaattccctaccacgacagagaagcaaacgacatgctcatcttcgggagtttaacggcttggtttctgaaagaggtaactgatcacgcggatgggaaatacgtcgtggcccagttccacgagtggcaagccgggatagggctgattctgtcccgagcgcggaagctgcctatcgccacaatttttactacccatgccactctattaggccgctacctgtgtgcggctaatattgatttctataaccatctggataaattcaacattgataaagaagccggggaacgccagatttaccatcggtactgcatggaacgagcctccgtgcattgtgcacacgtgttcacgaccgtgagtgagattaccgcaatcgaggccgagcacatgctgaagaggaaacccgatgtggtgacacccaacggcctgaatgtgaagaagttcagtgcagtgcatgaatttcagaatctgcacgcaatgtacaaggcaaggatccaggatttcgtgcgaggacacttttatgggcacctggacttcgacttggagaaaacactgttcctgttcatcgctggtaggtacgaattctcgaacaagggcgccgatattttccttgaaagcctgagcaggctgaattttctccttagaatgcacaaatctgatatcacagtgatggtgttctttattatgcctgcaaagacaaataacttcaatgtcgagacactcaagggccaagctgtgcgaaagcaactctgggatgtcgctcactcagtgaaggagaagtttggcaaaaagctgtacgatgctctgttgaggggagagattcctgacctcaacgatatccttgacagagatgatctcacaataatgaaacgtgcgatctttagcacacagaggcagtccctgccacctgtcaccactcacaacatgattgacgattctaccgacccgatcctgtcgaccatccgtcggatcggcctgtttaataatcgcactgaccgcgtcaaggtgatcctgcaccccgagttcctgagttcgacaagtccccttctgccaatggactatgaagaatttgtgcggggctgccacttaggcgtctttccaagctattacgagccatgggggtacacccccgcagagtgcactgtaatgggcattccctcggtgaccactaacctctccgggttcggatgttttatgcaggagcatgttgctgatccaacagcttatggaatatacattgtggacagaaggtttagaagtcctgacgacagttgcaaccagctgaccaagtttctatatgggttctgcaagcaatccagacggcagaggattatacagcggaacaggactgagcggctcagcgatctgctggattggcgctacttgggcaggtactaccagcatgcaagacacctgacgctctcaagggcattccctgataagtttcacgtagaactgacgtcccctcccactactgaggggttcaagtatccacggcccagctccgtacctccatctcccagcggctctcaggctagttccccacagtcctctgacgtagaggatgaggtggaagacgaacggtacgacgaggaggaagaggccgaacgtgatagactgaacatcaagagcccattctctctgagccacgtcccacatggaaaaaaaaagctccatggagagtataaaaac

SEQ ID NO: 210382 - DNA, 2109 bp, Artificial Sequence
  derived and/or modified sequence
atgctaaggggccgatcactgtccgtgaccagtctcggtggtcttccacagtgggaagtagaagaactacccgtggaagaattgctcctcttcgaagtggcttgggaggtgacgaacaaagtaggggggatctacactgttatacagacaaaggcaaagacaaccgccgatgagtggggtgagaactactttctgattggtccatattttgaacacaacatgaagacccaggtggaacagtgcgagccagtgaatgacgctgtgagaagggctgtggatgccatgaataaacacggatgtcaggtgcactttggtcgctggttgattgaggggtccccctacgtggttctgtttgacattgggtactcagcttggaatctggatcgatggaaaggagacctttgggaagcttgctcagtggggatcccctatcacgatcgagaagccaacgacatgctcatctttggttccttaacagcctggtttctgaaagaagttactgatcacgctgatgggaaatacgtggtggcccaatttcatgaatggcaggcaggcatcgggctgatactctctagagcgcgaaaactgccaattgcaacgatctttacgacacacgccacactgctcgggcgatatctgtgtgctgccaacatcgatttttataaccacctggataagttcaacatcgataaggaagccggggagcgacagatttaccacaggtactgcatggaaagagcaagcgtgcattgcgctcacgtttttaccaccgtcagcgaaataactgccatcgaggctgaacatatgctcaagaggaagccagatgtggtaaccccgaacgggctcaatgttaaaaaattctccgcagtgcacgagttccaaaacttacacgccatgtacaaagcgcgaatccaggacttcgtgaggggacacttttatgggcatctggatttcgatctggagaaaaccctgttcttatttattgccgggcgatatgagttcagtaataagggagccgacatcttccttgagtctctgagtaggttaaatttcctcctgaggatgcataaatctgacattacagttatggtgttcttcatcatgcctgctaagacaaacaactttaatgtcgaaacattgaaaggacaggccgtccgtaaacagctctgggacgtggcgcattcagtgaaggagaaatttgggaaaaaactgtacgatgctcttctacgaggggagataccggatctcaatgacatcttggatcgggatgatctcaccattatgaaaagggcgattttcagtacgcaaagacagtccctgcctccagtgaccacgcataatatgattgacgacagtactgatcccatcctaagtacaatccggagaatcggcctctttaataaccgaaccgatagggtgaaggtgatcttgcatcccgaattcctgagttctacctcccccttattgcccatggactacgaagaatttgttcgaggctgtcacttgggcgtgttcccgtcgtactacgaaccttggggctatactcctgctgagtgcactgtcatggggatcccttccgtaacaacaaatcttagtgggtttgggtgcttcatgcaggagcacgtcgcggatccaactgcctatggcatctacattgtcgataggcggttccggagccccgatgattcctgcaaccaactgaccaaatttctgtacgggttctgcaagcagtcaaggaggcaacggataatccagcgaaatcgaaccgagaggttgtcagacctgctggactggcggtaccttggcagatattatcaacacgcgcgtcatctcacactctctagagcatttcccgataaattccacgtcgagctgacttctccccccacaaccgaagggttcaagtacccccgcccatctagtgtcccccctagtcctagtggttcacaagccagctcgccacagtcctcggacgtagaggacgaggttgaggatgaaagatacgatgaagaggaagaggccgagagagatcgacttaatatcaagtcaccattcagtctatcccacgtccctcacgggaaaaagaaactgcatggggaatacaagaac

SEQ ID NO: 210383 - DNA, 2109 bp, Artificial Sequence
  derived and/or modified sequence
atgttgagaggacggtccctgtccgtgacatcgcttggcgggcttcctcaatgggaggttgaagagcttccagtggaggaactgcttctcttcgaggtggcctgggaagtaaccaacaaagtcggcggcatttacacggtcatccagaccaaagcaaaaaccaccgcagatgagtggggtgagaattacttcctcatcggaccttatttcgaacataatatgaagacccaggtggaacagtgtgagcccgtcaacgacgcagttaggcgagccgtcgatgctatgaataagcatggatgtcaagtgcacttcggtcgctggctcatcgagggtagcccttacgtagtgctcttcgatattggctattcggcttggaaccttgataggtggaagggcgatctctgggaggcgtgttccgttggaattccgtaccacgatagagaagccaatgacatgctgatattcggcagcctgacagcttggtttttgaaggaggtaacggatcacgcagacgggaagtacgtggtcgcgcaatttcatgaatggcaggctggaattggccttatcctgagtagagccaggaaattacctattgcgaccatatttactacccacgctactctacttggtcgctacctatgcgcggcaaacattgatttctacaatcatctggacaaatttaatatagataaggaggcaggcgaacggcagatctaccaccggtattgtatggagagggctagcgtgcactgtgctcatgtgttcacaactgtttcggaaatcacagctatagaggccgaacacatgttgaaacgtaagcccgacgtggttacccccaacgggctcaatgtaaagaaattctccgccgtgcatgaattccaaaaccttcatgccatgtataaggccagaatccaagacttcgttagaggacacttctacggccacctcgacttcgacttggagaagacgctgttcttgttcatcgcagggagatacgagttttcaaataagggcgcagatatattccttgaaagcctgagccggctgaacttcctgttacggatgcataagtccgacattaccgtgatggttttctttatcatgcctgctaaaaccaacaatttcaatgtcgaaaccctcaaaggccaggcggttaggaaacaactgtgggacgtagcacattcagtaaaggagaagtttggcaagaaattgtatgatgccttgctgcgaggagagattcctgacttgaacgatatactggatcgcgatgacttgacaatcatgaaaagagcgatctttagcactcagcgtcaatccctcccacccgtaaccacacataacatgatcgatgattctactgatcccatcctgtctactattcgcaggatcggcctgtttaacaaccgtactgatagagttaaagtgatcctccatcccgaatttctaagctcaacaagccctctactgcccatggactacgaggaatttgtgaggggatgccacctcggcgttttcccaagctattacgagccctgggggtatacgcccgccgaatgcactgtcatgggcattccgagcgtcacaaccaacttgtccggttttggatgcttcatgcaagagcacgtcgcagatccgacggcatacgggatttatattgttgataggcgcttccgcagccccgatgacagctgtaaccagctcaccaaattcctttatggcttctgcaaacagtcacggagacagcgaataatacagcgcaatagaacagagagactcagcgacctgttggattggcgttatttgggcagatactatcaacacgctcgccacctgaccctgtcacgagccttccctgataaattccatgtcgagcttacttccccacccacaacagaaggctttaagtacccacgccctagttctgtgcccccttccccttcaggcagccaggctagctccccccaatcctccgatgtggaggatgaagttgaggatgaacgctatgatgaggaggaggaagccgagcgtgaccgactcaacatcaagtctcctttcagcctttcacacgtgccgcacggcaagaagaaactgcatggggagtataagaac

SEQ ID NO: 210384 - DNA, 2109 bp, Artificial Sequence
  derived and/or modified sequence
atgttgcgaggaaggtcattgtcagtgaccagcctgggggggctcccccagtgggaagtcgaggagctgcctgtcgaagagctccttctattcgaggtggcttgggaggttactaacaaagtagggggaatttacacagttatacagacaaaggccaagaccacagccgatgaatggggggagaactattttctgataggcccctactttgagcacaatatgaagacacaagtcgagcagtgtgagcccgttaatgacgcggtcagacgcgctgtagatgcgatgaacaagcacgggtgtcaggtacactttggacgatggctgattgaagggtctccttatgtcgtcctcttcgatatcggttacagcgcttggaacctcgatagatggaaaggcgacctctgggaggcttgttctgtaggtatcccttaccatgatcgtgaagctaatgatatgttgatttttggctcactgacggcgtggttccttaaggaggttaccgatcatgctgacggaaagtatgtggtggcccagtttcacgaatggcaggccggtattggcctaatcctgtctagggctcggaaactccccatcgcaacaatatttactacacacgcgaccttgctagggcgctatctgtgtgctgcgaacattgatttctacaaccacttagataagttcaatatagacaaggaggcaggagaacggcagatttatcatcgctactgcatggaacgagcttcagtccattgcgcccacgttttcacaacagtttcagagatcacagctattgaggcggaacacatgctgaaacgaaaacctgatgtagtaacccccaatggattgaatgtcaagaagttctctgctgttcacgagttccagaacctgcacgcgatgtacaaggcacggatccaggattttgtccgcggtcacttttacggccatcttgatttcgaccttgaaaagaccctgttcttgtttattgcaggacgatacgagttttctaacaaaggggctgacatcttcctcgagtctcttagtcgacttaactttctcctcagaatgcacaagtcagatatcacagtcatggtgtttttcataatgcctgctaagaccaacaacttcaacgtcgagaccttaaagggacaagcggtccgtaaacaactgtgggacgttgcgcactccgtgaaagaaaaatttgggaagaagctctatgatgccttgctgcgcggggagatccctgaccttaatgacattctagatagagacgacctgactattatgaagagagcaatcttcagtacccaacgccagtccctgccgccagtgaccacacataatatgattgatgattccaccgatcccatcctgtccactatcagaaggatcggcctattcaacaatcgtaccgacagggtgaaggtcatcctgcatcccgagttcctgtctagtactagccccctcttgcctatggactacgaagagttcgttcggggttgccatctgggcgtgttccccagctattatgagccctggggctatacacccgctgagtgtacggtcatgggtatcccctccgtaactacaaatcttagtggattcggttgtttcatgcaggagcacgtcgcagacccaactgcctatggcatctacattgtcgatcggcgctttaggagccctgacgactcttgtaaccagttgacaaagttcctgtacggcttttgtaagcagagtagacgccagcggataatccagagaaataggaccgaaagactctccgatctgttagactggagatacctgggcaggtattaccagcacgcccgacacctaacactgtcacgcgcgttcccggataaattccacgtggagttaactagtccccctaccaccgaagggttcaaatatccgagaccgtcgtcagtgccgcccagtccctccggcagccaggcgtcctctccacagtccagtgatgtcgaagatgaggtggaggacgagaggtacgatgaggaggaggaagcagagcgtgaccggcttaacatcaagagcccattcagtttatcccacgtgcctcacgggaaaaagaagctgcatggcgaatacaagaac

SEQ ID NO: 210385 - DNA, 2109 bp, Artificial Sequence
  derived and/or modified sequence
atgcttagagggcggagcttgtcagtcacctctctcggaggtctgcctcagtgggaagttgaagaactccctgtggaagaactgttgctgtttgaggtagcatgggaggttacaaataaagtgggcgggatttacacagtaattcagaccaaagctaagactaccgctgacgaatggggagaaaactacttccttatcggaccgtattttgagcataacatgaagacacaggtcgagcagtgtgagcccgtcaacgacgcagtgcggcgagcagtggacgccatgaataaacacggatgtcaggtccactttggacgttggcttattgagggcagcccatacgtagtcctctttgacatcggttactcggcgtggaatttagatcgctggaaaggagacctttgggaggcttgttctgtgggcatcccataccacgatcgggaagccaacgatatgttgatcttcggctctctcacagcttggttcctgaaagaagtcacagatcatgcagatggaaaatatgtcgtagcccaattccatgaatggcaggccggaatcggactaatcctctctcgcgctcgaaagctcccgatcgccaccatcttcaccacccacgccaccctgctgggccgttatttgtgcgccgccaatatcgatttctataaccacttagataaatttaatatcgacaaggaggccggggagcgccagatttaccatcgctattgcatggagcgggcctccgttcactgcgcacatgtcttcaccaccgtaagtgaaattacagccatcgaggctgaacatatgctgaaaagaaaacccgacgtggtgactcccaacggcctaaacgttaagaagttcagcgctgtacacgagttccagaacctgcatgctatgtacaaggcgcgcatacaggatttcgtccgaggacatttctatggccacctggactttgatctagagaagacattattccttttcatagccggacggtacgagttctccaacaagggagccgatatctttttggaatccctatccagactgaactttctactgcgtatgcataagagcgatatcacagtcatggtctttttcatcatgcctgccaaaaccaacaacttcaacgttgagactcttaaggggcaggccgtgcgcaagcaattgtgggatgtggctcacagcgtaaaagaaaagttcggaaagaagctctacgacgcgctactgcgcggggagatacctgacctgaatgatatcttagaccgcgacgacctgacaatcatgaaacgggcgattttctctacacagcgccagagtcttcctcccgtaacaacccacaacatgattgacgatagcaccgaccctatcctcagcactattaggcggatagggttgtttaataataggactgacagagtcaaggtgatcctgcacccagaatttcttagctccacctctcccttgctcccaatggactacgaagaattcgtacggggatgccatttgggggtatttccatcatattacgagccatggggctacactcctgcagagtgcacagtgatggggatcccgtctgtgacgaccaacctgtctggcttcggatgcttcatgcaggagcatgtcgcggatcccaccgcatacggaatttacatcgtggaccgccggtttcgttccccggacgacagttgcaaccagctgaccaagtttctctatggcttttgcaagcagtcccgtcgtcagagaatcatccagcgaaatagaacggagcgcctctctgatctgcttgattggcggtacctcggtcgatactaccagcacgccagacatctcactctgtccagagccttcccagacaaattccacgtggaactgactagcccacctacaaccgaggggttcaaatatccacgtcccagtagtgtccctccatctcctagtggaagccaggcctccagtccacagtcttcagacgtcgaggacgaagttgaagatgagagatacgacgaagaagaggaagctgagcgggatcggcttaacatcaagtcccccttctctctgtcccacgttccacacggaaagaagaaattacacggcgaatacaagaat

SEQ ID NO: 210386 - DNA, 2109 bp, Artificial Sequence
  derived and/or modified sequence
atgttgcgtggaagaagtctctcggtgacatctctgggaggcctgccgcaatgggaagtagaggaacttccagttgaggaattgctattattcgaagtcgcttgggaagtcacaaataaagttggaggaatatatacagtaatccagacgaaagcaaagacaaccgcagatgagtggggagagaactatttcttgatcggtccttattttgaacataatatgaaaacgcaagttgagcaatgtgagcccgtcaatgatgctgtgcggcgcgctgtcgatgcaatgaataagcatggatgtcaagttcattttggccgttggctaatcgagggttccccgtatgtcgtcctattcgatattggatactctgcttggaatttggaccgctggaagggagatttgtgggaggcatgttctgttggcatcccatatcatgacagagaggcaaatgatatgctaatcttcggatccttgaccgcgtggtttttaaaggaagtgactgatcatgcagacggaaagtatgtggtcgctcaattccatgaatggcaagcggggatcgggttaatcctgtcgcgagcaaggaagttgccgatcgcaacaatcttcacaacccacgctactttgttgggaagatatctttgcgctgccaacatagatttttataatcacctggataaattcaacattgataaagaagcaggagagcgacagatttatcatcgttattgtatggagagagcttctgttcattgtgcacacgttttcacaaccgtgagcgaaatcaccgcaatagaggctgaacacatgttgaaaagaaaaccagatgtagttacaccgaacggattaaacgtcaagaaattctcggctgttcatgaattccagaatcttcatgccatgtataaggctagaatccaagacttcgttagaggtcatttctatggacatttggatttcgatttggagaaaacactgttcttgtttattgctggtcgatatgaattctcaaacaagggggctgatatttttcttgaatcactatcgagactgaatttcctactgcgaatgcataagagtgacattacggtgatggtgttttttattatgccagcaaaaactaataatttcaatgttgaaacattgaagggccaagcagttcgtaagcaattgtgggacgtcgcgcattcggtgaaggaaaaattcggaaaaaaactttacgatgctcttctccgtggtgaaataccagacctcaatgatattctcgatcgcgatgatctgacgattatgaaacgggcaattttttctacgcaaagacaatcactgccaccggttactacacataatatgattgatgattcaacagacccaatacttagtactatacgacgtattggactctttaataatcggacagatagggtaaaggttattctacaccctgagttcctgtcatcgacatctcctctactgccaatggattacgaagagtttgttagaggttgccatcttggggttttcccttcctattatgagccatggggatatacgccggccgaatgtaccgttatgggtatcccgtcagttaccacaaacctcagtggtttcggatgtttcatgcaagaacacgtggctgaccctacggcatacggtatttacatagtggatcgaaggtttcgatctccagacgattcctgcaatcagttgaccaaatttttgtatggattctgtaaacagtcaagacgccaacggattatccagcggaaccgaaccgaaagactttctgatttgttggattggaggtatctgggaagatactatcaacatgcgcgtcatttaactctttcaagagctttcccagacaaattccatgttgaattaacgtcgccgccaactacagaaggcttcaaatatcctcgcccaagttcagtgccaccatctccgtcaggatcccaagcatcttcaccacaatcttctgatgttgaagatgaggttgaagatgaacgatacgatgaggaagaggaagctgaaagagatcgtctgaatataaaaagccccttctcgctctcacatgttccgcatggaaaaaaaaagctccacggggagtacaaaaac

SEQ ID NO: 210387 - DNA, 2109 bp, Artificial Sequence
  derived and/or modified sequence
atgctccgtgggagaagtctgtccgtgacgtcattgggagggctcccccagtgggaagttgaagaactccccgtggaggagcttctgttgtttgaagttgcttgggaggttaccaataaagtgggcggaatctacacggtcatacagacaaaggcgaagacaactgctgatgaatggggagagaattattttctcatcgggccctactttgagcataacatgaaaacccaggtggagcaatgtgagccggttaacgacgccgtaaggcgggctgtggatgcaatgaacaagcacgggtgccaagtgcatttcggccgctggctgatcgaaggctccccctacgttgtgctgttcgacatcgggtactccgcatggaacctggatcgctggaagggcgacttatgggaggcttgctccgtaggcatcccctatcacgaccgcgaggctaatgatatgcttatctttggttctttgaccgcttggtttctcaaagaagtgaccgatcacgccgacgggaagtacgtggtagcccagttccacgaatggcaggctggcataggcctcattctgtctagagcacgaaagttgcctattgccacaatattcacaactcacgccacattactgggacgctacctttgcgctgcaaatattgacttttacaatcacctcgacaagttcaacatcgataaggaagccggagagcggcagatctaccatcgctactgtatggaaagggcctctgtgcattgcgcccacgtctttaccacagtcagtgaaataacagctatcgaagcggaacacatgctaaagcgcaaaccagacgtggttactccaaatggcctcaatgtgaaaaagttcagcgctgtgcatgagtttcaaaacctgcatgccatgtacaaggccagaattcaggactttgtacgaggccacttttacggacatcttgacttcgacctcgagaagaccctgtttctgttcatcgcaggacggtacgagttcagtaataagggggctgatatttttcttgagtcactcagcaggctcaacttcttgttgaggatgcataagagcgacatcacagtcatggtgtttttcattatgcccgctaaaacgaataattttaatgtggagacactgaagggccaggctgtccgtaagcagctgtgggatgttgcccactccgtcaaggaaaaatttggaaagaaactgtatgacgccctgcttcgcggggaaattccggatctgaacgacattcttgaccgagacgatcttacaattatgaaaagggccattttttccacgcagcgccagtcgctgccacctgtgacaacccacaatatgattgatgacagcactgacccgatactatccaccatccgcaggattggccttttcaacaaccgcaccgatcgggtgaaggtgatcctgcatcctgagttcttaagctctacatccccactgctccccatggattatgaagagttcgtacgcggatgtcacctaggtgtatttccaagttactatgaaccatggggatacactccagccgagtgcactgttatgggtattccgtccgtgaccacgaatctctcggggttcggctgtttcatgcaggaacatgttgccgacccaaccgcatatgggatctatatcgtggatcggcgcttcaggtcgcctgacgattcctgtaatcagttaacaaagtttctgtacggattttgtaaacagagtcgacggcagcgtatcattcagagaaaccgcactgagcgtttgtctgaccttttggattggcggtatctgggcagatattatcagcatgctcggcacttgaccctctctcgtgcttttcccgacaagttccatgtcgagctgacatcacctcctactacagaggggttcaagtatccgaggcctagtagcgtgcctccatcccccagtggatcccaggcaagcagtccgcagtcgtccgatgtggaagacgaggtggaggacgaaagatatgatgaggaagaggaggctgaacgtgaccggttgaacataaaatcaccatttagcctgtcacatgtgcctcatggtaagaagaaattacacggagagtataaaaat

SEQ ID NO: 210388 - DNA, 2109 bp, Artificial Sequence
  derived and/or modified sequence
atgctccgggggcgctctctttcggtgactagccttggcggactcccacagtgggaagtggaggaacttccagtcgaagaactgctgttgttcgaagtggcttgggaggtgactaacaaggtggggggaatctacactgtgattcagaccaaggcaaagaccaccgcggacgaatggggtgaaaactacttcttgatcggcccatactttgagcataacatgaaaactcaggtggagcagtgcgagccggtgaacgacgcggttagaagagcggtcgacgccatgaataaacatggttgtcaggtccacttcggccggtggctgatcgaaggatctccgtatgtcgtgctgttcgacataggatacagcgcctggaacctcgatcgctggaagggcgatctgtgggaggcctgctcagtgggcatcccctaccatgaccgggaggcaaatgacatgctgatttttggctctctcacggcatggttcctgaaggaggttaccgaccatgccgacggcaaatacgtggtggcacagttccatgaatggcaagcaggcatcggattgattctgagtagagcccgcaaactgccgatcgcgaccattttcaccactcacgcgacccttcttggacggtatctgtgtgctgctaatatcgacttctacaaccatttggataagttcaatattgacaaagaagccggagagcgccagatctaccacagatactgcatggaaagggctagcgtgcattgcgcacacgtgttcactaccgtgtccgaaatcacggccatcgaagctgaacatatgctgaagaggaagcccgatgttgtgactcctaatggcctgaacgttaagaagttttcggcggtgcacgaattccagaacctgcatgcgatgtacaaagccagaatccaggacttcgtgagaggccacttctacgggcatctcgacttcgacctcgaaaagactctttttcttttcatcgctggccgctacgagttctctaacaaaggcgccgatatctttttggaaagtctctcccgcctgaacttcctgctgaggatgcacaagagcgacatcaccgtcatggtgttcttcatcatgccggcaaagaccaacaatttcaatgtcgaaactctgaaaggtcaggcggtgagaaagcagctgtgggatgtggcacactccgtgaaggagaaattcggaaagaagctctacgacgcacttctgcggggggaaataccggatctcaatgatatcctggaccgtgacgatctgaccatcatgaagcgcgcgatcttttcgacccagagacagtcactccccccggttaccacccataacatgattgacgactccactgacccgattctgagcactattagacgcattggcctctttaacaatcgcaccgatcgggtcaaggtgatcctgcaccctgagttcctttcatccaccagcccgttgctgccgatggattacgaagaattcgtcaggggttgccacctgggagtgttcccatcgtactacgagccctggggctacactcctgccgaatgtactgtgatgggcatcccttccgtgaccactaatctgagcggttttggttgcttcatgcaagaacacgtggctgacccaacggcttacggaatctatatcgtggatagacggttccgatcaccggatgacagctgcaaccagctcaccaagtttctgtacgggttttgtaagcaatcgcggcgccaaagaatcatccagcgtaaccggaccgagcggctctccgatctgctggactggcggtacctcggacgctactaccaacatgcccgccacctgacgctcagccgcgccttcccggataagttccacgtggagctgacgtccccgccaaccactgagggtttcaaatacccgaggccttcttcagtgccaccttccccgtcaggatcgcaagctagctcaccccaatcctccgacgtggaagatgaggtggaagatgaacgctatgacgaggaggaagaagctgaaagggatcggttgaacatcaaaagccccttttcactgtcgcacgtcccccacggaaaaaagaagttgcacggagagtacaagaat

SEQ ID NO: 210389 - DNA, 2109 bp, Artificial Sequence
  derived and/or modified sequence
atgctccggggacgctccctgagcgtcacctcattgggaggactcccacagtgggaagtcgaagagctgccggtcgaagaactgcttctcttcgaggtggcctgggaagtcaccaataaggtcggaggcatctacacggtgatccaaactaaggccaagaccaccgcagacgagtggggagaaaactacttcctgatcggcccctactttgaacataacatgaaaacccaggtggagcagtgcgaaccggttaacgacgcagtgcgcagagcggtggatgctatgaacaagcatgggtgccaagtgcacttcggccgttggctgatcgaaggctcaccgtatgtggtcctctttgacattggatactccgcgtggaacctggatcggtggaagggagatctctgggaagcgtgctccgtgggaattccgtaccatgatcgggaggccaacgacatgctcatttttggaagcctgaccgcatggttcctcaaagaagtgaccgaccatgccgacggaaaatacgtggtcgctcagtttcacgaatggcaagccggtatcggcctgattttgtcgagggctcggaaattgccgatagcaaccatcttcaccacccacgcgactctgctgggacggtacctgtgcgccgccaacatcgacttctacaaccacctggataagttcaatatcgacaaggaggccggtgaacggcagatctaccaccgctattgcatggaacgcgcatcggtgcactgtgcacatgttttcaccactgtgtcagagatcaccgcgattgaggctgagcacatgctcaagcgcaagccagacgtcgtgactccgaatggactgaacgtgaagaagttcagcgcagtgcacgagttccagaacttgcacgcaatgtataaggcccggatccaagatttcgtgagaggacatttctacggacacttggatttcgacctcgagaaaacgctgttcctgtttatcgcgggccggtacgaattttcgaataaaggggccgatatcttcctcgaatccctgtcccggctgaacttcctccttcggatgcacaagtcagatatcaccgtgatggtgttctttatcatgccggccaagactaacaatttcaacgtcgagactctgaagggacaagcggtgcggaagcagctttgggacgtggcgcactccgtgaaggaaaagttcggaaagaagctgtacgatgctctcctccggggagaaatccccgatctcaacgacatccttgatcgcgacgacctgaccatcatgaagcgcgcgatcttctcgacccagcggcaaagcctcccaccggtgactacccataacatgatcgacgactccaccgacccgatcctgtcaaccatcaggaggatcggcctgttcaacaaccggaccgaccgcgtgaaagtgatcctgcatccggaattcctgagctccacctcgccgcttctgccgatggattacgaggagttcgtcagggggtgccacttgggggtgttcccatcctactacgagccatggggatacaccccggcagagtgcaccgtgatgggcattccgtccgtgactactaacctgtccggattcggctgtttcatgcaggagcacgtggccgaccctaccgcgtacggaatttacatcgtcgaccgccgcttccggagccctgatgactcgtgcaatcagttgactaagttcctgtacggcttctgtaaacaaagccgcaggcagcgcataatccagagaaaccggactgaaagactctcagacctcctggattggcgctacttgggcagatactatcagcacgccagacacttgactctcagtagggccttcccggacaagttccacgtggagttgacgtcgccgcctaccaccgagggtttcaagtacccacgcccaagctcggtccccccaagcccatcgggatcccaagcatcgtccccacagtccagcgatgtggaggacgaggttgaggacgaacgctacgacgaggaggaagaagcggagcgggaccgcctcaacatcaagagccccttttccctttcccacgtgccgcacgggaagaagaagctgcacggagaatacaaaaac

SEQ ID NO: 210390 - DNA, 2109 bp, Artificial Sequence
  derived and/or modified sequence
atgctcagggggcgatcgctttcagtgacgtcgcttggaggacttcctcagtgggaggtggaggaactgcctgtcgaggaactgcttctttttgaagtggcatgggaagtgaccaacaaagtgggcggaatctacaccgtcattcagactaaggccaagactaccgcggatgaatggggtgaaaactattttcttataggcccttactttgagcataacatgaaaacccaagtcgaacagtgcgaacctgtgaacgatgcagtgagacgtgccgtggacgcaatgaataaacacgggtgccaggtgcatttcggacgctggctgatcgagggatccccctacgtggtcctcttcgatatcggctattccgcatggaaccttgatagatggaaaggagacttgtgggaagcatgctccgtgggcattccataccatgatcgggaagcaaacgacatgctgatctttgggtccctcacggcgtggttccttaaagaggtgacggaccatgcagacggaaaatacgttgtggcacagtttcatgaatggcaagcgggaattggtcttattctgtcccgcgcaagaaagctgcctattgcgaccatctttactactcatgcaacccttctcggtaggtacctgtgcgcagccaatattgatttctacaatcacctcgataagtttaacatagataaagaagcaggagaacggcagatataccatcgttactgcatggaaagagcaagcgtgcactgtgcacatgtgtttaccactgtgagcgaaattacggcaatcgaagcagaacatatgcttaaaagaaaacctgacgtggtcaccccaaacggcctgaatgtgaagaagttttccgctgtgcatgaatttcagaaccttcatgctatgtacaaggcacggatccaggactttgtgcgcggacatttctacggtcatttggattttgacctggaaaagactcttttcctgtttattgcagggcgatacgaattcagcaataaaggtgcggatatctttttggaatcgctttcacgccttaactttttgctccggatgcacaagagcgatatcactgtcatggtgttcttcataatgcccgcaaagacgaacaactttaacgtggagactctcaagggtcaggcagtgcgcaagcaactgtgggacgtggcccattccgtgaaggagaagtttggaaagaagctgtacgatgctctgctccgcggagagatccctgacctgaacgatattctggatcgggatgatctgaccataatgaagagggcaatattcagcactcaaagacaatcgctgccccccgtcaccactcataacatgatcgatgattccaccgatcccattctgtccaccatcaggagaatcggtctgtttaacaatagaactgacagagttaaggtgatactgcatcctgaatttctttcatcgacgtccccgctgttgccaatggattacgaagaatttgtgaggggctgtcatcttggcgtttttccatcctactacgagccatgggggtacaccccagcagagtgcactgtgatgggaatcccctccgtgaccactaatctctccggttttggctgtttcatgcaggaacatgtggcagaccctaccgcatacgggatctatattgtcgacagacgcttccgcagcccagacgatagctgcaaccaacttactaagtttctgtacggcttctgtaaacaatcgcggaggcaacgaatcatccagagaaacagaaccgaacgattgtcggatcttctcgactggagataccttggaagatactaccaacatgcacggcatctcacgctgtcgcgggccttccctgacaaatttcacgtcgaacttacgtccccacctaccactgaaggttttaagtacccacggccttcctctgtgcccccatctcccagcggctcgcaggcgtcctccccgcaatcctcggatgtggaagatgaagtggaggacgaacgttatgacgaggaggaagaagccgaaagagatagacttaacattaagtcccctttctcactgtcccatgtcccccacggtaagaagaagctccatggagagtacaaaaac

SEQ ID NO: 210391 - DNA, 2109 bp, Artificial Sequence
  derived and/or modified sequence
atgttaagaggtaggagcctctctgtgacaagtctggggggccttcctcagtgggaagtggaggaactccctgtggaggagttgctgttgttcgaggttgcatgggaagtgacaaacaaggtgggtggcatatacaccgttattcagacgaaagccaagacaaccgctgatgaatggggggagaattattttctgattggcccttactttgagcacaacatgaaaacccaagtggaacagtgcgaacctgtgaacgacgcagtgcgtcgggcagtcgacgccatgaacaagcacgggtgccaggtccactttggacgctggttgatcgaggggagtccatacgtagtcctcttcgacatcggctactcagcctggaacctcgatcggtggaagggagacttgtgggaagcatgtagcgtcggcatcccgtaccacgatagggaggccaatgatatgctaatctttgggtcgcttactgcatggttcctgaaagaggtaacagatcatgccgatggcaagtacgttgtggctcagtttcatgagtggcaggcaggcatcggactaatcctgagccgcgcccgtaagctacccatcgcaaccatcttcactacccacgccacattgctggggaggtacctctgcgccgcaaatatcgatttttacaatcatctggacaagtttaacatagacaaagaagccggagagcgacagatctaccacaggtattgcatggagagggcatctgtgcattgtgcccatgtgttcacaactgtgtctgaaataaccgctattgaggccgagcacatgctgaagaggaaacctgacgtagtgactccaaacggcctgaacgtgaagaaattcagtgccgtgcacgagtttcagaatctccacgcaatgtacaaggcacgaatccaggactttgttagggggcacttctatgggcacctggattttgacctcgagaagacactgtttctcttcattgctggacggtatgaattttctaacaaaggcgcggatatatttttagaatccctgtcacggcttaactttcttctccggatgcacaaatcggacatcacagtgatggtattttttattatgcccgcgaagaccaataattttaacgtggaaactctgaaaggccaggcggtgagaaagcagctctgggacgtcgcccactccgtcaaggagaaatttggcaaaaagctgtacgatgcgcttcttcgcggggagattcccgatctgaatgatattctagaccgggatgatttgaccattatgaagcgagcaatttttagcacccagcgacagtctctgccccctgtgacaacccacaatatgatcgacgatagtacagaccccatcctctctaccatcaggagaattggactgtttaataaccgaaccgaccgtgtgaaggtgatcctgcatccagaatttttgagttcaacatcgcccctgcttcctatggactatgaggaatttgtgcggggatgccacctgggtgtctttccaagttattacgaaccgtggggatatactcccgctgagtgtactgtgatgggcataccctctgtgacaactaacctttctgggttcggctgcttcatgcaggaacatgtggcggatccaacagcctatggcatatatattgtggacaggcggtttaggagtcccgacgattcctgcaaccaactgaccaagtttctctacgggttttgtaagcagtccaggagacagcgcatcatacagcgaaatcggacagagcgcctgtcagacttgttggactggaggtacctaggacggtattatcagcacgcacggcatctcactctgtcccgagcattcccagacaagttccatgtcgagctcacatctccacccacaactgagggcttcaaatacccgcgtccctccagcgtaccaccatcaccgtctgggtcacaggcctcaagtccacaatccagcgacgtagaagatgaggtggaagacgagagatatgacgaagaggaagaggctgaaagagaccgcctgaatattaaatccccattctctttgtctcacgtgccgcacggtaagaagaagctccacggggaatataagaac

SEQ ID NO: 210392 - DNA, 2109 bp, Artificial Sequence
  derived and/or modified sequence
atgctccgagggcggtctctcagtgtgacatccctcggagggctccctcagtgggaagtggaagaactcccagtcgaagaattactgctgttcgaagtagcttgggaagtgacaaataaagttgggggaatttatactgtcattcagacaaaagcaaaaacaacggccgatgaatggggggaaaattacttcctgatcggaccctatttcgaacataatatgaaaactcaggtggaacagtgtgaacccgtgaatgatgctgtcagaagggctgtagatgctatgaacaaacacgggtgtcaggtacattttggaaggtggctaattgaaggatcaccttatgttgtgctgttcgatatcgggtatagtgcatggaaccttgatcggtggaagggagatctctgggaagcttgtagtgtcggaatcccctatcacgatcgggaagctaatgatatgctcattttcggatcccttactgcttggttcttaaaagaagtgactgatcacgcagatgggaagtatgtcgtggcccagttccatgaatggcaggccggaataggacttattcttagtcgggctaggaaacttcccatcgccactatcttcactactcatgccactctcctgggaagatatctgtgtgccgccaacatagacttttataatcacttagacaaatttaatattgacaaagaagctggagagcgccagatatatcaccggtattgtatggaacgggccagtgtgcactgtgctcatgtgttcacaacagtgagtgaaatcacagctattgaagccgaacatatgcttaaaaggaaaccagatgtggtaactcccaatggattgaatgtgaaaaaattctcggctgtgcacgaatttcagaacctccatgcgatgtacaaagcccggattcaggatttcgtgaggggacatttttacggacatctagattttgatctagaaaaaacactgtttctattcatcgctgggagatacgaattttctaacaaaggggcagatatatttctagaatctctcagtaggctaaatttcctcctgcggatgcataagtctgatataacagtcatggttttttttattatgccagccaaaacaaacaactttaacgttgaaacacttaaagggcaggctgttagaaaacagctgtgggatgtggcacactctgttaaagagaagtttgggaaaaaactatatgatgccctccttagaggggagattccagatctcaacgatatattggatagagatgatcttactatcatgaaaagggctatcttctcaactcaaagacagtccctcccacccgttactacacacaatatgatcgatgactctacagatccaatacttagtacaatccgacggatagggctctttaacaaccgcactgacagggtcaaagttatcctgcatcctgaatttctcagttctacttcccctctgttgcctatggattatgaagaatttgtgagggggtgccacctcggggtatttccctcatactatgaaccttgggggtatacacccgccgaatgtactgtcatgggaatcccctccgtcacaactaatctatctgggtttgggtgcttcatgcaggaacatgttgccgatcctacagcttatggaatttatatcgttgataggaggttcagaagtcctgacgattcttgtaatcagctgacaaaatttctctacggattctgcaagcagagtcgcaggcagcggatcatccagagaaatcggactgaacgattgtcggatctcctggattggcgatacctaggaagatattaccagcacgccaggcacctcacactcagtagggccttccccgataaatttcacgttgaactcacttctccccccacaacagaagggttcaagtatcctcggcctagtagtgtgcctcccagtccatctgggtctcaggcatctagtcctcagtcttctgatgttgaagacgaagtggaagatgaacgctatgatgaagaagaagaagctgagagagatcgcctgaatatcaaatctcccttctcgctctcgcatgtaccccacggaaaaaagaaattgcacggggaatataagaat

SEQ ID NO: 210393 - DNA, 2109 bp, Artificial Sequence
  derived and/or modified sequence
atgctaaggggccgctccctgagcgtaactagcctcggagggctgccacaatgggaagtggaggagctccctgtggaagaactcctgttatttgaggtagcttgggaagtgacaaataaggtgggcgggatttacacagtgatccaaacaaaagcgaagaccaccgcagatgaatggggggaaaattatttcctcattggcccctactttgaacataatatgaaaacgcaggtggagcagtgtgagcctgtcaatgacgcggtacgtagggcagttgatgcaatgaataagcacgggtgccaggtgcattttgggaggtggctgatagagggcagtccttatgtcgtcttgttcgatatcgggtacagtgcttggaatctcgatcggtggaagggagacctgtgggaagcttgttctgtggggattccatatcatgatcgggaggccaacgacatgctgatctttggctccctcaccgcctggtttttgaaggaagtcaccgaccatgccgatggcaagtatgtcgtggcacagttccatgagtggcaggccggcatcgggctgatattgtcccgggcaagaaaactcccaatcgccaccatcttcaccacccacgctacgctccttgggcggtatctctgcgccgcaaacatcgatttttacaaccatctggataaatttaatatcgataaggaggccggagaaagacagatataccatcgctattgcatggagcgcgcatctgtgcattgtgcacacgtgttcacaacagtaagtgagataacagcgatcgaagctgaacatatgcttaaacgtaagcccgacgtggttacacctaatggcctgaacgtgaaaaagttctccgcggttcatgagttccaaaacctccacgcgatgtacaaagccagaattcaggattttgtaagagggcacttctatgggcacctcgactttgacttggagaaaactctatttctatttattgccgggagatatgagttctcaaataaaggcgcagacatcttccttgagagtctcagccggcttaattttcttctgagaatgcacaagtcagacatcacagtcatggtcttctttattatgcccgccaagaccaacaattttaatgtggagacattgaagggccaggcagtgagaaagcaactttgggacgtggctcacagcgtgaaagagaaattcggaaagaaactgtacgatgcccttctacgcggtgaaatcccggacctgaatgacatactggatagagacgacctaacaatcatgaagcgcgcgattttcagcacccagcgacaatcgctccctccagtgactacccataacatgatcgacgatagcactgaccccatactctccactatacgtagaataggcttgtttaataaccggacagatagggtcaaagtgattctccatcctgagttcctctcttccacttcccctctgctccccatggattatgaagaatttgtgcgcgggtgtcatctcggcgtctttccaagttactatgaaccttgggggtacacgcccgccgaatgtactgtgatgggcatacctagtgtaaccactaatttaagtggctttggatgcttcatgcaagagcacgtagccgatccaaccgcctacggaatttatatagttgaccggaggttccggtctcccgatgactcgtgtaatcagctgactaagtttctttatggattctgcaaacagtcacgaaggcaacgtattattcaacgtaaccgcacagaaagactgtcagacctcttggattggcggtatctcggcaggtattaccagcatgcccgccatcttactttaagtcgagctttcccagacaagttccatgtggagttaacaagccctccgactaccgagggttttaagtatcctcggccatcctcagtgccaccttccccttccgggagtcaggcatctagcccacagtccagcgacgtcgaggatgaagtggaggacgagcgatatgatgaggaagaagaggccgaaagagataggttaaatatcaaaagccccttttcacttagccacgtcccccatggtaagaaaaagctccacggagagtacaagaat

SEQ ID NO: 210394 - DNA, 2109 bp, Artificial Sequence
  derived and/or modified sequence
atgctcagaggacggtccctctcggtcaccagtctcggaggtctgccacagtgggaagtcgaagaactgccggttgaggaactgctcctgtttgaagtggcgtgggaagtaactaataaggtgggcggcatctacactgtcatccaaaccaaagctaaaaccactgcggacgaatggggggagaactatttcctgattggaccatacttcgaacacaatatgaaaacccaggtcgagcagtgtgagccggtgaatgatgcagtgaggcgcgccgtcgacgcgatgaataagcacggatgtcaggtccatttcggaagatggttgatcgaaggatcgccatacgtggtgctgtttgatatcgggtacagtgcctggaacctcgaccgctggaagggggatctgtgggaggcttgctccgtgggaatcccttaccacgaccgcgaagcaaacgacatgctgattttcggatcgcttactgcgtggttcctcaaggaagtgaccgatcacgcagacggcaagtacgtcgtagcgcaattccacgaatggcaagctgggattggtctgattctctcccgagcccgtaagctgcctatcgcgactatctttactacgcatgcgaccctcctcgggcggtacctgtgcgccgctaacatcgacttctacaaccacttggacaagttcaatattgacaaagaagctggggagcggcagatctaccaccgctactgcatggagcgcgccagcgtccattgcgcccatgtgttcactaccgtgtccgagatcaccgccatcgaagcagagcatatgttgaagcggaagccggacgtggtgactcccaacggactcaatgtcaagaagttctcggcagtgcacgaatttcagaacctgcacgccatgtataaggctcgtatccaggactttgttcggggccacttttacggacatcttgacttcgacctcgagaaaacccttttcttgttcatcgcaggtcgctatgaattctcaaacaagggagcagacattttcctggaatcactttcccgcctgaacttcctgctccggatgcacaaatcggatatcactgtcatggtgttctttatcatgcctgccaaaactaacaactttaacgtggaaactctgaagggacaggctgtgcggaagcagttgtgggacgtggcccactctgttaaggaaaagttcggaaaaaagctgtacgacgcgctgttgagaggcgagattccagatctgaatgacatcttggaccgggacgatctcaccatcatgaagagagcgatcttctccacccagcggcaatctctcccgccagtcactactcacaacatgatcgacgattcaaccgaccctatcctgtcgactataaggagaattggcctcttcaacaacaggacggatagagttaaagtgatcctccaccccgaatttctgagcagcacctcaccgcttctgcctatggattacgaagaattcgtgcgagggtgtcacctgggagtgttcccatcgtactacgagccgtggggatacacccccgcagaatgcaccgtcatgggaatcccgtcagtgactacgaatctgtccggcttcggatgcttcatgcaggagcatgttgctgatcctaccgcctacggcatctacatcgtcgacagacgctttcgctcaccagacgattcgtgcaatcagctcaccaagtttctctacggtttctgcaaacagtcacggcgccaaagaatcatccaaagaaaccgcactgagcggctgtccgacctcttggactggagatacctgggcagatattaccaacatgcccggcatctgacgctgtcgcgcgccttcccggataagttccatgttgaacttacctcgcccccaaccaccgaaggattcaagtacccgcgccctagttctgtgccgccgtcgccatccggcagtcaagcatcctccccgcagtcgtcggatgtggaggatgaggtggaggatgaacggtacgatgaggaggaggaagcagaacgcgaccgactgaatatcaagtcccccttctcactgtcccacgtgccgcatggaaagaagaagttgcacggagaatacaaaaac

SEQ ID NO: 210395 - DNA, 2109 bp, Artificial Sequence
  derived and/or modified sequence
atgctgcggggaagaagtctgagtgtcacctcactgggaggactgcctcagtgggaagtggaggagctgcccgtggaagagctgttgctgttcgaggtcgcctgggaggtcacaaataaagtggggggaatctataccgttattcagaccaaagccaagaccacggcagacgagtggggggagaattatttcctgatcgggccctattttgaacacaacatgaagacccaagtcgagcaatgcgagcctgtgaacgacgccgtgaggcgggccgtggatgccatgaataagcatgggtgtcaggtccactttggaaggtggctcattgagggctccccttacgttgtgctgttcgacattggctattccgcctggaatctggataggtggaagggagatctttgggaggcatgttcagtgggcatcccctatcacgatcgagaagccaacgatatgctgattttcggcagcttgacagcatggttcctcaaggaggtcaccgatcacgctgatggaaagtatgtggtggcacagtttcatgaatggcaggcagggatcggattgattctgtctagagctaggaaattgcccatcgccaccatatttaccacgcatgccacgttgctgggcaggtacctctgtgccgccaacatagatttctataatcaccttgacaaattcaatatcgacaaagaggccggtgagcggcaaatctatcaccggtactgcatggaacgcgccagcgttcactgcgctcacgtttttactactgttagtgagatcaccgctatcgaggccgaacacatgctgaaacgcaaacccgacgtcgtgacaccgaatggactgaacgtaaagaagttttccgctgttcacgaattccagaacctgcacgctatgtataaagctcgcatccaagactttgttcgaggacacttttacggacacttggatttcgacttggagaaaaccctgttcctgttcattgcaggcaggtatgagtttagtaataagggagcagatatttttctggagtccctgagtcgactgaacttccttctgcggatgcacaagtcagatatcaccgtgatggtgttctttatcatgcccgctaagacaaacaattttaatgtggagacgcttaagggacaggccgtgcggaagcagctgtgggatgtggcgcattcagtaaaagagaagttcggaaaaaagctgtacgatgcactcctgcgaggcgagatccccgatctgaatgacattctggacagggacgacctcaccataatgaagcgcgcgatattctcaactcagagacagtctttgccaccggtgacgacccacaacatgatcgacgactctaccgacccaattctgagcaccatccgcagaattggcttgtttaataaccggactgaccgggtaaaagtgatcctgcacccagagttcctctcaagcacctctccactgctgcctatggactacgaggagtttgtgcgggggtgccacctgggagtgtttccttcctactacgagccctggggctacactcctgccgaatgcaccgtcatgggaatcccctcagtcaccactaacctgtctgggttcggctgctttatgcaggaacacgtggcggatcctaccgcatatggaatctacatcgtggacaggcgctttcgcagccccgatgattcctgcaatcagttgacgaagttcttgtacgggttttgcaagcagtccagacggcagcgcatcatccagaggaaccgcacagagcggctgtcagatctgctcgattggcggtacctggggcggtattatcagcacgctcggcacctgacactgtctcgggccttcccagacaagttccatgtggaactgacctctccccccaccaccgagggctttaagtacccacggcccagttcagtgcccccgtcaccaagcggttcacaagccagctccccacagagcagtgatgttgaggacgaggtcgaagacgagaggtacgacgaggaagaagaagctgaacgcgacagactgaacatcaagagtcccttctcattgagtcatgtgcctcacggtaaaaaaaagctgcacggggaatacaaaaat

SEQ ID NO: 210396 - DNA, 2109 bp, Artificial Sequence
  derived and/or modified sequence
atgctgaggggacgctcactctccgtgacttcgctgggcggactgcctcaatgggaggtggaagagttgcctgtggaggaactgctgctctttgaagtggcatgggaagtcaccaacaaggtcggaggcatctacaccgttatccagacgaaagctaaaaccactgctgacgagtggggcgagaactacttcctgatcgggccatacttcgaacacaatatgaaaacccaagtcgaacagtgcgagccggtgaacgatgcggtgagaagagccgtggatgctatgaataagcatggctgccaggtgcacttcggaaggtggcttatcgaaggatccccatacgtggtcctgtttgatatcgggtactccgcatggaacctcgaccgctggaagggcgacctgtgggaggcatgctcggtcggcattccatatcacgaccgggaggccaatgatatgcttatctttggctcacttactgcgtggttcctcaaggaagtgaccgatcatgccgacggaaaatacgtcgtggcccagttccacgagtggcaggcgggaatcggactgattctgagcagagcccgcaagttgccgattgctactatcttcactacccacgctacccttctgggtcggtacctctgcgctgcaaatatcgacttttacaaccacctggacaaattcaacatcgacaaagaggctggcgagaggcaaatctaccaccgctactgcatggaacgcgcctcggtccactgcgcccacgtgttcaccaccgtgtccgaaatcacggcaattgaggcagagcacatgctgaaacggaaaccggacgtggtgaccccaaacggactcaatgtcaaaaagttcagcgcggtccacgaatttcagaacctgcatgccatgtacaaggcccgcattcaagacttcgtgcgcggccacttctacggccacctggatttcgatctcgaaaagaccctgttcctgttcatcgccggacgctacgagttctcgaacaaaggagcggatatcttcctggagagccttagccggctcaattttctgcttcgcatgcataagtcagacatcaccgtcatggtctttttcatcatgccggccaagaccaataacttcaatgtggaaaccctgaaggggcaagcagtccggaagcagctgtgggatgtggcccactcagtgaaggagaagttcggcaagaagctgtacgatgcactgctgcggggcgaaatccctgacctcaacgacatcctggaccgcgatgatctcaccatcatgaaacgggcgatcttctcaacccagcggcagtcactgccgccggtgaccacccataacatgatcgatgattcaactgacccaatcctgtcgactatccgccgcatcggactgttcaacaatcgcaccgacagggttaaggtgatcctgcacccggaatttctctcatcgacctcgccgcttctgcccatggactatgaggagtttgtcagaggatgtcatctgggggtctttccatcatactacgagccatggggatacacccctgccgagtgtaccgtaatggggatcccgtcagtgaccactaacctgtcggggttcggatgcttcatgcaggaacacgtggccgatccgactgcgtacgggatctacattgtggaccggagatttaggtcccctgatgattcgtgcaatcagctgactaagttcctttacggattttgcaaacagagcaggaggcaacggattatccaacgaaaccgcaccgaacgcctctctgatctgctggattggcgctacttgggacggtactaccagcatgctagacatctgactttgagcagagcgttcccagataagttccatgtcgaactgacgtccccgcctacgaccgaaggattcaaatacccgcgcccgagctccgtgccacctagcccgtcgggatcgcaagcgtcgtcaccacaatcctccgatgtggaagatgaggtggaggacgagcgctacgacgaagaggaagaggccgaacgtgaccgcctgaatatcaagtcacctttcagcctgagccacgtgccgcacgggaagaagaagctccacggcgaatacaagaat

SEQ ID NO: 210397 - DNA, 2109 bp, Artificial Sequence
  derived and/or modified sequence
atgctgaggggcaggtccctcagcgtcacctccctcggaggacttcctcaatgggaagtggaggaacttcctgtggaggagttgctgctgtttgaggtcgcctgggaggtcactaataaggtgggtggaatctacaccgtcatacaaaccaaggcaaagactaccgcagatgaatggggtgagaattactttctgataggaccttactttgaacataacatgaaaactcaagtggaacagtgcgagccagtgaacgatgcagtgagacgcgccgtggatgctatgaataaacacgggtgtcaggtccacttcggaaggtggctgatcgaaggatcaccatacgtcgtgctcttcgacatcgggtactcagcatggaatctggataggtggaagggggatctgtgggaggcctgttccgtgggaatcccataccatgacagagaggcaaacgatatgctgatttttggatcgcttactgcttggtttttgaaggaagtaactgatcacgcagatggtaagtacgtggttgcacagttccatgaatggcaggcaggtatcggactcatcctctcccgagcgagaaagctcccgattgcaactatctttaccacccatgctactctccttgggcgttacctgtgtgcagcaaacattgacttttacaaccatttggataagttcaacatagataaggaagcgggtgaaagacagatctaccatagatattgcatggaacgagcatcggtgcactgtgcccatgtttttaccaccgtgtcggaaattaccgccattgaagcagaacatatgctgaaacgcaaacctgatgtggtcacccctaacggacttaacgtcaaaaagttctccgccgtgcacgagttccagaacctgcacgcaatgtacaaggcacggatccaggactttgtgagaggacacttttacggccacctggacttcgatctcgaaaagaccctgtttcttttcatagccggaaggtatgaattttccaacaagggcgcagatatctttttggaaagcctttcgcgtctgaattttctcctcagaatgcataaaagcgatataaccgtgatggttttcttcataatgcctgcaaaaaccaacaacttcaacgtggaaacgctcaagggacaggcagtgaggaagcaactctgggacgtcgcacacagcgtgaaggaaaagtttgggaagaagctgtacgacgccctccttagaggggagattcccgatctcaacgacattctggaccgggacgatcttactattatgaaacgcgcaatctttagcactcagcgtcaatcgctgcccccggtcactacccacaacatgattgacgactcaaccgatccaattcttagcacgatccgacgcattggtcttttcaacaacagaactgatagagtgaaggtcattctccatcccgagtttttgtcctctaccagcccgctcctgccaatggattacgaggaatttgtccggggatgtcatctgggagtctttccttcgtactacgaaccttggggatacaccccagccgaatgcactgtgatggggataccgagcgtgacgactaatctgagtggttttgggtgttttatgcaggagcatgtggcagatccgaccgcatacggcatttacattgtggaccggagattcagatcacctgacgattcatgcaatcaacttacgaaatttctgtacggtttctgtaagcaaagccgccgccaacgcattattcaaagaaatagaactgaacggctgtctgacctcctggactggcggtacctgggaagatactaccaacacgccagacatctcactcttagccgggcatttcctgataagttccacgtggagcttacttcgccacccaccaccgaggggttcaagtacccgcggccaagctcagtccccccatcaccatccggttcgcaagccagctcaccccaatcgagcgacgtggaggatgaagtggaggacgaacgatacgacgaagaggaagaagcggaacgggaccggctcaatatcaagagccccttctcccttagccacgtgccccatggtaagaaaaagctgcacggagaatacaagaac

SEQ ID NO: 210398 - DNA, 2109 bp, Artificial Sequence
  derived and/or modified sequence
atgctccggggccgttccctttccgtgacctcacttggtggcctgcctcagtgggaggtagaagaactcccggtcgaagaactgcttctgtttgaagtcgcatgggaagtcaccaacaaagtgggtggtatttacactgtgattcagaccaaggctaaaactaccgccgacgaatggggagagaattacttcctgattggaccttactttgaacacaatatgaaaacccaggtcgagcaatgtgaacctgtgaatgatgcagtgcggcgggccgtggatgcaatgaacaagcacggatgccaggtgcattttggaaggtggctcatagaaggttccccctacgtggtccttttcgacattgggtacagcgcctggaacctcgatcggtggaagggagatttgtgggaggcatgcagcgtggggattccctaccacgatagagaggctaatgatatgcttatcttcgggtccctgactgcatggttccttaaagaagtgaccgaccatgcagatggtaagtacgttgtggctcagtttcatgaatggcaagcaggaattggacttattctcagccgcgcacggaagctccccattgcaactatctttaccacccacgcgacccttcttggacgatacctgtgcgcagcgaatattgacttctataatcatcttgataagttcaatatcgataaggaagcgggagaaagacagatttatcatagatactgcatggaacgcgcctcagtgcattgtgcgcatgtctttactaccgtgtcagaaataaccgccatcgaagccgaacatatgctcaagcgcaagccagacgtggtcactcccaacggactcaacgtgaaaaagttttcggccgtgcatgaatttcaaaatctgcatgcaatgtacaaggcacgaatacaagactttgtcaggggacatttctacggacatcttgattttgatctggaaaagactctgtttctcttcatcgcaggtcgttacgaatttagcaacaagggagccgacatttttcttgaatcccttagcagacttaacttcctgctccgcatgcataagagtgacataactgtgatggtctttttcataatgccagccaaaaccaataacttcaatgtggaaacccttaaaggacaagcagtgaggaaacaactttgggacgtggcgcactcggtaaaggaaaagttcggcaaaaaactttacgacgcacttcttcgcggtgagattcctgaccttaacgacattctggatagagatgatcttaccattatgaagcgcgcaatcttttcgactcaaagacaatcgctgccccctgtcaccactcataacatgattgatgattcaaccgatccaattctgagcaccatacggagaatcggattgtttaacaatcgtactgaccgcgtgaaggtcatccttcatcccgaatttctttcatctacctcccctctgttgcctatggactatgaagagttcgtccgcggttgtcacctgggagtctttccatcatactacgaaccatggggttacactcccgccgaatgcactgtgatgggaataccctcggtgacgacgaacctctcagggtttggatgcttcatgcaagagcatgtggcggaccccactgcgtacggtatctacatagtggacaggaggttccgatccccagacgactcctgtaaccagctgactaaattcctgtacggcttttgtaagcaatcgcgacggcaaaggattattcagcgtaatagaaccgaacggctcagcgacctgcttgactggcggtacctggggagatactaccaacatgctcgacatctcactctcagtagagcatttcctgacaagttccatgtggagcttacttcgccccccaccaccgagggcttcaagtaccctcgcccgtcctcagtgccaccctccccatcggggtcacaagcatcctcgcctcagagctccgatgtcgaagatgaagtggaagatgagcgctacgatgaagaggaggaggcggaaagagataggttgaatatcaagtcgcctttttccctgagccatgtgccacacggaaagaaaaagctgcatggagaatacaagaac

SEQ ID NO: 210399 - DNA, 2109 bp, Artificial Sequence
  derived and/or modified sequence
atgctgcgggggcgaagcttaagcgtgacctctttgggcggtctgccacagtgggaggttgaagagctgcccgtggaggaactgttgttatttgaagtcgcttgggaagtgaccaataaggtgggcggcatctacacagtgattcaaaccaaggctaagacgacagcggacgagtggggggagaattatttcttgattggtccctactttgagcataacatgaaaactcaagtggagcagtgtgagccagttaacgacgcagtccggcgcgctgtagatgcgatgaataagcacggatgccaggtgcacttcggacgatggctgatcgagggtagtccttatgtagttctgttcgatatcggctacagcgcctggaacctagaccgctggaagggggacctgtgggaggcctgtagtgtgggaatcccttatcacgaccgcgaagctaacgatatgctgatctttggctctctcaccgcctggtttctgaaagaagtcacggaccacgctgacggaaagtatgtggtggcacagtttcacgagtggcaggcaggcatcggtctgatcttgagcagggcaagaaaattgcctattgctacaatcttcaccacccatgccacattactcggtaggtacctgtgcgcggcgaacattgacttttataaccatctcgacaagtttaatatcgacaaggaagctggtgaacgccaaatctatcataggtactgtatggagcgagcatccgttcattgtgcccacgtattcacaactgtgagcgagattacagccatcgaagcggagcacatgttgaaacggaaaccggatgttgtcactcctaacggcctgaacgtgaaaaaattcagtgccgtccacgagtttcagaacttgcacgctatgtacaaggcaaggattcaagactttgtccgcggccacttctacgggcacttggattttgaccttgagaaaacgctgttccttttcatagctggacggtatgaattctccaacaagggggcggatatctttctggagtccctatcgcgcctcaactttcttcttcggatgcataagagcgatatcaccgttatggtcttctttatcatgcctgcgaagacaaacaattttaacgtggaaactctgaaaggccaggcggttcggaagcagctgtgggatgtcgcccactctgtcaaggagaaattcggaaagaagttgtatgatgcactgctccgcggcgaaatcccggatctcaacgatattctggacagagacgacctcacaatcatgaaacgtgccatattttctacccagagacagtcgcttcccccggtgacaacccataatatgatcgacgactctactgatcctattctatcaacgattcgcagaatcggtctgtttaacaaccgcaccgaccgcgtgaaggttatccttcatccagagttcctgagcagcaccagcccattactgcccatggactacgaggagtttgtccgagggtgtcacctgggggttttcccatcatattacgagccatggggatatactcccgcagaatgcaccgtgatgggaattcctagtgtgaccactaatctgtccggctttgggtgtttcatgcaggagcacgtggctgatcctaccgcgtacgggatatatatcgtggatagacgatttcgctcacccgatgatagctgcaaccagctgaccaagttcctttatggattttgtaagcagtcacgccggcagcgcattatccagcggaacagaaccgaacggctgtcagatctgcttgattggcgttacctggggcgctactaccagcatgcccgccacctaacgctgtcccgagccttccccgacaagttccacgtggaactgactagtccccctaccaccgaaggctttaagtacccacggccatcctctgtgcctccaagtcccagcggctcccaagcttcctcacctcagagcagtgatgtcgaggacgaggtggaggatgagcggtatgacgaggaagaggaagccgagcgcgaccgacttaatatcaaatccccattttctttgtcccatgtacctcacgggaagaaaaagttgcacggggagtataagaat

SEQ ID NO: 210400 - DNA, 2109 bp, Artificial Sequence
  derived and/or modified sequence
atgcttcgcggaaggtccttgtccgtcacctctctcggaggactgccccagtgggaggtcgaggagctcccagtggaggaactccttctgttcgaagtcgcctgggaggtgacgaacaaagtaggcggcatctacaccgtgattcaaaccaaagccaagaccaccgctgacgagtggggagaaaactatttcctgattggtccgtacttcgagcacaacatgaagacacaagtggaacagtgtgaacctgtgaacgatgccgtgcgccgggctgtggatgccatgaataaacatgggtgtcaggtgcacttcggtcgctggctaattgaggggtcaccctatgtggtgctcttcgatattggttactccgcatggaacctcgaccggtggaaaggagatttgtgggaagcctgttcagtggggattccttatcacgatagagaagccaacgatatgctgatatttggctccctgacagcatggtttcttaaggaggtcactgaccacgcggacggcaagtacgtggtggctcagttccatgaatggcaagccgggataggcctgattctgtccagagctcgaaaactgccaatcgctaccatctttaccacccatgcaacactgctgggacggtatctgtgtgcagccaatattgatttctataaccacctcgataagttcaatatagataaggaggcgggcgagcgacagatatatcatagatattgtatggaaagggcttctgtgcactgtgcacatgtatttacgacggtttccgagataaccgctatcgaggccgagcacatgttaaagcgaaagccagacgtggttaccccaaatggtctaaacgtgaagaaattttctgctgtccacgagtttcagaatttgcacgcgatgtacaaagctaggattcaggatttcgttagagggcacttctatgggcacctagattttgacctcgagaagaccttgttccttttcatcgccggaaggtatgagttctctaataaaggggctgatatcttcttggaaagcctctctagactgaatttcctgctccgcatgcacaagtccgatattacagtgatggtatttttcatcatgccagcaaagactaacaatttcaatgtggagactttaaagggacaggctgtgcgcaagcaactatgggatgtcgcacactccgtcaaggagaaatttggtaagaagctttatgatgcacttttgcggggagagatcccagacctcaatgacatcctggaccgggatgacctgacaattatgaagagagccatatttagcactcaacgacagagccttccgccagtgacaacacacaacatgatcgacgacagcaccgaccccatcctaagcaccatccggagaattgggctctttaataaccggacagacagggttaaggttatactgcacccggagtttttgagcagtacaagtccgctgttacccatggattatgaagaattcgttagggggtgccacctgggcgtattcccgtcgtattacgagccgtgggggtacacacccgccgagtgtaccgtgatgggcatacctagcgtgaccacaaacctgagcgggtttggatgcttcatgcaagagcatgtcgctgatcctacagcatacggcatttatatcgtggatagaaggttccgctctccagacgattcatgtaatcagttgacaaagtttttgtatggattttgcaaacagtccagaagacagcgcattatacagcgcaaccggactgagaggttgtccgatctgttagactggcggtatcttggtcgatattaccagcacgcccggcacctgactctttccagggcctttccagacaaattccacgttgagctgaccagcccgcccactactgagggctttaaatacccacggccctcttctgtacctccatcgccttcaggatcacaggcttcctcgcctcaaagtagcgatgttgaagatgaggtggaagatgaacggtatgacgaagaagaggaggctgaacgggacagattgaacattaagtcccccttttccctgtcgcatgtgccacacgggaaaaagaagctgcatggtgagtacaagaat

SEQ ID NO: 210401 - DNA, 2109 bp, Artificial Sequence
  derived and/or modified sequence
atgctgcggggacgctcgttgtcggtgactagcctcggcgggttgccccagtgggaggtcgaggaactgccagtggaggaattgctgctgttcgaggtggcttgggaggttaccaacaaggtgggaggtatctacactgttatacaaacgaaggctaagaccaccgccgatgaatggggcgagaactactttctgatcggcccgtatttcgagcataacatgaaaacccaagttgaacagtgcgagccggtcaatgatgccgtgcgccgcgcggtcgacgccatgaacaaacacggttgccaagtgcatttcggcagatggctgattgaagggtccccgtacgtcgtgctttttgatattggatactccgcatggaatctggaccgctggaaaggagatctctgggaagcatgttcggtgggtatcccctaccatgacagagaggcgaacgatatgcttatcttcgggtcccttaccgcttggttcctgaaagaagtcactgatcacgccgatggaaagtacgtggtcgcccaattccacgaatggcaggcgggaatcggtctgattttgtcccgggctcgcaagctccctatcgcgactatcttcactactcacgccaccctcctgggacgctacctctgcgccgctaatatcgacttctacaatcacctggataagtttaacatcgataaggaagccggcgagcggcaaatctaccatcggtactgcatggaacgcgcttcggtccattgcgcccatgtgttcaccactgttagcgaaattaccgcgattgaagcggaacacatgcttaagcgcaagccagatgtggtgactccgaatgggctgaacgtgaagaagttttcggccgtgcacgagttccagaacctgcatgccatgtacaaggcccgcatccaggatttcgtgcgggggcatttctacggacacttggatttcgacctggaaaagacgctgttcctcttcatcgcgggccgctacgagttttccaataagggcgccgacatctttttggagtcgctctctcggctcaactttctgctgagaatgcacaagtcagacattaccgtgatggtgtttttcatcatgccagcgaaaactaacaatttcaacgtggaaaccctgaaagggcaggcggtacggaagcaactgtgggatgtggcgcattcggtcaaggaaaagttcggaaagaaactttacgacgcgttgctccgcggagaaatccctgacctgaacgatattctcgaccgcgatgatctcactatcatgaaacgtgcaattttctccacccagcgccagtcactgccaccggtgacgacccacaatatgatagacgactccactgacccgatcctgtcgactatcaggagaattggcctgttcaataacaggacggatcgcgtgaaagtcatcctgcatccagaatttctgtcatcaacctccccacttctgccgatggactacgaggagttcgtgcgcggctgccatctgggtgtctttccgagctactacgaaccatggggatacaccccggccgaatgtacggttatgggcatcccgtcagtgactactaacctcagcgggttcggttgtttcatgcaggaacatgtcgctgaccctactgcctatggcatctatatcgtggaccggcggtttagatccccggatgattcgtgcaatcaactcactaagttcctttacggcttttgtaagcaatccagacgccagagaatcatccagcgcaacagaaccgaacgcctgtccgacctcctggactggagatacctgggtcggtactaccagcatgcccggcatctgacgctttcgcgcgccttcccggataagttccacgtggagcttacttcgcccccgaccacggaaggatttaagtatcctagaccgtcctcggtgccgccgagcccgtccggaagccaggcctcgtccccgcagtcatccgacgtggaggacgaagtggaggacgagcggtacgacgaggaagaagaggccgaacgcgatcggttgaacatcaagtcgccattctcgctctcgcacgtgcctcatgggaagaagaaacttcacggagaatacaagaac

SEQ ID NO: 210402 - DNA, 2109 bp, Artificial Sequence
  derived and/or modified sequence
atgctacggggaagaagcctttcggtgactagcttgggcgggctcccccagtgggaagtcgaagaactgccagttgaagaactgcttcttttcgaggtagcgtgggaagtgacaaataaggtaggcgggatttacaccgtaattcagacaaaagcgaagactactgccgacgagtggggtgaaaactactttctaatcggcccctactttgaacacaacatgaagacacaagtggaacaatgtgagccagtcaatgacgcagtgcggcgggcagtggacgcaatgaacaagcatggctgccaggtgcacttcggacggtggttaatagagggcagtccttacgtcgtgctgtttgatatcggttacagcgcgtggaacttggacagatggaaaggcgatctgtgggaggcctgtagcgtaggtatcccgtaccacgatagggaagctaacgatatgctcatatttggcagcctaactgcatggttcctgaaagaggtcactgatcatgctgatggaaagtatgtcgtagcccagtttcatgaatggcaagctgggatcggattaatcctctcgagggctcgcaagttacccattgcgaccattttcacaactcatgccacactgctgggacgatatctgtgcgccgccaacatagatttctacaaccacctcgacaagttcaacatagacaaggaagcgggggaacggcagatctaccacaggtattgcatggagcgcgcgtctgtccactgtgcccacgtgttcactaccgtgtctgagataactgctatagaggctgagcatatgctgaagcgaaagccagatgtggttacaccaaatggcttgaacgtaaaaaagttttccgccgtccatgaatttcagaacctgcatgctatgtataaggcaaggatccaggactttgtgcgggggcatttttacggccacttggattttgatttggagaaaactttatttctctttattgccgggcggtatgagttctcaaataagggggctgatatctttctcgaaagcctgagtcggctcaacttcctcctgagaatgcacaagtctgatattactgtgatggtgttcttcataatgccagctaaaaccaataacttcaacgtggagacacttaaggggcaggcggttcggaaacagttgtgggatgtggctcattctgtcaaggaaaagtttggtaagaagttgtatgacgctctcctccgcggcgagattcccgacctgaacgacatccttgatagggacgacctgacaatcatgaagcgggccatttttagtacccagagacagtccctcccaccggttaccacccataacatgattgatgactccacggaccctatcttgtcaaccattaggcggattggcctgttcaacaaccggaccgatagagtgaaagtcatcctccaccccgaattcctttcttcgaccagcccactcttgcctatggattacgaggaattcgttagagggtgccatcttggtgtgtttccgagttattatgaaccctggggctacactccagcagagtgcaccgtgatggggataccgtctgttaccacaaacttgagcggcttcggttgcttcatgcaggaacacgttgctgatcccaccgcatatggtatttatatcgtcgatagacgctttaggagcccagacgattcatgtaatcagctgaccaagttcctgtacggattttgtaaacagagtaggaggcaacgcatcatccagcgtaaccggaccgagcgtttgagtgatctactcgactggcggtaccttggccgatattaccaacatgcccgacatctaacactgtcgcgagctttccccgataaattccatgtggaactgacgagccctccaacaacagagggtttcaagtaccctagaccgtctagcgtgccaccttccccgtctggctcccaagcttcttccccccagagcagcgatgttgaggatgaggttgaagatgagcgctatgacgaagaggaggaagcagaacgagataggttgaatattaaatcaccattttccttatctcatgtgccacatggtaagaaaaagctccacggggagtacaagaac

SEQ ID NO: 210403 - DNA, 2109 bp, Artificial Sequence
  derived and/or modified sequence
atgctgcggggcagatccctttccgtcacttcactgggtggactcccccaatgggaggtggaagaactgcctgtcgaagagctgctcctgtttgaagtcgcctgggaagttaccaataaagtcggcggcatatacaccgtgatccaaacgaaagccaagactacggcggacgagtggggggaaaactacttccttattggaccttactttgaacacaatatgaaaacccaggtggaacagtgcgagccagtgaatgatgcagtgcgtcgcgcggtggatgcaatgaataaacacgggtgtcaggtgcacttcggtaggtggctgatcgagggatcaccctacgtcgtgcttttcgacattggatactcggcttggaaccttgatcggtggaagggcgatctttgggaggcatgctcggtgggaataccctatcatgaccgggaagcgaacgatatgttgatattcggcagccttaccgcatggtttctcaaggaagtcaccgatcatgccgacggcaagtacgtggtcgcacagtttcatgaatggcaggcaggaataggtcttattctctcccgcgcaaggaaactgcccatcgctaccattttcaccacccatgcaaccctgcttgggcgctacttgtgcgcagcgaatatcgacttttacaaccatctggataagttcaacattgacaaggaagctggagaaaggcagatataccatcgatactgtatggaacgagcatccgtccattgcgcacacgtttttaccacggttagcgagattacggccatcgaagccgaacacatgctgaagaggaagcccgacgtggtcacccccaatgggcttaacgtgaaaaagttttccgccgtgcatgaatttcaaaatctccatgcgatgtacaaggcaagaatacaagatttcgtgagaggccatttctacggtcacctggatttcgaccttgaaaagaccctctttttgtttatagccggtagatacgagttttccaacaaaggggcagacatttttcttgaatcactttcccgtctgaattttcttctgcgtatgcataaaagcgacatcacggtcatggtgtttttcatcatgccagccaagacgaataactttaacgtggagactctgaagggccaggcggtgagaaagcagctttgggatgttgcgcacagcgtaaaggaaaagttcgggaagaagttgtatgacgcactcctcaggggagagatcccagatcttaacgatatcctggatcgggatgatttgactattatgaagagagcaattttctcgacccaaaggcaatcactgccgcctgtgaccacccataacatgattgacgactccactgatcctattcttagcaccattcgaaggattgggctgtttaacaatcgcaccgacagggttaaggtgattcttcaccctgaatttctgagctccacttccccactgctgcctatggattatgaagaatttgtccgcggatgtcacctcggagtgttcccgtcatactacgaaccgtggggatacactccagccgagtgcacggtgatggggattccgtcggtcaccactaacctgtcgggatttggatgtttcatgcaggagcacgtggcagaccctaccgcttacgggatctacatcgtcgatcgtagatttagatcacctgatgattcatgtaatcagctgacgaagtttctctacggtttctgtaaacaatcccgcagacagcgcatcattcagcgaaaccggactgaaaggctttccgatctgctggactggcgctaccttggacgatactaccaacatgccagacaccttaccctctccagggctttccctgacaaatttcatgtcgaactcacctcaccaccaaccactgagggattcaagtacccaagaccaagttcagtaccaccgtcgccatcgggcagccaggcgagttcaccccaatcctctgacgtcgaagatgaggtggaggacgaacggtacgatgaagaagaagaagcagagcgcgaccgtcttaacataaagagccctttctcgctgagccacgtcccgcatggcaaaaagaagctccatggagaatacaagaac

SEQ ID NO: 210404 - DNA, 2109 bp, Artificial Sequence
  derived and/or modified sequence
atgctgagaggtcggtcgctgtccgtgacttcgctcggtggtttgccacagtgggaagtcgaagagttgcctgttgaggaacttcttctgttcgaagtggcgtgggaagtcaccaacaaggtcggtggtatatacactgttattcagaccaaggcaaaaaccactgcagatgaatggggggagaattactttcttatcgggccttactttgagcataacatgaaaacccaggtggaacagtgtgaaccagtcaatgatgcggtgaggcgcgcagtcgatgccatgaataagcatgggtgccaagtgcatttcgggagatggctgattgagggaagcccttacgtggtcctgtttgacattggatactcggcatggaacctcgacagatggaaaggagatctgtgggaagcatgctcggtgggaatcccataccatgaccgcgaagcgaacgatatgttgattttcggctcgcttactgcatggttcctcaaggaagtgacggaccacgcagatggaaagtacgtggttgctcaatttcatgaatggcaagccggaatcggacttattctctcacgcgcgcgaaaactgccaatcgcaactatctttaccacccatgcaacgctcctgggtcgctacctttgcgcagctaacatagatttctacaatcacctggataagtttaacatcgataaggaggcaggtgagagacaaatctatcacagatattgtatggaacgcgcgtccgtgcactgtgcacacgtgtttaccactgtgtcagagatcaccgcaattgaagctgagcacatgcttaagagaaagccggatgtggtcaccccaaatggcttgaacgttaagaaattctccgccgtgcatgaatttcaaaacttgcatgcaatgtacaaagcaagaatacaagacttcgtccgaggccacttttatggacacctggactttgatctggagaaaactctttttctgttcatcgcgggaagatacgaattctcgaacaaaggcgcggatatctttctggagtcattgtcacgactgaactttcttcttcgtatgcataaatccgatattaccgtgatggtgttctttatcatgccggcaaagaccaacaactttaacgtggaaactctcaagggacaagcggtccggaagcagctgtgggatgtcgcccattccgtgaaggagaaattcgggaagaagctgtatgacgctctgcttcgtggcgagattcccgacctcaacgacatactggatagagatgaccttacgattatgaagcgcgctatcttctccactcagagacagtcgcttccccctgtgaccactcataacatgatcgacgattcaactgaccctattctgtcaactattcgccgcataggactctttaacaatcggactgaccgagttaaggtgatacttcacccagagtttcttagctcaacgtccccactgctgccaatggattacgaagagtttgtgagaggttgccatctgggtgtgtttccaagctactacgaaccgtggggttacacccctgccgaatgtacggtcatggggatcccgagcgtgaccactaaccttagcggctttggatgtttcatgcaagaacatgtcgcggatcctactgcctacggcatttacatagtcgatcgtaggttcagatcccccgatgactcctgtaatcagctgacgaagtttctgtacggattttgtaagcagagcaggcgccaacgaatcattcagcgaaataggactgaacggctttcggatttgttggattggcgatacctgggacgctactaccaacacgcgcgacacctcacgctctccagagcatttcctgataagtttcacgtggaactgaccagccctccaaccaccgagggattcaagtacccccgtccttcgtcggtgcctccttcgccatctggatctcaagcatccagcccacaatcgtcggatgtcgaagatgaagttgaggacgaacggtacgacgaggaagaagaagcagaacgcgaccgtctgaacatcaaaagccctttctccctgagccatgtgccccacggtaagaaaaaacttcacggagaatacaagaat

SEQ ID NO: 210405 - DNA, 2109 bp, Artificial Sequence
  derived and/or modified sequence
atgttgcgaggccgaagtctgagcgtgacgtccctgggcggacttccacagtgggaggtggaagaactgcccgtggaagagctgctcctcttcgaggtggcatgggaggtaacaaataaagtaggcggcatctacacagtcattcaaaccaaagctaagaccacagcggacgaatggggggaaaattacttcctaatcgggccttatttcgagcacaatatgaaaacccaggttgaacaatgcgaacccgtcaatgacgccgtgcgcagagcagtggatgctatgaacaaacatggctgtcaggtacactttggacggtggctgattgaggggtcaccatacgtggtcctgttcgacataggatattcagcttggaatttggaccgatggaagggcgacctgtgggaagcctgttctgtgggcattccttaccacgacagggaggccaacgacatgctgatcttcgggtccctcactgcatggtttcttaaggaagtgaccgatcatgctgacggtaaatacgtcgttgcacagttccatgagtggcaggcaggtataggcttgatcctcagtcgagctaggaagctcccaattgccactatattcactactcacgcgacgctgctgggacgatacctgtgcgccgccaatatagatttttacaatcacctcgacaaatttaacatcgacaaagaagcaggcgaacggcagatttatcataggtactgtatggaaagagccagcgtccattgtgctcatgtgttcacaactgtcagtgagatcacagcaattgaggctgagcacatgttgaagcgcaagcctgacgttgtcacaccaaacgggctgaacgtgaaaaaattcagtgccgtacacgaattccagaacttgcacgccatgtacaaggcaagaatccaggactttgtgcgaggtcacttctacggtcatctggatttcgatttagagaagacgctgtttctgttcatcgcaggtcggtatgagttcagcaacaagggcgctgacatctttttggaatccctaagcagactcaactttttgctccgcatgcacaagtcagatattaccgtgatggtcttctttattatgcctgcaaagacgaataacttcaacgtggaaaccctgaagggtcaggcagtgcgaaagcagctgtgggacgtagcccactctgtaaaagagaagtttgggaagaaattatatgacgccttgttgagaggagaaatcccggacctaaacgatattctggatcgggacgatctgacaatcatgaaacgggctattttttccacacaaaggcagtcattgccaccggttaccacacataatatgatcgacgactccacggaccccatactgagtacaataaggcgcataggactgtttaacaatagaacagatcgcgtgaaggtaattttgcaccctgagttcctgtcgtccacaagcccccttctccccatggactatgaagaattcgtacgcggatgccaccttggtgtttttccctcttactatgaaccctggggctacactcccgcagagtgtacagtcatgggaatcccctcagtgaccacaaatctctcaggcttcggatgctttatgcaagagcatgttgctgatcccaccgcttatggtatctacatcgttgaccggcgcttccggagtcctgatgattcttgcaaccaactgacgaagttcttatatggtttttgtaaacagtctaggcggcagcgaatcatacaacgcaatcggacggaacggctttccgacctattggattggcgatacctcggccggtattaccaacacgctaggcacctcacattgagccgggccttccccgacaagtttcatgtggaactgacctctcctcccactaccgaggggttcaagtacccgcgcccatccagcgtcccaccttcacctagcggatcgcaagcgtcttcaccacagtcgtcagacgtggaagacgaagttgaagacgaacggtacgatgaggaggaagaagcagaaagggaccgcctgaacattaagtccccattttctctatcccacgtgcctcacggtaaaaaaaagcttcacggggagtacaagaac

SEQ ID NO: 210406 - DNA, 2109 bp, Artificial Sequence
  derived and/or modified sequence
atgctgcggggtcgcagtctgtccgtaactagccttggcggcctcccacagtgggaggttgaggagctgcccgtcgaagagttgcttctgtttgaagtcgcttgggaagtcacgaataaggtcggcggtatatataccgtgattcaaacaaaggcgaagaccacagccgatgagtggggcgagaattacttccttatcggcccctatttcgagcataacatgaagactcaagttgaacaatgcgaaccggtgaacgacgctgtgagaagggcggtggacgctatgaataagcacggctgccaagtgcatttcggcaggtggttgatcgagggaagtccatacgtagtgctgtttgacatcgggtacagcgcctggaatttagatcggtggaagggagacctttgggaggcttgcagcgtgggtataccatatcatgaccgggaggccaatgatatgttaattttcgggagcttaacagcctggtttctgaaagaagtcaccgaccatgcagatggaaaatacgtggtggctcagttccacgagtggcaggcgggtatcggcctcatcctgtcccgcgcccgtaaactcccaatagctaccatcttcactactcacgccacccttctgggtagatatctttgtgccgctaacatcgacttctacaaccatttggataagttcaatattgacaaggaggcaggtgaaagacagatataccaccgctattgcatggagagggcttccgtgcactgcgctcatgtattcaccaccgttagtgagatcacggctattgaagcggagcatatgctgaaacgaaaaccggacgttgtgactccaaacggtctgaacgtcaaaaagttcagcgccgtgcatgaattccagaacctgcatgccatgtacaaagcgcgcatccaggactttgtccgcggccatttctacgggcatctcgactttgacctagagaagactctgttcctattcatcgccggccgatatgagtttagcaacaaaggcgcagatatcttcctcgagagtctgagccggcttaacttcttgctcagaatgcataagtccgacattaccgtcatggtctttttcattatgccagcaaagacaaacaatttcaatgtcgagacccttaaggggcaggctgtgcgtaaacagctgtgggacgtggcccatagcgtcaaagagaaatttgggaagaaactgtacgacgctctcttgaggggggagattcccgatctgaatgacatcctagacagggacgatctgaccataatgaaacgggcgatcttctccacccaacggcagtccttgccccccgtgacgacccacaatatgattgacgattctaccgatcccattctgagcactatccggcgaatcggactttttaacaacaggacggatagagtgaaggttattctccatcccgaattcctcagttcaacatccccactcttgcctatggattacgaagaattcgtgcggggatgtcatctgggggtcttccctagttactacgagccatggggctacacacctgccgagtgcaccgtgatgggaatcccctccgtcaccaccaacctctcgggattcggatgcttcatgcaggagcacgtggctgatcccacagcctacggaatttacattgtggatcggagattccgctcacctgacgactcttgtaaccagctgacgaaattcctctacggtttctgcaaacaatcccgccggcaaagaatcatacaacggaaccgcaccgaaaggctgagcgatctgcttgactggcggtacttgggcaggtattaccagcatgctaggcaccttaccctgtcccgcgcctttcctgacaagtttcacgttgaactgaccagccctcccactacagaggggttcaagtacccaagacctagctcggtgccaccgtcgccctcaggctcccaggcttcctccccccagtcatcggatgtcgaggatgaggtggaggatgaaagatacgacgaggaggaggaggcggaaagagaccgcctgaacattaagtcccccttctccctgagtcacgtcccacacggtaaaaagaagctgcacggggagtataagaac

SEQ ID NO: 210407 - DNA, 2109 bp, Artificial Sequence
  derived and/or modified sequence
atgctgagagggcggtcactgagcgtgacctccctcggcggtttgcctcagtgggaggtcgaggaactgccagtggaagaactccttctcttcgaagtcgcgtgggaggtgaccaacaaggtcggcggaatctacaccgtgatccagactaaagccaagaccaccgcagacgaatggggggaaaactactttctcattggaccatactttgaacacaatatgaaaactcaggtcgagcagtgcgaaccggtgaacgatgctgtgcgccgggcggtggatgcgatgaacaagcatggatgccaggtgcatttcggaagatggctgattgagggatcgccgtatgtcgtgctgtttgacatcggatactccgcgtggaaccttgatcgctggaagggagatctctgggaggcgtgctcggtgggaatcccatatcacgaccgcgaagcgaatgacatgctgatattcgggagccttaccgcatggtttctgaaggaggtgactgaccatgccgacggcaaatacgtcgtcgcgcaattccacgagtggcaagcgggaattggccttatcctgtcaagagccaggaagctgcctatcgccactatctttactacccacgctactcttctgggacggtacctgtgtgccgcgaacatcgacttttacaaccacttggacaagttcaacatcgacaaggaggccggcgaacgccagatctaccatcgctactgcatggagcgggccagcgtgcactgtgctcatgtgttcactaccgtctccgagatcactgcgatcgaagccgaacatatgctgaagcgcaagcctgacgtcgtgaccccaaatggcctcaacgtgaaaaagttctcggcggtgcacgagtttcaaaacctgcacgccatgtacaaggcccggatccaagatttcgtgagggggcatttctacggacatctggactttgacctcgaaaagaccctgttcctgttcatcgcaggacgctacgaattcagcaataagggagcggacatcttcctggagtcgctgtcaagactcaactttctgctcagaatgcacaagtccgatattaccgtgatggtgttctttatcatgccggcaaagaccaacaacttcaatgtggaaaccctcaaaggacaggccgtgaggaagcaactgtgggacgtggcccatagcgttaaggaaaagtttggtaagaagctgtacgatgccctgctccgcggcgagatcccagatctgaacgacatcctggacagagacgacctcacgatcatgaagcgcgcgatcttctccacccagaggcagtcgctccccccggtgacgacgcacaatatgatcgacgattcgactgatccaatcctcagcactatccgacgcatcggattgttcaacaaccggaccgatcgagtgaaggtcatcctgcacccggagttcttgagctcaacctcgccgttgctcccgatggattacgaagagttcgtgaggggatgccatctcggagtgttcccgtcatactacgagccgtggggatacaccccggcggaatgcacggtgatgggaattcctagcgtgactactaatttgtcgggattcggttgcttcatgcaggagcatgtggcagacccgactgcatatggtatttacatcgtggacagacggttcagaagcccggacgattcttgcaatcaattgaccaaatttctgtacgggttctgtaagcagtccaggcgccagaggatcatccaaagaaatcggaccgagcgactgtccgatctcctggattggcgatacctcggacgctactaccagcatgctcgccatctgactctgagcagagcatttcccgataagttccacgtcgaattgaccagccccccgactaccgagggattcaagtacccgcgcccttcctcggtgccgccttcgccatcgggatcgcaagcaagctcgccccaaagctcagatgtggaggacgaagtggaagatgaaagatacgatgaggaagaagaagccgagagggaccgcttgaacattaagtccccgttctcgctgtcacatgtgccacacggtaagaaaaagctccacggcgaatacaaaaat

SEQ ID NO: 210408 - DNA, 2109 bp, Artificial Sequence
  derived and/or modified sequence
atgcttaggggtagaagcctctctgtcacgagcctggggggactgccacaatgggaagtagaggaactgccagtggaggagcttctgctgtttgaggtcgcgtgggaggtcacgaataaggtgggaggaatttacaccgtgatccagacgaaggctaagacaactgcagacgaatggggagaaaactactttctaatcggaccatatttcgagcacaatatgaagacgcaggtagagcagtgtgaacccgttaacgatgccgttagaagggccgtcgatgccatgaacaaacacggctgccaggtgcatttcggaaggtggttaattgagggctctccctatgttgtgctattcgacattggttattcagcgtggaatttagacagatggaagggggacctctgggaagcttgctctgtgggtatcccttatcacgatcgcgaggccaacgacatgctgatttttgggagtcttacagcgtggtttctaaaagaagtgaccgatcacgcagacggaaaatacgtggtcgcccagtttcacgagtggcaggccggcatcgggttgatcctttctagggccaggaagctccccattgccacaatctttacgacccatgccactctgctgggcaggtatctgtgcgcagctaacattgacttttataaccacttagataaattcaatattgacaaagaggctggcgagagacagatttatcacaggtattgtatggagagggcaagcgttcactgtgctcatgttttcacaaccgttagcgagattacagctatagaagctgaacacatgcttaagagaaaacccgatgttgtcacaccgaatgggcttaacgtgaaaaaattcagtgccgtgcatgaattccagaacctgcacgctatgtacaaggcaaggatccaggacttcgtgagagggcatttttatgggcacttagattttgacctcgaaaaaactttattcctgtttatcgccggacggtatgaattctccaacaagggcgcggacatctttctcgaatctctctcccggctcaattttctcttgcgaatgcacaagtccgatatcaccgtgatggtattcttcatcatgcctgccaagaccaacaactttaatgtggagaccctcaaagggcaagccgtgcggaagcagctgtgggatgtcgcccacagcgtcaaggaaaaattcgggaagaagttatatgatgcgctacttaggggcgagataccagacctgaacgatatacttgatagggacgacctgacaatcatgaagcgggccatttttagtactcagagacagtcattacctcccgtgaccacccataatatgatcgatgattccaccgaccccatcctgtcgacgatccggaggatcggtctgtttaacaaccgcactgacagggttaaggtcattctgcatccagaattcttatccagcacgagtcccttgctgcccatggattatgaggagtttgttcggggctgccatctgggggtgttcccttcctattacgaaccttggggatatactcccgccgagtgtacggtgatgggcataccttccgttaccacaaatttatcgggctttggctgctttatgcaggagcacgttgccgatccaaccgcctacgggatttacatcgtggacaggagattcaggtcaccagacgatagttgtaatcaattaactaaatttctttatgggttctgcaagcagagcaggaggcagcggatcatacaacggaacaggacagagcgcctgtcagacctgttggactggaggtatctcggtagatactatcagcatgctagacacctgaccctgagtcgtgctttccccgacaaattccatgtggagctcacaagtccacctaccaccgagggttttaaatatcctaggccctcttctgttcctccgtcccccagcggttcacaggcatccagtcctcagagctcagatgtagaggacgaggttgaggacgaacgctatgatgaagaagaggaggcagaacgggataggctaaatattaagtctccattcagcctaagccatgtgccccacgggaaaaaaaagctgcacggggaatataagaat

SEQ ID NO: 210409 - DNA, 2109 bp, Artificial Sequence
  derived and/or modified sequence
atgttgagaggacgctccctttcggttacttcactcgggggtctgccccaatgggaagtggaggaactccccgtggaagaactccttttgttcgaagttgcttgggaagttaccaacaaagtgggaggtatctacacggtgattcaaactaaggccaagactaccgcagacgaatggggagaaaactattttctgattggaccctacttcgaacacaacatgaaaacccaggtggagcagtgcgaaccggtcaacgatgctgtgcggcgggccgtcgatgctatgaataagcatggctgtcaggtgcactttggccgctggcttattgaaggttcgccttacgtcgtcctgtttgacatcggctactcggcgtggaacctcgacaggtggaaaggtgacttgtgggaagcatgttccgtgggaattccttaccacgaccgagaagccaacgatatgttgatttttgggagccttactgcatggtttctgaaggaggtgacggatcatgctgatggtaaatacgtggtcgcacaattccacgagtggcaagcaggtataggacttatactgtcgagagcgcgcaagctgccaattgccaccatctttaccacccatgcaacgcttcttggaagatatctgtgtgcagctaacatcgacttctacaaccacctggacaagtttaacattgataaagaagccggagagagacaaatctaccatagatactgcatggaacgagcatccgttcactgtgcgcacgtctttaccaccgtctccgagatcactgcgattgaagcggaacacatgcttaagcggaagccagatgtggtgactcccaatggattgaacgtgaagaaattcagcgcagtgcatgagttccaaaatctgcatgcaatgtacaaggcccggatccaagattttgtgcgcgggcacttttacggtcatcttgacttcgaccttgaaaaaaccctgttccttttcatcgcaggacgctacgaattctcgaacaagggagcagatatctttctggagagcctgtcaaggctgaactttctgctgcgcatgcacaagtcggacattaccgtgatggtgtttttcattatgccagcaaagaccaataacttcaatgtcgaaaccctgaagggccaagcagttcggaaacagctttgggacgtggcgcattctgtcaaggaaaagtttggtaaaaagttgtacgatgcacttcttagaggcgaaattccagatctgaatgatatccttgaccgcgacgacctcactatcatgaaacgcgcgatcttttcgacccaacgacaatcgctgccgcctgttactacccataacatgatcgacgactccactgacccaattctttcgacgatacgaaggattggacttttcaataacagaacggatagggtcaaagtgattttgcatccggaatttctttcgtcgaccagccctctcctgccaatggattacgaggagtttgtccgcggatgtcatctcggcgtctttccctcgtactatgagccgtgggggtacacccctgcagaatgcaccgtcatgggaataccaagtgtgaccacgaacctgagcggatttggttgttttatgcaggaacatgtggccgatcccaccgcatacggcatatacattgtggacagacgctttagaagccccgacgattcctgcaaccaacttaccaaattcttgtacggattttgtaaacagtccagacgtcaacggatcattcaacggaacagaaccgaaagactgagtgacctcctcgattggcgctacctcggaagatactaccagcatgcccggcacctgactctcagccgagcatttcctgataagtttcatgttgaactcacctcacctccaaccaccgaggggttcaaataccctcgcccatcgtcggtgcctccttcgccctccggcagccaagcaagctcccctcagtcctcggatgtcgaggatgaagtcgaagatgagcgttacgacgaagaagaagaagcagaaagagacaggctcaatatcaaaagcccattctcgctgtcccacgtgcctcatggcaaaaagaagctgcacggtgaatacaagaac

SEQ ID NO: 210410 - DNA, 2109 bp, Artificial Sequence
  derived and/or modified sequence
atgcttcgcgggcggagcctctccgtgacttcgctgggaggactgccacaatgggaggtggaggagctgccggtcgaggaactcctgctttttgaagttgcatgggaagtgaccaataaggtgggagggatatacaccgtcattcagactaaagctaaaaccacggcggacgaatggggagagaactacttccttatcggaccctactttgagcataacatgaaaacgcaggtggaacaatgtgagccggttaatgacgctgtccgccgtgccgtggatgctatgaacaagcacggctgccaagtgcatttcggacggtggctgatcgaaggatccccatatgtggtgttgttcgatatcggatactcagcctggaacctcgacagatggaagggcgacttgtgggaagcgtgttcagtcgggatcccgtaccatgaccgcgaggccaatgacatgctgatcttcgggtcgttgactgcctggtttctcaaggaagtgactgatcacgcagacggaaagtacgtggtggcacagttccacgaatggcaggcaggaattggcctgatcctctcgcgcgcccggaaactgccgatcgccactatcttcacgactcatgccaccctgttgggaagatacctgtgcgcggcgaatattgatttctacaaccacctggataagtttaacattgataaggaggctggtgagcgtcaaatctatcatagatactgcatggagagagcgtcggtgcactgcgcgcacgtgttcacgactgtgtcggaaatcaccgctatcgaagccgaacatatgctgaagaggaaaccagacgtggtcactcctaatgggctgaacgtcaagaagttttcagcagtgcacgagttccaaaatctccacgccatgtataaggcgcggatccaagattttgtccggggacatttctacggacacctggacttcgacctcgagaaaacgttgttccttttcatcgccgggcgctacgaattcagcaacaagggagcggatatcttcctggagtccctctccagattgaattttctccttcggatgcataagagcgatataaccgtgatggtctttttcatcatgccggctaagaccaacaatttcaacgtggaaaccttgaagggccaagccgtgagaaagcagctctgggacgtggcacactccgtgaaggagaagttcggtaagaagttgtatgacgcgctgttgcggggagaaatccctgacttgaatgacattctggatcgcgatgaccttaccattatgaaacgcgccatcttctccactcagaggcagtcgctccctccggtgactactcacaacatgatcgacgacagcaccgaccctatcctgtcgaccatcagacggatcgggttgttcaacaaccgcactgacagggtcaaggtcatcctgcatccggaatttctctcgtcgaccagcccgctgcttccgatggattacgaagaatttgtgcggggctgccacctcggagttttcccctcatactacgaaccctggggttacacgccggctgaatgtactgttatgggtatcccgagcgtgacgaccaacctgtccggcttcggttgctttatgcaggagcacgtggccgacccaaccgcatacggaatctacatcgtggatcgcagatttcgttcccccgacgattcctgcaaccagctgactaaattcctgtacggattctgcaagcaatctcgtcgccagaggatcatccagaggaatcgcaccgagcggctgtcggacctccttgattggcggtacctcggccgctattaccaacacgcgcgacacctgaccctctcacgagccttcccggacaagttccacgtggagctcactagcccgccaactactgaaggattcaagtacccacggccatcctccgtccctccgtcgccgtcgggatcacaggcctccagcccgcagtcgtccgacgtggaagatgaagtggaggatgaaagatacgatgaagaagaggaggcggagcgagatcgcctgaacatcaaatctccgttctcgctctcgcacgtccctcatgggaaaaagaagctccacggagaatacaaaaat

SEQ ID NO: 210411 - DNA, 2109 bp, Artificial Sequence
  derived and/or modified sequence
atgttgaggggccgctctctcagcgtaacttcactgggaggccttccacaatgggaggtggaggagcttccagtcgaagaactgctattgttcgaggtagcatgggaagttaccaataaagtcggcggaatttatactgttatccaaacaaaggcaaaaaccaccgccgatgagtggggtgaaaactattttctgatcggcccttattttgaacataacatgaagacccaagtcgagcagtgtgaacctgtgaacgacgcagtgaggcgagcagtcgacgcaatgaacaagcacggttgccaggtgcattttgggaggtggttgatcgagggatccccatatgtcgtccttttcgatattggctactccgcatggaaccttgaccgttggaagggagatctgtgggaagcatgtagcgtaggaatcccttaccatgatagagaggctaacgatatgcttatctttggcagtttgactgcttggtttctcaaagaggtgaccgatcacgctgacggtaaatacgtggtagcgcagtttcacgagtggcaggcaggaatcggattgatcctgagccgcgcacgtaaactgccaatcgcaacgatcttcaccactcatgctactctgttgggtcgctacttatgtgctgccaatattgacttctacaaccatctggataagttcaatatcgacaaagaggccggagagcgccagatttaccacagatactgcatggaacgcgctagcgttcattgtgctcatgtgttcaccaccgtgagcgagatcactgccatcgaggccgaacatatgttgaaacgcaaacctgatgttgtcaccccaaacgggctgaacgtgaaaaagttcagcgcagtgcacgaattccaaaacctgcatgccatgtataaagccagaatccaggatttcgttaggggccatttctacggccacctggactttgacctcgagaagacgctgttcctgttcattgccggacgatacgaattctccaacaaaggcgcggatatcttcttggaatctctgtctaggttgaatttccttcttcgcatgcacaaaagtgatattaccgtcatggtgttcttcatcatgcccgctaagacgaacaattttaatgtcgaaacccttaaaggccaggccgtgcggaaacaactttgggatgtggctcattcagttaaggaaaaatttgggaagaagttgtatgacgcactccttcggggtgaaattcccgacctcaacgatatactggacagagacgatctgactatcatgaaaagggctatcttcagcacccagaggcagagcctgccacccgtgacaacacacaacatgatcgacgacagtaccgatcctatcttgtctacaatccgcagaatcggacttttcaacaatagaaccgaccgcgtcaaagtgatcttgcatccagagttcctgagctccacaagcccactgcttccaatggactacgaagagttcgttagaggatgccacttaggggtgttccctagctactatgagccttggggatatacaccagccgaatgtacggtaatgggcatcccaagcgtgaccaccaacctttccggcttcggatgctttatgcaggagcacgtggccgaccctactgcttacggtatttatatagtggataggagattcaggtctccagacgattcttgtaaccagctcactaagtttctttacggattttgcaaacagagtagaaggcagaggatcattcagaggaacaggacagaacggctcagtgacctgctggattggaggtatctggggaggtattaccagcacgccagacatctgacactcagtcgggccttcccggacaagtttcatgtcgaactgacatccccacccactacagagggttttaaatacccccgcccaagctccgtccctcctagcccctctggcagccaagccagctctccacaaagctctgacgtggaggatgaagtagaagatgaacggtatgatgaagaggaagaggcagagagggatcgattgaacataaagagcccatttagcctgagccatgtcccccatgggaagaagaaactgcatggcgagtataaaaac

SEQ ID NO: 210412 - DNA, 2109 bp, Artificial Sequence
  derived and/or modified sequence
atgctgcgtggtcgatctctatcggttacttcactgggtggcctcccccagtgggaggtcgaggaactgcccgtcgaagagctgctgctctttgaagtagcatgggaagttaccaacaaggtgggtggtatttatacagtgattcagactaaggctaaaacaaccgcagacgaatggggcgagaattatttcctaattgggccatactttgaacacaatatgaaaacacaggtagaacagtgcgaacctgttaacgatgccgtgcggcgggccgttgatgccatgaataagcacggttgtcaagttcattttggccgctggttaattgagggatcaccttacgtcgtactgtttgatattggctacagcgcctggaatttggatcgctggaaaggcgacttgtgggaggcttgctctgtcggaatcccataccacgacagagaggctaacgatatgctgatcttcggctcacttaccgcatggtttttaaaagaggtcaccgatcacgccgacgggaaatacgtcgtagcccagttccacgagtggcaagccgggattggtctgatcttaagtcgggctcggaagttgcccatcgcaacaatttttacaacccatgcaacgttactaggacgatatctctgcgccgctaatatcgatttttacaaccacttggataagttcaacatcgacaaagaagccggcgaaaggcagatctaccaccgttattgtatggagcgggcttccgtccactgtgctcacgtttttaccactgtgtcagaaattaccgccatagaagccgaacacatgcttaaacgaaaacctgacgtcgtgactcctaatggcctaaacgtaaaaaaattctctgccgtgcatgagtttcagaatctgcacgctatgtataaggcccgaattcaggattttgtacggggccacttttacggccatctcgatttcgacctcgagaagacactattcctgttcatcgccgggagatatgagtttagcaataaaggcgcagatatcttcctcgagtccctctcgcgtctcaacttccttctccggatgcataagtccgatataaccgtgatggttttttttataatgccagccaaaactaataacttcaacgtcgagactttaaaaggccaggctgtacggaagcagctttgggacgttgctcacagcgtcaaggagaagttcggcaagaagctatacgatgctctgctgaggggagaaattcctgacctaaacgacattctggacagggatgaccttactatcatgaagcgggctatttttagcacacagaggcagtcgcttcctcccgtgactacacacaatatgatagatgactctaccgatcccattctttcaactatccgcaggattggcctgttcaacaatcgtactgaccgggttaaagtgattctgcaccccgaattcctctcctcgacttctcctcttttacccatggactatgaggagttcgtacgcggctgtcatctcggagtgtttcccagttactatgagccctgggggtatacccccgccgagtgtacagtgatggggatcccaagcgtgaccaccaatttgtccgggttcgggtgtttcatgcaggagcacgttgctgaccccacagcctatggaatctatatcgtcgatcggcgtttcagatctcccgatgacagttgcaatcagctgacgaagtttctctacgggttttgtaaacagtcaaggaggcaacgcatcatccagcgaaatcgcacagagcgactaagcgacctccttgattggcgatacctgggcaggtattaccagcatgctaggcatctaacgctgagcagggcctttcctgacaaatttcatgtggagctgactagcccgccgaccaccgaagggttcaagtacccccgccccagctccgtgccccccagccccagcggatcccaggctagcagcccccagtcctctgacgtggaagatgaggtggaggacgagagatatgatgaggaagaagaagccgagcgagacagactgaacatcaaatctcccttcagcttgagtcatgtgcctcatggcaaaaagaaactccatggagagtacaaaaac

SEQ ID NO: 210413 - DNA, 2109 bp, Artificial Sequence
  derived and/or modified sequence
atgctacggggcagatccctgtctgtaactagcctgggcggtttgccgcagtgggaggtggaggaactacctgtggaagaacttctgctgttcgaagtggcttgggaggtaacaaataaagtgggtggtatatataccgttatacaaaccaaggcgaaaactaccgcggatgagtggggcgagaactactttttgatcggcccgtacttcgagcacaatatgaagacccaggtcgagcagtgcgaaccagtcaacgacgccgtacgcagagccgttgacgccatgaataaacacggctgtcaggtccattttgggagatggctgattgagggaagtccatacgtggtcctctttgatattggatatagcgcctggaacctggataggtggaagggcgacttgtgggaagcctgcagcgtaggcataccgtaccatgatagggaggctaacgatatgctgatattcggatcactgactgcatggtttcttaaggaggtaaccgatcacgccgacggcaaatatgtggtggcacagtttcacgagtggcaagcagggataggcctgatactctctagagcaaggaagctccctatcgcaactatcttcaccacccatgccacgctgctggggaggtatctgtgtgctgccaacattgatttctacaatcacctcgacaaatttaacatagacaaagaagcaggagaacgacagatctatcatcgctattgtatggagagagcctcagttcattgtgcccacgtctttactaccgttagcgaaatcaccgctatcgaagcggagcacatgctaaagcgcaaacccgacgtggtgacgccaaatgggctgaacgtgaaaaagttttctgccgtgcatgaattccagaacttgcacgctatgtataaagcccgcattcaagatttcgtgcggggccacttttacggccacctggattttgacttggagaagactttgtttttattcattgcaggccgctatgagttcagtaacaagggcgcggatatctttctggaatcgctgagcaggctgaattttctgcttaggatgcataaatctgacatcaccgtgatggtctttttcatcatgccagcaaagacgaacaacttcaatgtcgagaccctcaaaggtcaggcagtcaggaagcagctttgggatgtcgctcacagcgttaaagagaaatttggcaagaaactctacgatgccctgctgcggggcgaaattcccgacttgaatgacatactggatcgggatgatttgacaatcatgaagcgtgctatcttctctacacagcgccagtcattgccccctgttaccactcataatatgatcgacgatagcacagatcctatcctgagcacaattaggcggatcggcttgtttaacaataggactgaccgcgtcaaggtcatactgcaccctgagtttctctctagcacgtcgccgctgttgccaatggattacgaagagttcgttaggggatgtcacctcggcgtgttcccttcatactacgaaccttggggatacacccctgccgaatgtaccgttatgggcattccgtccgtcactacaaatctttccgggttcgggtgcttcatgcaggagcacgtagctgacccaactgcatacggaatctacatcgtggacaggagattccgatcccctgatgactcgtgcaatcagctgactaaatttctgtatggattctgcaaacagtcaagaaggcagcgtattatacagcgcaaccggacagagcgcttgagtgacctcctggattggcgttacctgggccggtactaccaacacgctcggcacttaaccctttccagggcgtttcccgataagttccatgtggagttgacaagcccacccacgaccgaagggtttaaatatccaaggccgagcagcgtccctcctagtccatccggatcccaggccagctcgcctcaatcatcagatgtggaagacgaggttgaggatgagcgctacgacgaggaggaagaagcagagcgggacaggctcaacataaaaagcccattcagcctttctcacgtcccgcacggcaagaagaagctccatggggagtataaaaac

SEQ ID NO: 210414 - DNA, 2109 bp, Artificial Sequence
  derived and/or modified sequence
atgctcagggggaggtctcttagcgtgacctccctaggcggattgccccagtgggaggtggaggagctgcctgtagaagaactattgctgttcgaagtcgcttgggaggtcaccaataaggtcggggggatatatactgttattcaaaccaaggcaaaaacaacagccgacgaatggggcgagaactatttcttgatagggccatacttcgagcataatatgaagacgcaagtggagcagtgcgagcccgtgaacgacgcagtgcgtcgagctgtggacgccatgaataaacacggctgccaagtgcacttcgggcgttggctcattgaagggtctccttatgtagtactcttcgatataggctattctgcatggaacctggatcggtggaagggagatctgtgggaggcctgctcagtaggcatcccatatcacgacagggaggctaatgacatgctgatatttggttctctgaccgcttggtttctcaaagaggtcacagaccatgcagacggcaaatatgtggtggctcaatttcacgaatggcaggccggaataggcttgattctttcaagagcccggaaattgccgatcgcaacgatctttaccacccatgcaacactgcttggacggtatctgtgcgctgcgaacatcgatttctataaccacttggacaaattcaatatagataaagaagccggtgagcgccagatttatcacaggtactgtatggaaagggccagcgttcactgtgcgcatgtctttactaccgtctccgaaattacagccatagaagccgaacacatgttgaaacgcaagcccgatgtcgtgacccctaatggactgaacgtgaaaaaattttctgcagttcacgaatttcaaaacttacatgccatgtacaaagcacgcatccaggactttgtcaggggacatttttacgggcatctggacttcgatttggagaagacactctttttatttattgcagggaggtatgaattctccaacaaaggagctgatattttcctggaaagcctgtccaggcttaactttcttctccggatgcataaatccgatatcacagttatggtctttttcattatgcccgcgaaaactaacaactttaacgtagagacgctgaaaggccaggccgtgaggaagcagttatgggatgtggcacactctgttaaagagaagttcggcaagaaactgtacgacgcactgctgcggggtgaaatccctgaccttaacgatatcctggaccgggatgacctgaccataatgaaacgggcgatcttttctacacagaggcaaagcctgccaccggtgacaacccataacatgattgatgactcaaccgatcctattcttagcaccattcgccggatcggcctgttcaataaccgtactgatcgtgtcaaagttatcctgcacccggagttcctgtcatctacctcccctctgctgcccatggactacgaagagtttgtgcgaggttgccatttaggagttttcccatcctattacgagccatgggggtacacgcccgctgagtgcactgtgatgggaattccttcagtcaccaccaatctctccggcttcggctgctttatgcaggagcatgtggctgaccctactgcctatggcatctatatagtggatcggcgctttcggtctcccgacgattcatgtaaccaattgaccaagttcctgtatggcttttgtaaacagtcccggaggcagaggatcattcaacgcaaccgcacagagagactttccgatcttctagactggagatacctgggacgatactaccagcatgcgcgccacttaacacttagcagggcctttcctgataagttccacgttgaactgaccagtcctcctacgactgaggggttcaaatatcctagaccctcatccgtcccgccgagtccctccgggagtcaggccagttctccacagtccagcgatgtagaagatgaagtggaagatgagcgctacgacgaggaagaggaagccgaacgcgatcgtttaaatataaaaagccctttcagccttagccacgtgccacatggcaagaaaaagctccacggtgagtacaagaat

SEQ ID NO: 210415 - DNA, 2109 bp, Artificial Sequence
  derived and/or modified sequence
atgctcagaggcagatccctgtccgtgacctcactcggaggtctgccgcagtgggaagtcgaagaactcccagtggaggagctcctgcttttcgaagtggcatgggaggtgactaacaaggtcggcggaatctacactgtgatccagaccaaggctaagactaccgcggacgagtggggcgagaactactttctgatcggaccgtacttcgaacacaacatgaaaactcaggtggaacagtgcgaaccagtgaatgatgcagtcagacgtgctgtcgacgcaatgaacaagcacgggtgccaggtccatttcggacgctggctgatcgagggatcaccgtacgtcgtcctgttcgacatcggatactcagcctggaacctggatcgctggaagggtgacctgtgggaagcgtgcagcgtggggatcccgtatcacgaccgcgaagccaatgacatgctgattttcggctcgctgactgcttggttcttgaaagaagtgactgaccatgctgatggcaagtacgtggttgcgcaatttcatgaatggcaagccggaatcggattgatcctgtcccgcgcccgcaagctgcctatcgcaactattttcactactcatgcgaccctcctgggacgctacctgtgtgccgccaatatcgacttttacaatcacctggataagtttaacatcgacaaagaggctggggagcggcagatctaccaccgctactgtatggagcgcgcctccgtgcactgcgcccacgtgtttaccactgtctcagaaatcaccgcgattgaggctgaacatatgctgaaacgcaagcccgacgtggtgaccccgaatggacttaatgtgaagaagttctcggcggtgcacgagtttcaaaacttgcatgctatgtacaaagcaagaatccaggatttcgtcagggggcacttctacggccatctggacttcgacctcgaaaagaccctgttcctgttcatcgcgggacggtatgagttctcgaataaaggagctgatatctttctggaatcgctgtcccggctgaacttcctgcttagaatgcataagtcggatatcactgttatggtgttctttatcatgccggcgaaaactaacaactttaacgtggagacgctcaagggacaagccgtccggaagcaactgtgggatgtggctcactcagtcaaagaaaagttcggaaagaagctgtacgacgcgctgttgagaggagagatcccggacctcaacgacatcctggatcgggatgacctcaccatcatgaagcgggccatattctctacccaaaggcaatcactgccacctgtgactacccacaatatgatcgatgattccactgatccgattctgtcgactattaggcggatcggattgttcaacaaccgcaccgaccgcgtgaaagtgatcctccatccggaattcctttcgtcgacctccccgctgctgccaatggattacgaagagttcgtgcggggctgccatctgggcgtctttccgtcgtactacgagccttggggttatacgccagcggaatgcaccgtgatgggcatcccttctgtgaccactaacctgtctggattcgggtgcttcatgcaggaacatgtggccgatccgactgcctacggaatttacatcgtggaccgccgcttcagatcgcctgacgactcatgtaatcagctcacgaagttcctctacggattctgcaagcagtcacgacggcaacggatcatccagcggaaccgcactgaacggctctccgacctgctggactggcgatacctgggcaggtattatcagcacgcgcggcatctcactctgtcgagggcctttcctgataagtttcatgtggaactgacctccccgcctaccactgaaggatttaagtacccccggccgtcgagcgtccccccgagcccctcgggatcgcaggccagctcgcctcagtcctcggatgtcgaagatgaagtggaggacgaacggtacgatgaagaagaggaggcagagagagacagactgaacatcaaaagcccgttctcgttgtcacacgtgccacatggaaagaagaaactccacggcgaatacaagaac

SEQ ID NO: 210416 - DNA, 2109 bp, Artificial Sequence
  derived and/or modified sequence
atgctgcgaggacgctcgttgagcgtgacttcccttggagggcttccacaatgggaagtggaagaacttccggtcgaagagctgctgcttttcgaggtcgcgtgggaggtcaccaataaggtgggaggtatctacaccgtgattcagaccaaagccaagactaccgcagatgaatggggggagaactactttctgattggaccatacttcgaacacaatatgaaaacccaggtcgaacagtgcgaacctgtgaatgatgcagtgagacgcgccgtggatgcaatgaataagcatgggtgtcaagtgcatttcggcagatggctgattgaaggcagcccctacgtggtgctctttgatatcggctacagcgcgtggaatttggatcgttggaagggtgatctgtgggaggcatgtagcgtcggcatcccctaccacgatagagaggcaaacgacatgctgatatttggttcacttactgcatggtttctgaaggaagtgactgatcacgcggacggcaagtacgtggtcgcccaattccacgaatggcaggcaggaatagggctgattctctcgagagcccgaaaactgcctattgcaaccatctttaccacccacgcgactcttctgggaagatacctctgcgccgctaatatcgacttctataatcacctggacaagttcaatattgataaggaagccggtgagagacagatataccacaggtactgtatggaaagagcatcggtgcactgtgcacacgtctttaccactgtgtcagagattactgcaatcgaagcagagcatatgctgaaacggaagcctgatgtggtgactcctaacggcctgaacgtgaagaagtttagcgccgtgcatgaattccaaaacctgcatgctatgtacaaggcaaggattcaagattttgtaaggggtcatttctacggacatctggactttgatcttgaaaaaactctttttctctttattgcagggcgttacgaattttctaacaagggggcagacatatttcttgaatccctgtcccgcctgaacttcctgcttcggatgcacaaatcggatatcaccgtcatggtgtttttcattatgcccgcaaaaaccaacaactttaatgtggaaactttgaagggacaagcagtgcgtaaacagctttgggatgtcgcacattcggtcaaggaaaagtttgggaagaaactttacgacgcgctgcttagaggagagataccagaccttaacgatattctcgatcgtgatgatttgactattatgaaaagggcgattttcagtactcagcgtcagtcgctccctcctgtgaccacccacaacatgattgatgattccaccgaccccatcctctcgacgattcgccgaattggactgttcaacaaccggactgatcgggtcaaagtgattctccatccggaatttctgagctccactagccctcttctgcctatggattacgaggaatttgtcagaggatgccaccttggtgtctttccttcgtactatgaaccttggggatacaccccagctgaatgtactgtgatgggaattccgtcagtcaccactaatctcagcggattcgggtgtttcatgcaggaacatgtggcagatcctacggcatacggtatctacatagtggataggagatttcgttcccccgacgatagctgcaaccagctgactaagtttctttatggattttgcaagcaaagcaggcgccaaaggattattcagcgcaatcgcaccgaacggcttagcgatcttctggattggagatacctcggacgctactaccaacacgcacgccacctcacgctgtcgcgagcatttcctgacaagttccacgtggagctcacttcgccccccactaccgaggggtttaagtacccgcgtcctagctcggtgcctccttcgccctccggaagccaagcaagcagcccacaatccagcgatgttgaggacgaagtggaagatgaaaggtacgatgaagaggaagaagcagagcgcgaccgcctcaacattaagtcgcctttcagcctgtcgcatgtgcctcatggtaagaagaaacttcatggcgagtacaagaac

SEQ ID NO: 210417 - DNA, 2109 bp, Artificial Sequence
  derived and/or modified sequence
atgctgcgtggcagaagtctcagcgtcacttctctgggcggacttccccagtgggaggtggaagagttgcctgtcgaggagctgctcctgttcgaggttgcttgggaggtcactaacaaggtaggtggcatatacacagttatacagaccaaggctaagacaactgcagatgaatggggtgaaaactacttcctcatcggcccttatttcgagcataatatgaagactcaggtcgagcagtgcgagcctgtaaacgacgccgtcagaagggcagtggatgctatgaataagcacggctgtcaagtccatttcggtaggtggcttatcgagggcagcccctacgtggtgctgttcgatatcggttactctgcctggaatctcgacagatggaagggtgatctgtgggaagcctgttccgtgggtatcccataccacgaccgtgaggccaatgatatgctgattttcggaagcctgacagcatggttcctcaaagaggtcactgatcatgccgacggaaaatacgttgttgcccagttccatgagtggcaggctggcattggtctcatcctgtctcgcgcaaggaaactgcctatagccactatctttaccactcacgccactctcttgggtcgttatctctgtgcagcaaatattgacttttataaccacttggataagttcaatattgacaaggaggctggagagagacagatttaccaccgctactgcatggaaagagcttcagtacactgcgctcatgtttttaccacagtcagtgagattacagctatcgaggctgagcacatgctgaagcgtaaacccgacgtggtgactcccaacggcctgaatgtgaagaagtttagcgccgtgcacgagttccagaacttgcacgcaatgtataaagcaaggatccaagacttcgtccgtggacacttttacggacatctggacttcgacttggagaagaccctgttcttgttcatcgccggccgctacgagttcagcaacaaaggtgccgatatatttttggagtctttgagccgtctgaacttcctcctgaggatgcacaagtccgatatcaccgtaatggtcttctttatcatgcctgccaagacaaataactttaacgtagagactctgaagggccaggcagtgagaaagcagttgtgggatgtcgcccacagcgtcaaggaaaagttcggcaaaaagttgtacgacgctttgctgaggggtgaaatcccagatttgaacgacattctggaccgtgatgatttgactattatgaagcgtgctatcttctcaactcagcgtcaatctctgccccctgtgactacccacaacatgatagatgattccacagaccccatccttagcactatcagacgcattggtttgttcaataatagaacagatcgcgtcaaagtgatccttcacccagaatttctgagttccaccagtccattgttgccaatggattatgaggagtttgtccgtggctgtcaccttggtgtgtttcctagttattatgaaccatggggttacacccctgccgagtgcacagtgatgggcattccatctgtcactaccaacctgtccggcttcggctgttttatgcaagagcatgtggcagatccaaccgcctacggcatctacatcgtagataggcgttttaggagccccgacgacagctgtaatcagctcaccaaattcctttacggattctgcaaacagtcaaggcgccaaaggataattcagagaaatcgtaccgagagattgagtgatctcctggattggaggtacctgggccgctactaccagcacgctagacacttgactctgagtcgtgcttttcctgataagtttcacgtggagcttacatccccaccaactactgaaggcttcaagtacccaaggcccagcagcgtgcctccaagcccatctggtagccaggcatcctccccacagagttcagatgtggaagacgaggtagaggatgagaggtacgatgaggaggaagaagccgagcgcgacaggctcaacatcaagagccctttttctctgtcccatgtcccacatggaaaaaagaagttgcatggtgagtataagaat

SEQ ID NO: 210418 - DNA, 2109 bp, Artificial Sequence
  derived and/or modified sequence
atgttgcggggtagaagcctcagcgtcacctcgctgggaggactgccgcagtgggaggtcgaggaactgccggtggaggaactgctgctctttgaggtggcatgggaagtgactaacaaggtcgggggcatctacaccgtgatccaaacgaaagcaaagaccactgcggacgagtggggagagaactacttcctgatcggaccgtacttcgaacataacatgaaaactcaggtggagcagtgcgagccggtcaacgacgccgttcgccgggcagtcgatgccatgaacaagcacggctgccaagtgcactttggccggtggctcatcgaaggaagcccgtacgtggtgcttttcgacattggatattccgcttggaacctcgacagatggaagggtgacctctgggaagcatgctccgtaggcatcccttatcacgatcgggaggcgaatgatatgctcatcttcggctccctgactgcctggttcctgaaggaagttaccgaccacgccgacggaaagtacgtggtcgcccaatttcacgagtggcaagcgggcatcggactcatccttagccgagcccggaagctgcccatcgcgaccatcttcaccactcatgcgacgctgctgggccgctacctgtgcgccgccaacatcgacttctacaatcacctggataagttcaatatcgacaaggaagcgggagaacggcaaatctaccaccgctactgtatggaacgggcgagcgtgcactgtgcccacgtgtttactaccgtctcggaaatcactgccatcgaagctgaacatatgcttaaacggaagccagacgtcgtcactccaaacggactgaatgtgaagaagttcagtgcagttcatgaattccaaaacctgcatgctatgtacaaggccagaatacaggactttgtgaggggacatttctacgggcatcttgacttcgacctggaaaagactctgtttcttttcatcgcggggagatacgaattctccaataagggcgcagacatttttctggaaagtctttcaagactgaacttcctgctgcgcatgcacaagtccgatatcactgtgatggtgttcttcatcatgccggcaaagaccaacaatttcaatgtggaaactctgaagggtcaggccgtgaggaagcaactgtgggacgtcgcacactcggtgaaagagaagttcggcaagaaactgtacgacgcactgctccgcggtgagattccggacctgaacgatatcctggaccgagatgacctgactataatgaaaagagcaatcttttcaactcaaagacagtcactgcccccagtgacgactcacaatatgatcgacgacagtaccgacccaatcctttcaaccattcggcgcatcggactgttcaacaacagaaccgacagggtgaaggtcatcctgcatccggagtttctgtccagcacttcaccgctgctccctatggactacgaggaattcgtccgcggatgccatctgggggtgttcccgtcttactacgagccatggggctacaccccagccgaatgcaccgtgatgggtatcccgtccgtgaccaccaacttgtcgggattcggttgctttatgcaggaacacgtagccgatcccaccgcttatggaatctacatcgtggaccgccggttccgctcgccagacgattcctgcaatcagctgaccaagttcctttacggattctgcaagcagtcacgccggcagcggattatccagagaaaccgtaccgagagactctcggacctgctcgactggcggtacctcggaaggtactaccagcatgcacggcatctgactctctcccgggcgttccctgacaagttccatgtggagctcacttccccgcccaccactgaagggttcaagtacccgcggccttcgtccgtcccgccaagcccaagcggctcgcaggcctcctcgccgcagagctcggatgtggaggacgaagtcgaggacgagagatacgatgaagaagaggaggcggaaagagatcgcctgaacatcaaatcgccgtttagcctgtcgcatgtgccacacggcaagaagaaactgcacggagagtacaagaat

SEQ ID NO: 210419 - DNA, 2109 bp, Artificial Sequence
  derived and/or modified sequence
atgcttcgtgggcggtcacttagcgtgactagcctcggaggcctcccacagtgggaagtcgaagagctgccggtcgaagaacttctgctttttgaggtggcctgggaagtgactaacaaggtcggtggaatatacactgtcattcaaactaaggcgaaaaccaccgcagacgaatggggcgagaactactttctcattggcccatacttcgaacacaatatgaaaactcaagtggaacaatgcgaaccagtgaacgatgctgtccgaagagcagtggatgcaatgaacaagcatggatgtcaggtgcattttggccgatggcttatagagggttcgccgtatgtagtgctgtttgacattggctactccgcatggaatctggacaggtggaaaggcgacctgtgggaagcatgctctgtggggatcccttaccacgatagagaggcaaacgatatgctgatatttggatcacttactgcatggttcctgaaggaagtcactgatcacgccgatggtaagtacgtggtcgcacaatttcatgaatggcaggcgggaatcggtcttattctgtccagagctaggaaattgccaatagcaactatctttaccacccacgcaaccctgctgggacggtacctttgcgctgcaaacattgatttctacaaccacctggacaagttcaatatagataaggaggctggtgaaaggcaaatctaccacagatactgtatggaaagagcatcagtgcattgtgctcatgtgtttaccactgtgtccgaaatcaccgcaattgaagcagaacatatgctgaagagaaagcctgatgtggtgactcctaatggactcaacgtcaagaagttttcggcagtgcacgagttccagaaccttcatgccatgtacaaggcgagaatccaagactttgtgcgtggacacttttacggacatctggactttgatcttgaaaagaccttgttcttgttcatagccggaaggtacgaattctcaaataagggggcagacattttcctggaatcgctgtcccgtctgaattttctgcttaggatgcataagtccgatattaccgtgatggtgttcttcatcatgccggccaagaccaataactttaatgtggaaaccttgaaaggtcaagcggtgaggaagcaactctgggatgtggcacacagcgtcaaagagaaattcggtaagaaactttatgatgcattgctgagaggagagattccagatctgaacgacattctggaccgcgacgatttgaccattatgaaacgcgcgatcttttccactcaacgccagtcccttcctccggtcactacgcataacatgattgacgattcgaccgaccctatcctcagcaccatccggcgcattggactctttaacaacaggactgatcgggtcaaggtgattcttcatccggagtttttgagctctacttctccactgctccctatggactacgaagaatttgtgagaggttgtcatcttggtgtctttccatcatactacgagccatggggctacaccccagcagagtgcaccgtgatgggaatcccatcggttaccacgaacctgtctggatttgggtgttttatgcaagagcatgtggcagacccaaccgcgtacggcatttacattgtcgataggagatttcgatcccctgacgattcctgtaatcaactgacgaaatttctctacggtttctgtaagcagagccgcagacaacgcatcatccaacgaaatcgtacggaacggctttccgatctgcttgattggagataccttggacggtactaccagcatgccagacacctgaccctgtcaagggcatttccagataagtttcacgtggagcttacttctcccccaactacggaaggatttaagtaccctcgcccttcatccgtccccccatcaccttccggaagccaggcctcctcccctcagtcctcagatgtagaggatgaagttgaggatgaacgctacgatgaggaagaagaagcagaaagggataggctcaacatcaagtcgcctttctctctctcgcatgtcccgcatggaaagaaaaagctccatggagaatacaaaaat

SEQ ID NO: 210420 - DNA, 2109 bp, Artificial Sequence
  derived and/or modified sequence
atgttgcggggacgcagcctcagcgtgacttcgctgggaggactcccgcagtgggaggtcgaggagctgcccgtcgaagaactgctgctcttcgaggtggcatgggaagtcactaacaaagtgggaggaatctacacggtgatccagactaaagcgaaaaccacggcagacgaatggggagagaactactttctgatcggaccttactttgaacataacatgaaaactcaagtggaacagtgcgaaccggtcaacgacgctgtgcgccgggcggtcgacgcgatgaataaacacggatgtcaggtgcatttcgggcgctggctgatcgaagggtcgccttacgtggtcctgtttgacatcggctactccgcttggaacctcgacagatggaagggcgacctgtgggaggcttgttccgtgggaatcccataccacgatagagaagccaacgacatgctgatcttcgggtcactcaccgcctggttcctgaaggaggtcactgaccacgccgatggaaagtatgtggtcgcacagttccatgagtggcaggccgggatcggactgatcctttcgcgggccaggaagttgccgatcgcaactatcttcactacccacgccaccctcctgggccggtacctgtgcgcagctaacatcgacttctacaaccacctggacaaattcaacatcgacaaggaggctggagaacgccaaatctaccatcgctactgcatggagagggcatcagtgcactgtgcgcacgtgttcacgacggtcagcgagatcactgccatcgaagcggaacacatgctgaaacggaaacccgacgtggtcactccgaacggcctcaatgtgaagaaattctcggctgtccacgaattccagaatcttcacgctatgtacaaggcccggatccaggacttcgtgagaggacacttctacggacaccttgatttcgacctggaaaagactctgttcctgttcattgctggcaggtacgagttttccaacaagggcgccgacatcttccttgagtccctgtcgagactgaatttcctgctccgcatgcataagtctgacattaccgtcatggtgttcttcatcatgcctgccaagactaataactttaacgtggaaaccctgaaggggcaggcagttcggaagcagctgtgggacgtcgcccactccgtcaaagaaaagttcggaaaaaagctctacgatgccctcctgcggggtgaaatacccgacctcaacgatattctggatcgggatgatctgactatcatgaagagagccattttctccacccagcggcagtcactgcctcctgtcactacccataacatgatcgacgactccaccgatcctatcttgtcaaccatcagacgcatcgggctcttcaataaccgaaccgatagagtcaaggtgatccttcaccctgaattcttgtcatccacttcgccgctgctgcctatggactacgaggaattcgtccgcggatgtcatcttggcgtgttcccgagctattacgaaccctggggctacacccctgccgagtgcacggtgatgggaatcccttcagtgactactaacctgtcaggctttggatgtttcatgcaagagcatgtggcagacccaacggcctacggcatttacattgtggaccggcggttccgctcgccggacgattcgtgcaaccaactgactaagttcctttacggattctgtaaacaatcgcgccggcagcggatcatccagcgcaacaggactgaaagactctcggacctgttggattggagatacctgggacggtactaccagcacgcccgccatctgacgctgagccgcgccttcccggataagtttcatgtggagcttaccagcccaccgactactgaggggttcaaatacccgcgtccgtcatcggtgccgccctccccaagcggaagccaagcctcatccccgcagtcgtcagacgtggaggacgaagtggaagatgagagatacgatgaggaagaagaagcggaaagagacagactgaacatcaagagcccgttttcgctcagccatgtgccccatggcaagaagaaactccacggagaatacaagaac

SEQ ID NO: 210421 - DNA, 2109 bp, Artificial Sequence
  derived and/or modified sequence
atgcttaggggcaggtcgcttagcgtgacctccttggggggcctgcctcagtgggaagtggaagaacttccagtggaagagcttcttctttttgaggtggcatgggaagtcactaacaaggtcggtggcatctacactgttatacaaactaaagcaaaaactaccgccgatgagtggggtgagaactactttctcataggtccttactttgaacataacatgaaaacccaagtggaacagtgtgagccggtcaacgacgcggtgcgcagggctgtcgacgcaatgaacaaacatggatgtcaagtgcactttggccgatggcttatagagggatcgccttacgtggtcctttttgatatcggttactccgcatggaatctggatagatggaagggagatctgtgggaggcatgctcggtgggaatcccataccacgatcgagaagcaaacgatatgctgatttttggatccctgaccgcctggtttctgaaggaagttaccgatcatgcagacggtaagtacgtcgtggcccaatttcatgagtggcaagcaggtatagggcttattctgtcgagggcgcgaaaactgcctatcgcgaccattttcaccactcatgcaactcttttgggacggtacctttgtgcggcgaacatcgatttctacaatcatctggataagtttaacatcgataaggaggcaggagaaagacagatttaccacaggtactgcatggaacgcgctagcgtgcactgcgcccatgtgttcaccactgtgtcagagatcaccgccattgaagcagaacatatgttgaagagaaagcctgatgtggtgaccccgaatggtctgaacgttaagaaattctccgcagtgcatgagtttcaaaatctccatgccatgtacaaggcacggattcaagatttcgttcgaggccatttctacggacatctggattttgatctggaaaaaactctttttctctttatcgcagggaggtacgagttttcgaacaaaggagccgacatattcctggaatccctttcccggctcaatttcttgcttcgtatgcataagtcagatattaccgtgatggtgttcttcattatgcccgcgaaaaccaacaatttcaacgtggaaaccctgaaagggcaagccgtgagaaagcaactgtgggatgtggctcattcagtgaaggagaaatttggtaaaaagctgtacgatgcgttgcttagaggtgagattcccgacctgaatgatatacttgatcgcgatgatttgaccattatgaagagagcaattttctcgactcaaagacagtcacttccacctgtgactacccataacatgattgatgattcaaccgatcctatcctttcaaccattaggagaattggactgttcaataacagaaccgatagagtcaaggtgattcttcacccagaattcctttcgtcaacgtccccccttttgcctatggactacgaggaattcgtccgcggatgccatctcggtgtctttccgtcttactacgaaccctgggggtacactcccgcagaatgtactgtgatggggataccttccgtcaccacgaacctgagcggatttggctgtttcatgcaagaacatgtggcggatccaactgcatacggaatttacattgtggaccgtagatttcggtccccagacgattcctgtaaccagcttaccaagtttttgtacggtttttgtaagcaaagcagacgccaaagaattatccaacgcaatcgaaccgagcggctctcagatctgttggattggcggtatctgggtcggtattaccaacatgcccgccatttgacccttagcagagcttttcccgataagtttcacgtggaactcacctcccctcctaccactgagggatttaagtacccgcgtccctcgtcagtgccgccttcaccttcaggatcacaggcatcgagtccacaatcctcggacgtagaagatgaggtcgaagatgagcggtacgatgaagaggaggaagcggaacgggatcgcctgaacattaagagccctttctccctctcacacgtgccacacgggaagaaaaagctgcatggtgaatacaagaat

SEQ ID NO: 210422 - DNA, 2109 bp, Artificial Sequence
  derived and/or modified sequence
atgttgcggggacgcagtctgtcagtgacttctctcggagggcttccccagtgggaggtggaagaactccctgtagaagaacttcttcttttcgaagttgcctgggaagtgacaaataaagtggggggaatctatactgtgattcagacaaaggccaagacaactgcagacgagtggggggaaaattatttcctcatcggaccttactttgaacataatatgaaaacacaggtggagcagtgtgaacctgtgaatgatgctgtgcggcgagcagttgatgctatgaacaagcacggatgtcaggtgcactttggaagatggcttattgaaggatctccttatgtagtgctgttcgacatcgggtattctgcttggaatcttgatcgctggaaaggagacctgtgggaagcttgttccgtcgggataccatatcatgatagggaagctaatgatatgttaatcttcgggtctcttacagcctggtttttgaaagaagtaacagatcacgctgatggaaaatacgtggtggcacagtttcatgaatggcaggccgggataggacttattctgtcacgggccaggaaattgcctattgcaacaatttttactacacacgccactcttcttggaagatatctgtgtgccgctaacatagatttttacaatcacctagataaattcaacatcgacaaagaagccggggaaagacagatctatcatcggtattgtatggaaagggcatctgtgcactgtgcacatgtgttcactactgtctctgaaatcacagctatagaggctgaacatatgttgaaacgcaaacccgatgttgtgacaccaaacggactcaatgtgaaaaaattctcagccgtgcatgaattccagaaccttcacgctatgtacaaagcgagaatccaggattttgtgagagggcatttttatggacacctcgacttcgatttggaaaaaacattatttctgtttatagctgggaggtacgaattctccaataaaggggcagacatatttctggaatctctctcaagattgaacttcctccttcgaatgcacaaaagtgacatcacagtgatggtattctttatcatgcccgctaaaacaaacaacttcaacgtggaaacactcaaaggacaggcagtgagaaaacagctatgggatgtggcccatagtgtgaaggaaaaattcgggaaaaaactatacgatgccctcctcagaggggaaatcccagatctcaacgacatactcgatcgggacgatctgacaatcatgaaaagagccatatttagtacgcaaaggcagtcactaccccccgtgacaacacacaacatgatcgatgatagtacagatcctatcctttctacaattaggaggatcggattgtttaataacaggactgatcgagtgaaggtgattctgcatcccgaatttctgtcatctacatcacccctgttgcctatggattatgaagagtttgtacgcgggtgtcacctaggggtgttcccttcttactatgaaccatggggatacactccagcagaatgtactgtgatgggaatcccaagtgttacaacaaacctttccggattcggatgcttcatgcaggaacacgtggccgatcccactgcatatggaatctatatcgtagatcgccgattccggtcccctgatgatagttgtaatcagctcactaaattcctctatgggttttgtaaacagtcccgacggcagcgcataatccagagaaaccggacagaaaggctctctgatctactcgattggagatacctggggcggtattatcagcacgcaaggcacctaacactctccagagcattccccgataagtttcacgtagaactcacatcaccacccacaactgaaggatttaaatatccaaggcccagttccgtgccaccttccccatcagggtctcaggcatcttctcctcagagttccgacgtcgaggatgaggtggaagatgaaagatacgatgaagaagaagaagcagaacgggatcgactcaatataaagtctccctttagtctgagtcacgtacctcatggaaaaaaaaagctgcatggagaatataaaaac

SEQ ID NO: 210423 - DNA, 2109 bp, Artificial Sequence
  derived and/or modified sequence
atgctccgaggccgtagcctgagtgttacttctctaggagggctaccccagtgggaggtggaagaactccctgttgaagaattgctgctgttcgaggtcgcgtgggaagtcactaacaaagtcggtggaatatatacagtgatccagaccaaggccaaaactacagccgatgaatggggcgagaattacttcctcatcggaccatacttcgaacacaatatgaaaacgcaggttgaacagtgtgagcctgtgaacgatgcggtgcgtcgggccgtggatgcgatgaacaagcacggctgtcaggtccatttcggccggtggttgatagaaggatccccatacgtagtgttattcgacattggttatagcgcttggaatctggaccggtggaaaggcgacttgtgggaagcttgttcagtgggaataccctatcatgatcgggaagcaaacgacatgctaatattcggctcccttaccgcctggttcctaaaagaggtcactgaccacgccgacgggaaatacgtggtggcccagtttcacgaatggcaggcgggcattggattgatcctgagtcgagctcggaagctgcccattgctactatttttactacgcacgcaaccttgttgggcaggtacctgtgcgcagccaacatagacttctacaaccatctggacaaattcaacatcgacaaagaggcaggggaaagacagatttatcaccgctattgtatggagcgtgcctcagttcattgcgcccacgtctttacaaccgtgtcagaaatcactgccatcgaggcagagcacatgttgaaacggaaaccagacgtggtcactccaaacggtctgaacgtcaaaaaattctctgccgtccatgaatttcagaatctgcacgcgatgtataaggcgcgaatccaggactttgtgcgtggccatttctatggccatttggacttcgacctggagaagacattatttctgtttatcgcaggccgatatgagtttagtaacaaaggagctgatatcttcctagaatcattatctcgattgaactttcttcttcgtatgcacaagtcggatatcaccgtgatggtattcttcataatgcccgcgaagacaaataatttcaatgttgagaccctgaagggtcaagctgtaaggaagcagctgtgggacgtcgcccactccgtaaaggagaagttcggaaaaaagctgtacgacgcccttttgcgcggagaaataccagatctgaatgatatattagatcgcgatgatcttaccatcatgaagcgggcgattttctcgacgcagcggcagagcctgcctcctgtcactacacataatatgattgacgacagcaccgaccctattctttctaccattcggaggattggccttttcaacaatcggacagacagagtgaaggtcattctccatccagaattcctttcaagtacatctccgctcttgccaatggactacgaggagttcgtaaggggatgtcatttaggcgtgtttccatcctactacgagccatgggggtacactccggcagaatgtaccgtaatggggataccatccgtcaccaccaatctatccgggttcggttgcttcatgcaagagcacgtcgcagatccaaccgcatacggcatctacattgtcgatagacgtttcagaagccccgatgactcatgtaaccagctgaccaaattcttgtacggattttgtaaacaatcccgtcgccaacgtatcatacaaagaaatcgtactgaacgcctgagcgatcttctggattggagatatctggggaggtattatcagcacgcgcggcatctgactttgagcagggcttttccagacaaattccatgtcgagctgacgagtccccccaccacagagggattcaagtacccccggcctagctctgtgcccccctcaccaagcggttcacaggcttcatccccacagagctccgacgtagaggacgaggtagaagatgagcgctatgacgaggaggaggaggctgagcgagataggcttaatatcaagtcccccttcagccttagtcacgtgcctcacggtaaaaaaaagctgcatggtgagtataaaaat

SEQ ID NO: 210424 - DNA, 2109 bp, Artificial Sequence
  derived and/or modified sequence
atgctgcgtggtcgttctctgtccgttacctctctgggtggtctgccccaatgggaggttgaggagttgcctgtggaggaactgctgctgttcgaagttgcatgggaagtcaccaataaagtgggtgggatttacacggttatccaaaccaaggcgaagacgacggcagacgagtggggcgagaactactttctgattggtccctattttgagcacaatatgaagactcaagtcgaacagtgtgagccggttaatgatgcagtgcgacgggccgtggatgctatgaacaaacatggttgccaggttcatttcggacgctggctgattgaaggcagcccgtacgtggttctgtttgacattggctactcggcgtggaacctggatagatggaagggcgacctgtgggaagcttgctctgtgggtattccgtaccacgatcgtgaggctaacgatatgttgattttcggtagcttgacggcttggtttctcaaagaggtcaccgatcacgcggacggtaagtatgttgtcgcgcagttccatgagtggcaggcggggattggtctgatcctgtcccgcgcgcggaaattgccgatcgcgactatcttcacaacgcatgccactctgcttggacgttacctgtgtgcagcgaatattgacttctacaatcatctggacaagtttaacattgacaaggaagcgggtgagcgtcagatctaccaccgctactgtatggagcgcgcgagcgtacactgcgcgcatgtcttcaccacggtgtccgagatcaccgctattgaggccgagcacatgctgaagcgtaaacctgacgttgtgacccctaacggacttaacgtgaagaagttctccgctgtgcacgagttccagaatctccacgcgatgtacaaggcacgcattcaggactttgtgagagggcacttttatgggcacctggatttcgatttagaaaaaacactctttctgttcatagcgggccggtacgagttcagcaataagggcgccgacatctttcttgagtctctgagcagactcaacttcctgcttcgcatgcacaaaagtgatattaccgtgatggtgttttttataatgccagccaagactaataactttaacgtggaaacactgaaaggtcaggccgttaggaagcagctgtgggatgttgcacacagcgttaaggagaagttcggcaagaagttgtacgatgctttgctgcgaggagagatccctgatctgaacgacatactggaccgggacgatctgaccattatgaagcgtgctatttttagcacccagagacagtctctgccaccggtcactactcataacatgatcgatgatagcactgatcctattctctccactattagacgtatcgggcttttcaataatcgaacggatcgagttaaggttattttgcacccggagttcctgagcagcactagcccgctgttgccaatggactacgaggaatttgtgcgcggatgtcatttgggcgtcttcccgtcctactatgagccttggggttatacccccgcagagtgtaccgtcatgggcatcccgagcgttacaacaaacttgagcggtttcgggtgctttatgcaggagcacgttgctgatccaaccgcttatggaatttatatcgtggatcgtcggttccgtagccctgacgacagctgcaaccaactcactaagttcctgtatggtttctgtaagcagtcccgccgtcaacgcataatccaacgtaacagaacagagcgcctgtcagatctgctggattggcgctacctgggcaggtactaccaacatgctagacacctcaccttgagccgcgcgttccctgacaagttccatgtggaattgacttctcctccaaccacggaagggtttaagtatccaaggccaagcagtgttccgcccagtccatctgggtcccaggcaagcagcccacagtctagcgacgtcgaagacgaagtcgaagacgagagatatgatgaagaagaagaggctgagcgcgaccgtctgaacatcaaaagccctttctcgctgtcccacgtcccgcacggcaaaaaaaaactgcacggcgaatacaagaac

SEQ ID NO: 210425 - DNA, 2109 bp, Artificial Sequence
  derived and/or modified sequence
atgctgagggggagatcgctatccgtgacctccttgggcggattgccacagtgggaggtggaagaactgcccgttgaggaacttctacttttcgaggtggcttgggaagtgaccaacaaggttggtggcatttacacagtcatccagacgaaagctaaaactacggccgacgagtggggcgaaaattacttcctcattggcccatatttcgagcataatatgaaaacgcaggtagagcagtgcgaaccggtgaatgatgccgtgcgcagggcagtagacgccatgaacaaacacgggtgccaggtccacttcggccgttggctaatcgaggggtcaccctacgttgtcctgttcgatatcggttacagcgcttggaacctggataggtggaaaggcgacctgtgggaggcatgttccgttggcatcccttatcacgatagggaggctaatgacatgctcatcttcggctctctgacagcctggttcttaaaagaagtcactgatcatgcagatggcaagtatgtggtagcacagttccatgaatggcaggcggggatcggcctgatcctgtcacgcgcacgcaagttgcctatagccaccatttttactacgcacgccacactgctgggacgctacttatgcgctgccaacattgacttttataatcacctggataagttcaacatcgataaggaagcaggtgaacggcagatctatcaccgctactgtatggaaagagcaagcgtgcattgcgctcacgtctttaccaccgtcagcgagatcaccgcgatagaagccgagcacatgctgaaacgcaagcccgacgttgtcaccccaaatggactgaatgtgaaaaagttttcagccgtccatgagttccagaacttacatgcgatgtataaagccaggatccaggattttgtgcgcggtcacttttacggacacctggattttgatttagagaagactctgttcttattcatcgccgggaggtacgagttcagtaataagggggcagacattttcctggagtcactctctagactgaattttctactgaggatgcacaagtccgatatcaccgtgatggtcttctttatcatgcccgcgaaaactaataactttaacgtggagacactcaagggacaggccgtcaggaagcagctgtgggatgtcgcccacagtgtcaaagagaagttcggaaaaaagttgtatgacgcactgcttcgtggtgagatccccgacctgaatgacatactagatcgagatgatctgacaattatgaaacgtgctatcttttccacccagcggcagtccctgcctccagtgacgacccataatatgatagatgatagtaccgaccccattttaagtaccatccgacgcataggcttgtttaacaatcgtaccgaccgggtgaaggtcatacttcaccccgaatttctgtcctctacctctcctttgctgccaatggattatgaggagttcgtcaggggttgccatcttggagtgtttccctcgtattatgagccctggggctatactcccgcagagtgcactgtaatgggaatcccgagtgtgacaacaaacctgagtggctttggctgtttcatgcaagaacacgtggccgatcccactgcctacggcatttatatcgttgatcgcagattcagatcacctgacgatagttgcaaccaactgactaaattcctctacggcttttgcaagcaatctaggcgccagcggatcatccagagaaatagaaccgagagactgtcggacctgcttgactggagatatctgggaaggtattaccaacacgcacgacacctcaccttgtccagggcttttcccgataagtttcatgtggaattgacgagccccccgacgacagagggttttaaataccctcgccccagctctgtgccaccttcccccagcggatcacaggcttcctccccacagtcatccgacgtggaagatgaggtggaggacgagagatatgatgaggaagaagaggcggagagagacagactcaacatcaagtcaccgttctccctgtcgcacgtcccccatggaaaaaagaagctccacggggagtacaaaaat

SEQ ID NO: 210426 - DNA, 2109 bp, Artificial Sequence
  derived and/or modified sequence
atgctgcgcgggaggtccctgtccgtgacgagcttaggtggtctgccacaatgggaggttgaagagctacctgtggaggaactattgttatttgaggtggcctgggaggtcaccaacaaagttggggggatctacaccgtgattcagacgaaggctaagacaacagcagatgagtggggcgaaaattactttcttatcggcccctactttgaacataatatgaagacccaggttgagcagtgcgaacctgtgaacgacgccgtgcggcgggccgtggacgccatgaacaaacacggttgtcaggttcattttggccgatggctcattgaaggttccccgtacgtggtcctattcgacataggctactctgcctggaatctggacaggtggaagggcgacctctgggaagcctgttctgtcggtatcccctaccatgaccgggaagctaacgacatgcttatatttgggagcctgaccgcatggtttttgaaagaggtcactgatcatgccgacggcaagtatgtggtcgcccagtttcatgagtggcaagctggaattggcttgatcctatctcgggcccgtaaattgcccatcgctacaatcttcactacacatgctacactgctcggcaggtacctgtgtgctgctaatattgacttttataatcacttagataaattcaacatcgataaagaggcaggcgaaagacagatctaccatcgatactgcatggaaagggcctccgtacattgcgcccacgtgtttaccacagtgtcagagattacggcgattgaggccgagcacatgttgaagcgcaaaccagatgtagtaactcccaatggtcttaacgttaagaagtttagtgcggtgcacgagttccagaacttacatgctatgtacaaggcccgaatacaagacttcgtaagaggacacttttacggtcacctggatttcgatctcgagaagactttatttttgtttatagctggccggtatgagttctctaataagggcgcggatattttccttgaaagcctctcccgtttaaacttccttcttaggatgcataaatcagatatcaccgttatggtgttttttatcatgccagcaaagactaataacttcaacgtggagactctgaaagggcaggcagtccgcaaacagctctgggacgtggcccacagcgtgaaggaaaagttcggcaagaaactctatgacgcactgctcagaggcgagattcctgacctcaatgacatcctcgaccgggacgatctcactatcatgaaacgtgcaatctttagcacacaacgacagagcttgccccctgtgaccactcacaatatgatcgatgatagcactgacccaattctatccactatccgcaggataggcctctttaacaaccgaactgacagggtcaaggtcatcctgcaccctgagtttctgtcctctacatccccgctccttcccatggactacgaagagtttgtgcggggctgccacttgggcgtcttcccttcttactatgagccctggggctacacaccagctgaatgcacagtcatggggattccctccgtcaccactaatttgtctggcttcgggtgcttcatgcaagagcacgttgccgaccccacagcctatggaatctacatcgtcgaccgacggtttcgctctccggatgactcgtgcaaccaactcactaagtttctttatggtttctgtaagcagtctaggaggcagagaatcattcaacggaacagaaccgagcgcctctccgatctgcttgattggaggtacctggggcgatactaccaacatgcacgacatttgacactgagcagagcatttccagacaaattccatgtagaattgacaagccctcccaccactgaggggttcaaatatcctagaccctcatctgttcccccaagcccctcgggctctcaggcttccagtccccagtcatccgatgtagaggatgaagtggaggatgagagatacgacgaggaggaggaagccgaacgggataggctgaacattaagtccccattctccctgagccacgttccccatgggaaaaaaaagttacacggagagtataaaaac

SEQ ID NO: 210427 - DNA, 2109 bp, Artificial Sequence
  derived and/or modified sequence
atgctccgtggaagatcgctgagtgtgacgtcgctgggtggattaccacagtgggaagtggaggagttgcctgtcgaagagctgctcctgtttgaagtcgcctgggaagtcactaataaagtcggtgggatctacaccgtgatccagactaaggcaaagacaacagctgatgagtggggcgaaaattacttccttatcggcccttatttcgagcacaatatgaaaacccaggtggaacagtgcgagcccgtgaacgatgctgtgcgacgcgctgtcgatgccatgaataagcatggatgccaggtgcactttggacgctggttgatcgaagggtccccatatgtggtgctgttcgatattggctactcagcctggaacctcgaccgctggaagggcgacctatgggaggcttgttctgtggggatcccttaccatgaccgcgaggcgaacgacatgctaatcttcggctcactgactgcctggtttctcaaagaagtgacagaccacgctgatgggaagtacgtcgtggctcagtttcacgagtggcaggccggtatcggtctgattctgagcagggctcggaagctaccaatagctaccatctttacaactcatgctacattgctgggccgctacctgtgcgccgcgaacattgatttttataaccatctggacaagtttaatatagacaaagaagctggggaacgacagatttatcaccgatactgcatggagagggctagcgtccattgcgcgcacgtgtttactaccgtgtccgaaatcacggcgattgaagctgagcacatgctgaagcggaagccagacgttgtcacacccaacgggttgaatgtcaagaagttctccgccgtccacgaattccagaacctccatgccatgtataaagccagaattcaggacttcgtgagggggcacttttatgggcacctcgattttgatctggagaagactctcttcttgttcatcgcgggaaggtatgagttttccaacaaaggtgctgacatttttctggaaagcctttcgagactcaacttcctactgcggatgcacaaatccgatattaccgtgatggtattcttcattatgccggcaaagacgaacaatttcaacgttgagacactgaagggacaagccgttaggaaacagttgtgggacgtcgcccacagcgtgaaggagaagtttgggaaaaagttgtatgatgctttgctcagaggcgagatacctgatcttaacgatatccttgacagggacgatcttaccatcatgaaaagggctatttttagcacccagcggcagagtctgccgccggtgaccacacacaacatgatcgatgatagcaccgatcctatcctgtcaactataagacgcattggcctttttaataaccgaacagatcgcgtgaaagtgatactgcacccggaatttctctcttctaccagccccctgttacctatggactatgaagaattcgtgagagggtgccacctcggcgtcttcccgtcatattatgaaccctggggctacacccctgctgagtgcacagttatgggaatcccctccgtcacaaccaacctgagcggattcggatgctttatgcaggagcacgtcgccgatccgactgcatacggcatctacattgtcgaccgaagattcagatctcctgatgattcttgtaaccagttaactaagttcctgtacggcttttgcaaacagagtcggcgccagcggatcatccagagaaaccggaccgagcgcttatcagatctgctggattggcggtatctgggacgatactatcagcacgcaaggcacttaacattgagcagagcttttcccgacaaattccatgtggaattgaccagtccccccacaaccgaggggttcaagtatccgaggcctagctccgtgcccccctctccctctggatcacaggcaagttcgccacaatcctccgatgttgaggacgaggttgaggatgagcggtacgatgaggaggaggaagcagagagggacagactcaacattaagagtcccttctctctatcccacgtgccccatggtaaaaagaagctccacggcgagtacaagaat

SEQ ID NO: 210428 - DNA, 2109 bp, Artificial Sequence
  derived and/or modified sequence
atgctgcggggacgctcgcttagcgtgacgtcattgggtggactgccgcagtgggaagtagaagagctgccagtcgaggagctgctcctcttcgaagtggcctgggaggtcactaataaggtgggtgggatttacaccgtgatccagaccaaggccaagaccactgccgatgaatggggtgagaactactttctgattggcccatacttcgaacacaacatgaaaacccaagtcgaacagtgcgagccggtcaatgacgcagtgcggcgggctgtcgatgcaatgaataagcacggttgccaagtgcatttcggacggtggctgattgagggtagcccgtacgtggtgctgttcgacatcggatactcggcctggaatttggacagatggaagggtgacctgtgggaggcgtgctcagtgggaatcccttaccacgatcgggaggcgaatgatatgctgattttcggatcgctgaccgcctggtttctgaaagaagtcaccgaccacgccgacggcaagtacgtggtcgcccagttccacgaatggcaggccggaatcgggttgatcctctcccgcgcccgcaagctgccaattgccaccatcttcaccactcatgcgacgttgctgggtcggtacctctgcgccgctaacatcgacttttacaatcacctcgacaagttcaacattgataaggaagcgggcgaacgccaaatctaccacagatactgtatggagcgcgctagcgtccattgcgctcacgtgttcacgaccgtgtccgaaatcactgccattgaagccgaacatatgttgaagagaaaaccggacgtggtgaccccgaacggactgaatgtgaagaagttttcagcagtccacgagttccaaaatctccacgccatgtataaggcccgaatccaagacttcgtgagaggacacttttacgggcacctggatttcgacctcgagaaaacgctgttccttttcatcgcaggacgctacgaattctccaataaaggagccgacatcttcctggaatcgctctcccgcctgaacttcctgctcagaatgcataaatcagatatcactgtgatggttttcttcatcatgcctgctaagactaataacttcaatgtggaaactctgaagggccaggctgtgagaaagcagctgtgggacgtcgcccattccgtgaaggaaaagtttggcaaaaaactttacgatgcactgctgcggggcgagatccccgacctcaatgatatccttgaccgcgatgacctgacgattatgaagcgggcgatcttctcgacccaaaggcagtcactcccaccggtgactactcacaacatgattgacgattcgaccgatccaatcctgtcgacgatcagaaggatcggacttttcaataacaggactgatcgggtgaaagtcatcctgcaccccgaatttctttctagcactagcccactgctcccgatggattacgaagaatttgtgcgcggatgccacctcggagtgttcccgtcgtactatgaaccttggggatacactcctgcggaatgcactgtcatgggtatcccttcagtgacgacgaacctgagcggattcgggtgctttatgcaggagcacgtggcagaccccactgcgtacggtatctacatcgtggaccgcagattcagatctccggatgattcgtgtaaccagctcaccaagttcctgtacggattctgcaaacaaagcaggcggcagcggatcatccaacggaacaggactgagcgcctcagcgacctgcttgactggagatacctcggccggtactatcagcatgcgcggcatctcactctgtcgcgggcattcccggacaagtttcacgtcgaactcacctcgccgccgactactgaaggatttaagtacccccggccgtcaagcgtgccgccgtcaccgtcaggatctcaggcctcgtccccacaatcctcggatgtggaagatgaagtggaggacgagcggtacgacgaggaagaggaagccgaacgcgaccggctgaatatcaagtctccgttctcgctgtcgcacgtgccgcacgggaagaaaaagctgcacggagagtataagaat

SEQ ID NO: 210429 - DNA, 2109 bp, Artificial Sequence
  derived and/or modified sequence
atgttgcgaggcaggtcgctttcggtcacttcccttggaggtctgccacagtgggaggtcgaagagctgcccgtggaggaactgctcctgtttgaggtggcatgggaagtgaccaacaaggtgggtggtatttacaccgtgattcaaaccaaggcaaagaccactgcagatgagtggggcgagaattacttcctgatcggtccatactttgaacataacatgaaaacccaagttgagcagtgtgagccagtgaatgacgcagtgagaagggcagtggatgccatgaacaagcatgggtgtcaggtccattttggacggtggcttatcgaaggatcaccttacgtcgtgcttttcgatattggatactccgcatggaacctggataggtggaaaggagatctttgggaagcatgttcggtgggtattccttaccacgatcgggaagcaaacgatatgcttatctttggttcactcaccgcatggttcctcaaagaagtgactgatcatgccgacggaaaatacgtcgttgcgcaattccatgagtggcaggcaggaattggccttattctgtcaagagcccggaagctgcctatagcaacgatctttactacccatgcaaccctgctggggcgttacctctgtgcggcaaacatcgacttttacaaccatcttgacaagtttaacatcgacaaggaggccggtgaaagacaaatctaccatcggtactgcatggaacgggccagcgtgcattgtgcccacgtgtttaccactgtctcagagatcaccgcgatcgaggcagaacacatgcttaagcgcaagccagacgtggtgacccccaacggactgaacgtcaagaagttttcggcagtccacgaattccagaacctgcacgcaatgtacaaggcgcggatccaagactttgtgcggggccacttttatgggcatctcgacttcgatcttgaaaaaacccttttccttttcatagccggccggtatgaattttcaaataagggtgctgacattttcctggagtccctttcccgtctgaatttcctgcttagaatgcataagtccgatataactgttatggtctttttcataatgccagcaaagactaacaactttaacgtggaaaccctcaaagggcaggcagtgagaaagcaattgtgggacgtcgctcactcggtcaaggaaaagttcggaaaaaagctctacgatgcacttcttagaggcgaaattccagatctgaacgatatccttgatcgcgatgatctgaccattatgaaacgggcaatctttagcactcagaggcagagccttccccctgtgaccacgcacaatatgattgatgattccacggaccccattttgagcaccattagaaggatcggtctgttcaataaccgcaccgaccgcgtgaaggtgattctccaccccgagtttctttcatccacgtcgccccttcttcctatggattacgaagaattcgtcaggggctgtcatctcggcgtgttcccttcgtactacgagccctggggatacacgcctgcagaatgcaccgtgatgggtatcccttcggtgactaccaacctgtcaggttttggttgtttcatgcaagaacatgtggcagatcctactgcgtacgggatctacattgtggatcgtagatttcggtcgccggatgattcgtgcaaccaacttacgaagtttctttatggattttgtaaacaaagcaggaggcagcgcatcattcaaagaaatagaactgagcgcctctccgacctgcttgattggcgctatctcggcagatactaccagcacgcacgtcacctgactctgagccgagcatttcctgataagttccatgtggaactgacttcgccccccactactgaagggtttaagtaccctcggccaagctccgtcccaccctcaccaagtggatcccaggcatcgtcccctcagtcgtccgatgtggaggacgaagtggaggatgaacgttacgatgaagaagaggaggccgagagagatcgtctgaacattaagtcacccttctcactctcccacgtgcctcacggaaagaagaagctccatggtgagtacaagaac

SEQ ID NO: 210430 - DNA, 2109 bp, Artificial Sequence
  derived and/or modified sequence
atgctgcggggtcggtcgcttagcgttacttccctaggcggcttaccccaatgggaagtggaagagcttccggtggaggagcttcttctctttgaggtggcatgggaggtgaccaataaggtggggggaatctatactgttattcagacgaaagcaaagaccactgcagacgagtggggggagaactactttctgattgggccatacttcgagcacaatatgaagacacaggtcgaacagtgcgagcctgttaatgacgcagtccgccgtgccgtagacgccatgaacaagcacggttgtcaagtccacttcgggaggtggctcattgaagggagtccatacgtggttctcttcgatatcggttactctgcgtggaatctggatcgttggaagggggatctctgggaggcgtgctcagtcggcataccatatcatgacagagaagccaacgacatgctcatcttcggtagtctgacagcctggtttttgaaggaagtaaccgaccatgccgacggcaagtacgtggttgcacaatttcatgaatggcaagccggtattgggctcatactaagcagggcgcgaaagttgcccattgctacgatcttcacaacgcacgcgacattgttggggcgctacctgtgtgcagctaatattgatttttacaatcaccttgacaagtttaatatcgacaaggaagctggcgaacgtcagatctaccatagatactgtatggaacgagcctcggtccactgcgcccacgtctttactacagtttccgagatcacggctattgaggcagagcatatgttaaagcgtaagcccgatgtcgtcacgcccaatggtttgaatgtgaagaaattctcggccgtccatgaattccagaatctccacgcaatgtacaaggctaggatccaagactttgtgcgaggtcacttctacggacatcttgacttcgatctagagaagacgctcttcctcttcatcgcaggacggtatgaattctccaataaaggtgccgatatatttttggaaagcttgtcccgcctcaacttcctcctgcgtatgcacaagtccgacatcactgtcatggtgttttttattatgcctgctaagacaaataattttaacgtggagacccttaaaggtcaggcagtccgcaagcaactctgggatgttgctcattctgtcaaagagaagttcgggaaaaagctttacgatgcattgttacgtggggagatccctgacctaaacgatattctagaccgtgatgatctgacgataatgaagcgggcgatattctccacacaacgtcaatcactgccacctgtgactacacacaatatgattgatgactcaacagatcctatcctctccacgattcggaggattggactctttaataaccgaaccgacagggtcaaggtcatccttcaccctgagttcttgtccagtacgtcaccattattgccgatggattacgaagagttcgtacgcggttgccatctaggtgtattcccgtcctactacgagccttggggatatacgccagccgagtgcacggttatgggcatcccatctgtaaccacaaatctctctgggttcgggtgcttcatgcaagaacacgtggcagatcccacggcgtatggtatatatattgtcgatcgtcgttttcgatcacctgatgattcatgcaaccaattgaccaagttcctgtacggattctgcaagcagagccgaaggcaacgcattatccagcggaaccgaacagagcgccttagcgatctgttggattggcgctacttgggccgttactaccagcacgctcgccatctgacactatcacgggcatttccagataaattccatgtcgaactgacatcccctcccaccaccgaggggttcaagtatcctcgtccctcatccgtgccaccgtcaccgagtggctcacaggctagctcacctcaatcatctgacgttgaagatgaggtcgaagacgagaggtatgatgaagaagaggaagcagagcgcgacaggcttaacatcaagtcccctttttctttgagccacgtaccccatggaaagaaaaaattacacggcgagtacaagaat

SEQ ID NO: 210431 - DNA, 2109 bp, Artificial Sequence
  derived and/or modified sequence
atgctgcgcggacgcagcctgtccgtgacgtcactgggtggcttgccacaatgggaggtggaagaactgccggtggaggaacttcttctgtttgaggtggcgtgggaagttactaataaggtcggaggaatttacacggtgatccagaccaaggctaagactacggccgatgaatggggcgaaaactatttcctgatcggcccttactttgagcataacatgaaaacgcaggtggaacaatgcgaacctgtcaacgacgctgtgcgtagagccgtggatgccatgaacaaacacggatgtcaggtgcattttgggagatggctcatcgaagggtcgccatacgtcgtcctgttcgatattgggtactcggcatggaacctggatagatggaaaggtgacctttgggaagcctgttccgtgggaatcccctatcacgatcgggaggcaaatgacatgctcatttttggcagccttactgcttggtttctcaaggaagtgacggaccacgcagacggaaagtatgtcgtcgcgcaatttcatgaatggcaagcaggcattggtcttattctttcaagggctcgcaaactgccaatcgccacgatcttcaccactcatgcgaccctgctgggtagatacctgtgtgctgcaaacattgacttttacaatcacctcgataagtttaacatcgacaaggaggcaggagaacggcagatatatcatcggtactgcatggaaagagccagcgtccattgtgcccatgtgttcactaccgtgtcagaaataaccgcaattgaagcagagcacatgctcaagcgtaaacctgatgtggtgacgcctaacgggttgaacgtgaagaagttttcggcagtgcatgaatttcaaaatcttcacgcgatgtacaaggcacgtattcaggactttgtgaggggtcatttctacggtcatcttgatttcgatctggagaaaactctgtttttgtttatcgcaggtcgctatgaattctcgaacaagggagcagacatctttctggaatcgcttagcagactcaacttcctgctgcggatgcataaatccgacattactgtgatggtgtttttcataatgcccgcaaaaactaacaacttcaacgtggaaactctgaaaggtcaagctgtgagaaagcagttgtgggatgtcgcacattccgtgaaagagaagtttggaaaaaagttgtacgatgcgctgctgcgaggcgagattcctgacctgaatgacatcctggatagagatgatctgactatcatgaagagagcaatattctcaactcagcggcaatctttgcctcctgtgaccacccacaatatgattgatgattcaaccgacccaattctttcgactatccgcagaattgggctgttcaataaccgcaccgatcgtgtcaaggtcatacttcatccggagttcctttcatcgacttccccccttcttccaatggactacgaggagttcgtgaggggttgtcacctgggcgtctttccttcgtactacgaaccttggggttacactcctgccgaatgcaccgtgatgggaataccgtccgtcaccactaaccttagcggtttcggatgctttatgcaggagcatgtcgcagatcctaccgcgtacggaatctacattgtcgataggagatttcggtcaccggacgactcgtgtaaccaactgaccaagttcctttacgggttctgtaaacaaagcagaaggcagcgcattattcaacgcaatagaaccgaaaggctttcagacctgctcgattggagataccttgggagatactatcaacatgcacgccacctgaccttgtcacgggcgttcccagataagtttcatgtggagcttacctcgcctccaaccaccgaagggttcaaatacccacggccctcatcggtgcctcctagcccgtccggtagccaagcatcctcccctcaatcgtctgacgtcgaggatgaagtcgaagatgaacgttacgatgaagaggaagaagcagaacgggatcgcctcaacattaagtcccccttttcgttgtcacacgtcccacacggtaagaagaagttgcatggcgagtacaagaat

SEQ ID NO: 210432 - DNA, 2109 bp, Artificial Sequence
  derived and/or modified sequence
atgctccgcggacggtcactgtcagtcacctcgctgggtggccttccccaatgggaagtggaggagctgcctgtggaagagttgctcctgttcgaggtggcttgggaagtgactaataaggtgggaggtatctacaccgtcatccagaccaaggcgaaaacgaccgcagacgagtggggagagaattacttcctcatcggtccgtacttcgaacacaacatgaaaacgcaggtggaacagtgtgagcctgtaaacgacgctgtgcgccgggccgtggatgcaatgaacaagcacggctgccaggtccacttcggccgctggctgatcgaaggctccccatacgtcgtcctcttcgacattggatactcagcctggaatctggatcgctggaaaggagatttgtgggaagcctgctccgtgggaatcccgtaccatgatcgcgaggcgaacgatatgctgatctttgggagtctgactgcgtggtttcttaaggaagtgaccgaccacgcagacggcaagtacgtggtggcgcaattccatgaatggcaggccggtattggcctgattctgtcgagggctcggaagctcccgatcgccactatcttcactacccatgcgacccttctcgggagatacctgtgcgccgcaaatatcgacttctacaatcatctcgacaagtttaacatcgacaaggaagctggagagcggcagatctaccaccgctactgtatggagcgggcatcggtccattgcgcccatgtgttcaccaccgtttccgaaattactgcgattgaggccgaacatatgctgaagcggaaacctgatgtggtcacccctaacggcctcaacgtcaagaagtttagcgccgtccacgaatttcaaaacctgcatgccatgtacaaggcgcgcatacaagatttcgtgagaggacatttctatggacacctggactttgatctcgaaaagactctgttcctcttcatcgcgggaaggtacgagttctccaacaagggggctgacatcttccttgaatccctgagcagactcaacttcctgctcaggatgcacaagtcggacattactgtcatggtgttcttcatcatgcctgccaagaccaacaactttaacgtcgagactctcaagggacaggccgtgcgaaagcagctctgggatgtggctcactcagtgaaggagaaattcggaaaaaagctctacgacgctctgttgcggggagaaatcccagacctcaacgatatccttgaccgggatgacctcaccatcatgaagcgggcgatcttcagcactcaacgccaaagtttgccaccggtcaccactcacaacatgattgacgactccaccgacccaatcctgtcgactatcagacgcatcggtttgttcaataaccgcactgaccgcgtcaaagtcatattgcaccccgagtttttgtccagcacgtccccactgttgcctatggattatgaggagtttgtccgcggatgccacttgggagtgttcccatcctactatgagccttggggttacaccccagcggaatgcaccgtaatgggaatcccaagcgtgactaccaatctgagcggctttggatgtttcatgcaggaacatgtcgccgatccgaccgcttacggcatctacatagtggacaggcggtttagatctcctgacgattcctgcaatcaactgactaaattcctgtacggattctgcaaacaatcgagacggcagcgcatcatccagagaaacagaactgagaggctgtcagatctgttggactggcgctacttgggacggtactaccagcacgcccgtcacctgacgctctcgcgcgcgttcccggacaagttccatgtcgaacttacctcgccgcctactaccgaaggattcaaatacccacgcccgtcatcagttcctccaagcccctccggcagccaggcctccagcccgcaaagttccgacgtcgaagatgaggtggaggacgaacggtatgacgaagaggaagaagcggaaagggatagactgaacatcaaatcgcccttctcactgtcccacgtcccgcacggtaagaagaaactccacggggaatacaaaaac

SEQ ID NO: 210433 - DNA, 2109 bp, Artificial Sequence
  derived and/or modified sequence
atgctccgcgggcggagcctgtccgtgactagcctgggcggtctgccacagtgggaggtggaagaacttccagtcgaagagcttctcctctttgaagtggcgtgggaagtcaccaataaggtgggtggcatttacactgtgatccagaccaaagcgaaaaccaccgcagatgaatggggtgaaaactactttctcattggtccgtattttgagcataacatgaaaactcaagtggagcagtgtgaacctgtgaatgacgctgtgcgtagggcggtcgatgccatgaacaagcatggctgtcaagtccactttggacgctggctgattgaaggaagcccatatgttgtgctgttcgatattggctacagcgcctggaatcttgatcgctggaagggcgatttgtgggaagcctgctccgtaggaattccataccatgacagggaggcaaacgacatgctcattttcggtagcctgaccgcctggtttctcaaagaagtgaccgatcatgcagacggtaagtacgtggtcgcgcagtttcacgagtggcaggccgggattggacttatcctgagccgcgcgcggaaacttccaatcgcaaccatctttactactcatgcgacccttttgggccggtatttgtgtgcagctaatatcgatttctacaatcacttggacaagtttaacattgataaggaagctggagagcggcagatttatcatcggtactgtatggaaagggcatcagtgcactgtgcacatgtgtttaccaccgtgtcagaaatcaccgccattgaagccgagcatatgttgaaacgaaagccagatgtcgtgaccccaaatggtctgaacgtcaagaaattctccgcagtgcatgaattccagaacttgcatgccatgtacaaggcacggatccaggatttcgtcaggggccatttctacggtcacctggattttgacctggaaaagactctcttccttttcattgccgggagatacgaattttcaaacaaaggagccgatatcttccttgaatcgctttcccgactgaattttctgctcagaatgcataagtcagatattaccgtgatggtctttttcatcatgcccgctaaaaccaacaactttaatgtggaaacgcttaagggacaggcagtccgtaaacagctttgggacgtggcacactccgtcaaggagaaatttggcaagaagctctacgatgctctgttgcgcggagagatccctgaccttaacgatatccttgatcgagatgatctgactataatgaaacgtgccatcttttcgactcaaagacaaagcctgcctccagtgaccacccataacatgatcgacgactccactgatccaatcctgtccaccattaggagaattggattgtttaacaatagaactgaccgagttaaggtgatcctgcatcccgaattcctctcatccacttcgcctctccttcccatggattacgaagagtttgtgagaggctgccatctcggggtgttcccctcctattatgaaccttggggctacactcctgcagaatgcacggtcatggggataccttcggtgacgaccaacctgagcggtttcggatgctttatgcaagagcatgtggctgatccgactgcatacggaatttacatcgtggatcggagattcaggtccccggacgattcgtgcaaccaactgacgaagtttctgtacggcttctgtaaacaatccagacgacaacgaattatccagagaaaccggactgaacgtctttcggatctgctggattggcggtaccttggccggtactaccagcacgcaaggcacctgaccctgagccgggcattcccagataagttccatgtggaacttacctcgccaccgaccaccgaaggtttcaaataccctagaccctcctccgtccccccatcgcccagcggtagtcaggcatcctccccgcaaagctcggatgtggaggatgaagtcgaggacgaaaggtacgatgaagaagaagaagcagagcgagacagactgaacattaagagcccattctcactgagccacgtgccgcatggaaagaagaagctgcatggagaatacaagaac

SEQ ID NO: 210434 - DNA, 2109 bp, Artificial Sequence
  derived and/or modified sequence
atgttacgaggccgatccttgtccgtgacttctctgggcggcttgcctcagtgggaagttgaagagctgccggtcgaggagctcctgctgtttgaggtcgcctgggaggtcaccaataaggtaggaggcatatacacagtgatacagaccaaggcaaagacgaccgctgacgagtggggcgaaaactactttttgatcggtccctacttcgaacacaatatgaagacgcaggtggagcagtgcgaaccagttaacgatgccgttcgccgggcggtagatgctatgaataagcatggatgccaagttcactttggtcgatggctcatagagggtagtccctacgtggtgctatttgacatcggctatagcgcgtggaacctggaccgttggaagggtgacctgtgggaggcttgctctgtcggtattccgtaccatgaccgcgaggccaatgacatgctaatttttggttctcttaccgcgtggtttcttaaggaagttaccgaccacgcagacgggaagtacgtggtcgcccagtttcacgagtggcaggcgggtatcgggctgatcctgtcccgagcccggaagctgccgatcgcaactatttttactacccacgccaccctcctcggccggtacctgtgtgctgctaacatcgatttttacaatcatctggacaagtttaacatcgacaaggaagccggggagcgtcagatctatcaccgctactgcatggagagagcctccgtgcattgcgcacacgtgttcaccacggtgtccgagatcacggcgattgaagctgaacacatgttgaaacgtaagcccgatgtcgtgacccccaacggcctgaacgtcaagaaattttctgcggtccatgagttccaaaatctccacgcgatgtataaggcaagaatccaggactttgtacgaggtcatttttatggccacctcgacttcgatttggagaagacgttatttctgttcatagctggcaggtacgagttctcgaacaaaggagccgatatttttttggagtcgttgtcccgtctgaacttcctgttgcgaatgcacaagtcggacattacggtcatggtgtttttcattatgccggcaaagacgaacaattttaacgtggaaacgctgaagggacaggctgtgcgcaaacagctgtgggacgtcgcccattccgtcaaagagaaattcggtaagaaattgtacgacgccctgctgcgcggagagatcccggaccttaacgacatcttggatcgtgacgatctgacaatcatgaaaagagccatattcagtacgcagcggcaaagcctgccacccgtgactactcataatatgatcgatgatagcaccgaccccattctgtcaacaatacgcagaatcggattattcaataaccggacagaccgcgtgaaggtcatcttacatcccgagtttttgtcctcaacaagtcccctgctgccaatggactacgaggagttcgttcgcggttgtcacctgggagtcttcccctcctattacgagccctggggctacactcccgcagagtgcacggttatgggcataccgtctgttacaactaacctctcggggttcggctgctttatgcaagagcacgtcgcagaccccactgcctacggaatctacatagtcgaccgtcgcttccgctctccagatgactcctgcaatcaactgacgaagttcctgtatggcttctgcaagcagtcacgccgacagcgcataatccaacgcaaccgcactgagcgcctgtctgacctactggactggcggtatttgggccgttactatcagcacgctcgccatttgactctgtctcgtgccttcccagacaaattccacgtcgaattgaccagcccgcctaccaccgagggattcaagtatccacgcccgtcgtcagtgccaccgagcccgagtggatcgcaggcctcctctccgcagagcagcgacgtggaagatgaggtcgaagatgagcgttacgacgaggaagaagaggcggagcgcgatagactaaatataaagagtccgttcagccttagtcatgtgccgcatggaaagaaaaagctacacggagaatataagaat

SEQ ID NO: 210435 - DNA, 2109 bp, Artificial Sequence
  derived and/or modified sequence
atgctccgcggaaggagcctgtctgttacatctctgggcggtctcccacagtgggaggtggaggagctgcccgtggaggaattgctcctttttgaggtagcctgggaggtgactaacaaggtgggtggaatatatacagtcatccaaaccaaagctaaaactaccgcagacgaatggggtgagaattattttctcattggtccctattttgaacataatatgaagacccaggttgagcaatgcgagccagtcaacgacgccgttcgccgcgctgtggacgctatgaataaacacggatgtcaagtgcactttggcaggtggctgatcgaaggctcaccctacgtagtcctgttcgacataggatactctgcttggaacctggatagatggaagggcgacctgtgggaagcgtgcagcgtgggtatcccctaccacgatagggaagctaacgatatgcttattttcggctccttgaccgcctggttcctcaaggaggttacagaccacgccgatggcaagtacgtcgttgctcagtttcacgagtggcaggccggtatcggtctgatacttagtagggcaaggaagctccctatcgccaccatcttcacaacccatgccacgctgctgggtagatacctttgcgccgccaatattgatttctacaaccacctcgataagtttaacattgataaagaagccggcgagaggcagatttaccacaggtactgtatggagagggccagcgtccactgtgctcacgtgtttacgaccgtgtcagaaatcaccgctatcgaggccgagcatatgcttaaaagaaaacccgacgtcgttacccccaatggactcaacgttaagaaattttctgccgtccatgagtttcagaacctgcacgcgatgtacaaggccagaatccaggactttgtcagaggacatttttacggccacctcgattttgatttggagaagaccctgttcttgttcattgccggcaggtacgagttctcaaataagggcgctgacattttcctggagtccctttctagactgaacttcctcctccgcatgcataagagcgacatcacagtcatggtcttcttcataatgcccgcaaagactaacaactttaatgtcgagactctgaagggtcaggcggtaagaaagcaattgtgggacgtagctcattccgtgaaggaaaaatttggcaagaaattgtacgacgcgctcctcaggggtgagatacccgatttgaatgacatcctggacagggacgaccttacgatcatgaagcgcgccatcttctctacacagcgccagagcctccctccggtgactacacacaacatgattgacgacagtaccgaccccattttgtctaccattcgcaggatcggactgttcaataaccgcaccgatagggtcaaggtgatcctgcaccccgagttcctgtcctctacaagtccgttgctgcccatggactacgaggagtttgtaagaggttgccacctgggagtcttcccctcctactacgagccgtggggatacactcctgctgagtgcaccgtgatgggaatccctagcgtgacaactaacttgagtggatttggatgcttcatgcaagaacatgtggctgaccctactgcctacggcatctacatcgtcgacagaaggttcaggtcacctgatgactcctgtaaccaactcacaaagtttctgtacggtttctgtaaacagtcccgcaggcagaggatcattcaaaggaacaggaccgagagactctccgacctgctcgactggaggtatctcggaaggtattaccagcacgcgcgccatctcactctttcaagggccttccccgataaatttcacgtggaactgacatctccacctacgactgagggattcaagtacccgcgcccttcctccgttccgcccagtccctctggctctcaggctagcagtccccagagctccgatgtcgaagatgaagtcgaagatgagaggtacgacgaggaggaagaagccgaaagggaccgcctcaatattaagtcaccgttttcactgtcccacgtgccccatggaaagaagaaattgcacggagagtacaaaaat

SEQ ID NO: 210436 - DNA, 2109 bp, Artificial Sequence
  derived and/or modified sequence
atgcttcgggggagatccctttccgtgacgtccctggggggacttccacagtgggaggttgaggaattgcccgtggaggagctcttactgttcgaggtggcttgggaagtcaccaacaaagtaggcggcatttacaccgtgatacagactaaagccaagaccaccgcagatgaatggggggagaattattttctgataggcccttactttgagcacaatatgaagacccaggttgaacagtgtgagccagttaacgacgcagttagaagggcagtggatgcgatgaacaaacacggctgtcaggtccatttcggtcgctggctaattgagggcagcccttacgtcgttttatttgatattggctactctgcgtggaacctagaccgttggaaaggtgacctctgggaagcttgttcagtaggaatcccctatcatgacagggaagccaatgacatgctaatctttggctcactgacagcttggtttctgaaggaggtcacggatcacgcagatggcaaatatgtggtggctcagttccacgagtggcaagcaggaatcggactcattttgtctcgcgcacgcaaacttcctatcgcaacgatctttacaacacacgctaccttgctcggtcgctacctgtgtgccgctaatattgacttctacaaccatctcgacaaattcaacattgacaaagaagcaggtgagcggcagatctaccaccgatactgtatggagcgcgcatccgtgcactgtgcgcacgtctttacaacagttagcgagattactgccatagaggcggaacatatgctgaagcgcaaacccgatgtcgttacaccaaacgggttgaacgtcaagaaattcagtgccgtacatgagttccagaatctgcatgctatgtacaaagcccgaattcaagacttcgtgagaggtcacttctacgggcatctggacttcgacctcgagaaaactttgttcctgttcatcgcaggaaggtatgagtttagcaataaaggagcggacattttcctggaatccctgagccggctcaattttctgctccgcatgcataagtccgatattactgtgatggtttttttcataatgccagctaagacaaacaatttcaatgtggagactcttaaaggacaggccgtacggaagcagctttgggacgtcgcccacagtgtgaaagagaagttcggtaagaagctttatgatgctctcctgaggggtgagattcctgatttgaacgacatcctagaccgtgatgatctgacaattatgaagcgtgcaatattttccactcaacgccaaagtctgcccccagtgactactcataatatgatcgatgacagtactgaccccatcctgagcaccataagacggattggcctgtttaacaaccggactgaccgcgtgaaagttatactgcatcccgaattcttgtcatcaacaagccccctgttgcctatggactacgaagagtttgtgcgggggtgccatctgggagtgtttccttcctattatgagccgtggggctacacaccagcagagtgcactgtgatgggaattcctagcgtcaccacaaaccttagtggattcgggtgcttcatgcaggagcacgtagccgatccgaccgcatatggtatctatatagtggacaggcggttccgctctccggatgacagttgtaaccagctgacaaagtttctgtatggtttttgcaagcaaagtcgaaggcagcgcatcatccagcgcaatcgcacagagaggttgagcgacttactggattggcgatacttgggtcgttactatcagcacgcaagacatctaactctatccagagcctttcccgacaaattccatgtggaacttacctcccccccaaccactgagggattcaagtacccacgccctagctcagttcccccctcaccatccggctcccaggcatcttcacctcagtcatccgacgtggaagacgaggtagaagacgaaaggtacgacgaagaagaagaggccgaacgggataggttgaatataaagtccccattttcgctgagtcacgtgccccacggcaaaaagaaactccacggagagtataaaaat

SEQ ID NO: 210437 - DNA, 2109 bp, Artificial Sequence
  derived and/or modified sequence
atgttacggggacgctcactaagtgtcacctccctgggcggattgccccaatgggaagtggaggaactcccggtggaggagcttctcctgtttgaggtggcatgggaagtgacaaacaaggtaggcggtatatatacagtgatacaaacaaaggctaaaaccaccgcagacgagtggggtgagaattattttctcatcggcccttacttcgaacataatatgaagacacaggtcgagcagtgcgaacctgttaacgatgcagtcaggcgggccgtcgacgccatgaataaacacggttgccaggtgcatttcgggaggtggctgatcgaggggtcaccctacgtcgtcctatttgacatcggttatagcgcatggaacctagaccgctggaagggagacctgtgggaagcctgttccgtcggcatcccctatcacgatcgagaggctaatgacatgctgatttttgggtccctgacagcctggtttcttaaggaggtgacagaccatgccgacggaaagtacgtggtggcacaatttcacgagtggcaggctgggataggactcattctaagccgcgcgagaaagctcccaattgccaccatattcactacccatgccactctgctcggtcgctacctctgcgccgctaacatagacttctataatcaccttgataaattcaacattgataaggaagctggggaacgccagatctaccataggtactgcatggagagagcttccgtgcattgcgcgcacgtcttcactaccgttagcgaaatcacggcaatagaggccgagcacatgctgaagcgaaagcctgacgttgtgacacccaatggactgaacgtgaagaaatttagcgctgttcatgaattccagaacctccacgctatgtataaagcgcgaatccaggacttcgtgcgaggtcatttctacggacacctggatttcgatctggaaaaaacactgtttctgtttatcgcggggaggtacgaattctcgaacaagggcgctgacatcttccttgagagtttgtctaggttgaactttctgcttaggatgcataaatcagacatcaccgtcatggtattcttcattatgcccgccaagacgaacaactttaacgtggagaccctgaagggtcaggctgtgcggaagcagctgtgggatgtagcccactcagtcaaggaaaagtttgggaaaaagctgtacgacgcgctcctacgaggcgaaatccccgacctgaacgacattctggaccgcgacgatctaaccattatgaaacgtgccattttttccactcagagacagtccttgcctccggtcaccactcataacatgattgatgattccacagaccccatcctgagtaccatccggcgcatcggccttttcaacaataggactgaccgggtgaaggttattcttcacccagaattcctgagttccacaagccctctgttgccaatggattacgaagagttcgttcgaggatgccacttgggtgttttccctagttactatgagccttggggctacacacctgccgagtgcacggtgatgggaattccatccgttaccacaaatctcagcggctttgggtgcttcatgcaggaacatgtggcagaccccacagcctacgggatttacattgtcgaccggcgcttccggagccctgatgactcatgcaatcagctgacgaagttcctgtacggattctgcaagcaatcacgaaggcagcggattatccagagaaacaggactgagagacttagtgacctactcgattggcgctatctcgggagatactaccagcacgccaggcaccttacgcttagtcgcgcctttcccgacaagttccacgtcgaactgacctctccccctacaactgagggcttcaagtacccgcgcccatcatccgtgcccccgtctccgtccggcagtcaagcctcgtctccacaatctagtgatgtggaggacgaggtggaggatgaacgctatgatgaggaggaggaagcggagcgggacaggttgaatatcaagagccccttctcgctgtcgcatgttcctcatggaaaaaagaagctgcacggagagtacaagaat

SEQ ID NO: 210438 - DNA, 2109 bp, Artificial Sequence
  derived and/or modified sequence
atgttaaggggtagatccctgtctgttactagtttaggagggttgccccagtgggaggtagaggaactacctgtggaagaactgctattatttgaggttgcatgggaggtgacaaacaaggtaggcggcatatacacagttattcagactaaggctaagaccaccgcagatgaatggggagaaaactacttcttgataggcccatatttcgaacacaatatgaaaactcaggtggagcagtgcgagcctgtcaatgatgcagtgagaagggccgtggacgctatgaataagcacgggtgccaggtccactttggcagatggctgattgaaggaagcccttatgtggttctgttcgatatcgggtatagtgcctggaacctggaccgctggaagggggacttgtgggaagcatgctccgtgggaataccctaccatgatcgcgaggctaatgacatgctgatttttgggtcactgacagcctggtttctgaaagaagttaccgatcatgctgacggcaaatatgtggtggcccagttccatgagtggcaggccgggattggattaatcctgagccgggctagaaaattgcccattgcaacaatctttacaacacatgctacactactcgggcgctatctctgtgcagccaacatagatttttacaatcatctggataaatttaacattgacaaagaagccggagaacgtcagatctaccaccggtactgtatggagagagcctctgtccattgcgctcacgtttttaccaccgtcagcgagattactgccatcgaagcagagcatatgctaaaaaggaaaccagacgttgtcacccccaacgggctcaatgttaaaaagttctcagctgtgcacgagttccagaatctgcatgctatgtacaaagctcgcatccaggactttgtcaggggccacttctatgggcacttagacttcgatctggaaaagaccttatttctgttcatcgctggcagatacgaatttagcaacaaaggagccgatatcttcctggagtctctgtcccggctaaatttcctgctacgaatgcataaatcagatatcaccgtaatggtgttcttcatcatgcccgccaagacaaataacttcaatgttgagaccctgaagggccaagctgtcaggaagcagctgtgggacgttgctcatagcgtgaaagaaaagtttggcaagaagctgtatgatgctctgctgcggggcgaaattccagatctgaatgacatcctggacagagacgacctaacaataatgaaaagagctattttctccacccagcgccagtcccttccacccgtcacaacacacaacatgattgatgacagcactgaccccatactttctaccatcagaagaattggcctgtttaacaataggacagacagagtgaaggtcatcctgcatccggaattcctttcctccacctcccccttactgccaatggattatgaggaattcgtgcgaggctgccatttaggggtttttcccagttattatgagccctgggggtacaccccagccgaatgtaccgttatgggcattcctagtgttactaccaacctgtccggctttggctgcttcatgcaagagcacgtggctgatccaacagcctatggcatttacattgtggaccggcgattccggtcacctgatgacagctgtaatcagctgacaaaattcttgtatggattttgtaagcagtcccgcaggcagcgcatcatacagcgcaatcggactgagagactgtccgacctgttagattggcgctatctcggcaggtattaccagcacgctagacacctgacacttagcagagcctttcctgataagtttcatgtggaactgacctcccctcccacaaccgaggggttcaaatatcctagaccatctagcgtgcctccatctccatctgggtctcaggcctcctctccccagagtagtgacgtggaagatgaggttgaagacgaacgctacgatgaggaggaggaggctgagcgggacaggctgaatatcaagtctcccttcagcttgagtcacgtgcctcatggaaaaaaaaagctgcatggcgaatacaaaaat

SEQ ID NO: 210439 - DNA, 2109 bp, Artificial Sequence
  derived and/or modified sequence
atgcttagagggcgaagcctgagcgtgacgtcgctcgggggacttccgcagtgggaggtcgaagagcttccagtggaggaactgctccttttcgaggtggcttgggaagtgactaacaaggtgggcggaatttacaccgtcatacaaactaaagcaaaaacgaccgcagatgaatggggagaaaactactttcttattgggccatacttcgaacacaacatgaaaacgcaggtcgaacaatgtgagcccgtgaatgatgcggtgcgaagagcagtggatgcaatgaacaagcatggatgtcaagtgcatttcggtcggtggctgattgaaggctcaccatacgtcgtgctttttgatataggatatagcgcctggaatctcgatagatggaagggagatctttgggaagcatgttcggtgggtatcccttaccatgaccgggaggcaaacgatatgctgatatttggatcccttaccgcgtggttcctgaaggaggtgaccgatcatgcagacggtaaatacgtggtcgcgcagttccatgaatggcaggccggtattgggcttatccttagcagagcacggaaacttcctattgcaactatcttcactacccacgcaaccctgctcggtaggtacctctgcgcagccaacattgatttctataaccatctggacaaattcaacatcgataaagaagctggagaacgccagatttaccatcgctactgcatggagcgggcctccgtgcattgtgcccatgtctttactaccgtttcggaaataaccgcgatagaggcagaacacatgctgaagcggaagcctgacgtcgttacccccaacggtctgaacgtgaagaagttttccgccgttcacgaattccagaacctccacgcaatgtataaggcacgaattcaggatttcgtgcgaggccacttttacggccatcttgactttgaccttgaaaaaaccctttttctgtttatcgccgggcgctacgaattcagcaacaagggagcggacatttttcttgagtcattgagcagactgaacttccttctcagaatgcataagtcggatattacggtgatggtgttctttatcatgccagcaaagactaacaactttaacgtggagactctgaagggccaggcagttaggaagcagctttgggatgtggcacacagcgtgaaggaaaagtttgggaagaagctgtacgatgccctcctgagaggagaaatccccgatctcaatgatatactcgatcgcgatgacctcaccattatgaagagggcaatcttttcgacccaacgtcagagccttccacctgtcaccacccataacatgattgatgattcgaccgatcctattctttcaactattcgcagaattggtcttttcaacaataggaccgatagagtcaaggtgattctgcaccccgaattcctgtcatcgacgagccctctgcttccaatggactacgaagagttcgttcgtggctgccatcttggagtgtttccttcctactacgaaccttggggttatactcccgccgaatgtaccgtcatgggaattccaagcgttaccactaacctctccggttttggatgctttatgcaagaacatgtcgcagatccgactgcatacggaatttacattgtcgatcgcagatttcgctcgcccgatgattcgtgtaaccaacttaccaaattcttgtacgggttttgtaagcagtcacggcggcaacgtatcatccaacgtaatcgaaccgagcggctgagcgatctcctggattggcgttacttgggaagatactaccagcacgcacgacatctcactctgtcccgcgcatttccagacaaatttcacgtcgaactcacttcgcctccaactaccgaagggtttaagtaccctcgcccctcatcggtccctccttctccttccggatcccaggcatcgtcaccacaatcctccgatgtggaggacgaggtcgaggatgagaggtacgacgaagaagaagaagccgagagagatcgtcttaacattaagtcgccattctcgctttcgcacgtgccgcacggaaagaaaaaactccacggcgaatacaaaaat

SEQ ID NO: 210440 - DNA, 2109 bp, Artificial Sequence
  derived and/or modified sequence
atgctgagagggcggtcgctgtccgtcacttccctcggcggcctgccgcaatgggaagtagaggagctgcccgtggaagagcttttgctgtttgaagtggcatgggaagtcaccaataaggtgggtggaatctatactgtcatacagactaaggcaaagaccaccgcagatgagtggggcgaaaactatttccttatcggtccctactttgagcacaacatgaaaacgcaagtcgaacagtgtgaaccggtgaatgatgccgttcggagggcagtcgatgccatgaacaagcacggatgccaggtccattttggtaggtggcttatcgagggatcgccttacgtggtgctgtttgatattggctacagcgcctggaatctcgacagatggaagggagatctgtgggaagcgtgctctgtcggcataccataccatgatcgtgaggccaacgacatgctgatcttcgggtccctgactgcatggttcctgaaggaagtcaccgaccatgcagatggaaaatacgtcgtggcccagtttcatgaatggcaagccggaatcggactgattctttcacgcgcgcggaagctccctatcgcaaccatctttaccacgcatgcaactctgttgggtcgctacttgtgcgcagcgaacattgatttctacaatcatctcgacaagtttaacattgacaaagaagcaggcgaacgccaaatctatcataggtattgtatggaacgcgcttcagtgcactgtgcccatgtgttcaccacggtgtcggaaattaccgcaattgaagccgaacatatgctgaaaagaaaaccagatgtcgtgactcctaacggactgaacgtcaaaaagtttagcgcagtgcatgaattccagaatcttcacgcaatgtataaagcacggatccaagacttcgtcaggggacacttttacggacatcttgattttgaccttgaaaagacgctgtttcttttcattgcaggaagatacgagttcagcaataaaggggcggacattttccttgaatccctgagccggctgaattttctgcttagaatgcacaagtccgatatcaccgtgatggtgtttttcataatgcccgcaaagactaataacttcaatgtggaaaccctgaagggtcaggcagttcggaaacagctttgggatgtggctcattccgtgaaggagaagttcggtaaaaagctgtacgatgcactcctgcggggagagattcctgatcttaacgacatccttgatagagacgatttgaccatcatgaaaagagccattttctcgacccaaagacaatccctcccgcctgtgaccactcacaatatgatcgatgattcgactgaccctatcctgtcgacgatccgcaggattggccttttcaataacagaactgatagagtcaaggtcatactgcatccagaatttctctcctcgacctcgcctttgctgccgatggactacgaggaatttgtgcgagggtgccatctcggagtgtttcctagttactacgagccctggggatatacccctgcagaatgtactgttatggggattccatcggtgaccactaatctctcaggatttggatgttttatgcaagagcatgtggccgatcccaccgcatacggcatttacattgtcgatagaaggttcaggtccccggatgattcatgtaaccaactgactaagtttctttatggcttctgtaagcaatcaagaaggcagcgcataattcaacggaatagaaccgaacggctttcggacttgcttgattggagataccttggacggtactaccaacacgcacgccatcttacgctttcccgcgcatttccggacaagtttcatgtggagctgacttcacctccaactaccgagggatttaagtaccctcggccttcatcggtccctccatccccctcgggctcgcaggcctcatccccccagtcctcagacgtggaagatgaagtggaggacgagcgatacgacgaggaagaagaggcagaaagggatagacttaacataaagagccctttctcgctttcgcatgtcccacatggaaaaaagaaactgcatggcgaatacaagaat

SEQ ID NO: 210441 - DNA, 2109 bp, Artificial Sequence
  derived and/or modified sequence
atgctccgcggccggagcctttcggtgacttcgttgggtggactgccccagtgggaggtcgaggaactgcctgtggaagaactgttgctgttcgaggtggcttgggaggtgactaacaaggttggaggaatctacactgtgatccagaccaaagcgaagaccaccgcagacgagtggggcgaaaactacttcctgattggcccgtatttcgagcataacatgaaaacccaggtggaacaatgcgaacccgtcaacgatgcggtgagacgcgcagtcgacgcgatgaataagcacggatgtcaagtgcattttggacgctggctgatcgagggatcaccttacgtggtgctcttcgacatcggctactccgcgtggaacctcgaccggtggaagggcgacctgtgggaagcctgctcagtgggcattccttaccatgatagagaggctaacgacatgctgatcttcggctcgcttacggcctggtttcttaaagaagtgaccgatcacgccgatggcaagtacgtcgtcgcccagttccacgaatggcaagccggaatcggacttatcttgtcgcgggctcgcaaactgccaatcgcaacgatatttaccacccatgccactctccttggtcgctacctctgcgcggcgaacatcgatttttacaaccatctcgataaattcaatatcgacaaagaggcgggcgagcggcagatctaccatcgctactgcatggagagagcatcggtccactgcgcccacgtcttcacgactgtgagcgaaattacggctatcgaggcagaacacatgctgaagaggaagcccgacgtggtgacccctaacggactgaatgtgaaaaagttctcggcggtgcacgaatttcagaatctgcatgcaatgtacaaggccagaatccaagatttcgtcagagggcatttttacggacacctcgacttcgacctggagaaaaccctcttcctcttcatcgcaggtcgctatgagttttctaacaagggagcggatatcttccttgaaagcctgagccgattgaacttcctgctgaggatgcataaaagcgatatcactgtgatggtgttcttcatcatgccagctaaaactaataactttaatgtggaaaccctgaaaggacaagccgtgcggaagcagctgtgggatgtggcacactctgttaaagaaaaattcggtaagaaactgtatgacgcactccttcggggagagattccagacctgaacgacatcttggaccgggacgacctgaccatcatgaagcgcgcaattttcagcacccagcggcagtcgctgccgccggtgacgacccacaacatgatagacgactcaaccgatcctatcctgtcgaccattcggaggatcggactgtttaacaatagaactgacagggtgaaggtcatcctccatccagaattcttgagcagcacttcgccgctcctgccaatggactacgaggaatttgtccgcggctgccatctcggggtgttcccgagctactacgaaccgtggggatacaccccggcagagtgcacggtgatggggatcccgtcagtgactactaacctttcaggattcggatgtttcatgcaggaacatgtggcggatcctactgcatatggcatctacatcgtggaccggagattccgctcaccggacgactcgtgcaaccagcttaccaagtttctgtacggtttttgcaagcagtcgcggcggcaacgtattatccagcgcaaccgaaccgaacgcttgtcggacctcctggactggcgctacctgggccgctactaccagcatgcgagacacctgactttgtcaagagcatttcccgacaaattccacgtcgaacttactagcccgcctaccacggagggatttaagtacccgcgcccttcatcggtgccgccgtccccatccgggtcacaagcctcgagcccgcaatccagcgatgtggaagatgaagtcgaagacgagcgctacgacgaagaagaagaggcggaaagagatcgactcaacatcaaatcgccgttctccctttcccacgtgccccatggcaagaagaaactgcatggtgaatacaaaaac

SEQ ID NO: 210442 - DNA, 2109 bp, Artificial Sequence
  derived and/or modified sequence
atgttgcggggacgcagcctctccgtcacaagtctgggaggacttccacaatgggaagtggaagaactgcctgtggaggaactccttctgttcgaggttgcgtgggaagtcacgaacaaggtcggcggcatctacacggttattcagaccaaggcgaagactacagcagatgaatggggcgagaattacttcctaattggcccctactttgaacacaacatgaaaacccaagtcgagcagtgtgaacccgtcaacgacgcagttcggcgggcagtggacgcaatgaacaaacatgggtgtcaggttcatttcgggaggtggctgatcgaggggtcaccatatgtggtgctttttgatataggctacagcgcctggaatcttgatcgatggaagggagatttgtgggaagcctgctccgtaggtattccctatcatgatcgcgaagccaacgacatgctcatttttggttctctgaccgcctggttcctcaaggaagtcacagaccacgctgacgggaagtatgtggtcgctcagttccatgagtggcaggccggcatagggctcatactgtcacgcgctagaaaactgcccatcgccacgatatttactactcacgcgactctcctaggacggtacctttgtgctgctaatatcgacttctataatcatctagacaagttcaacatagataaagaagccggagagcgacaaatctatcatcggtactgcatggaacgagccagcgtgcactgtgcgcatgtgttcaccactgtgtcagagattacggccatagaggcagagcatatgctaaagaggaaaccagacgtggtaaccccaaacggactaaatgtcaagaagttctccgctgtacacgaatttcagaatctgcacgctatgtataaggcgaggatccaagactttgtccgggggcacttctacggccacctagatttcgacctcgagaagaccctcttcctgttcatcgctggcaggtacgaattcagcaataagggtgcggatatctttctggagagtcttagtcgcttaaacttcctcctccgcatgcacaagtccgacattacagtgatggtgttctttatcatgcctgccaagactaacaacttcaacgtcgaaaccctgaagggccaggcagtgcgaaaacagctttgggacgtagcgcacagcgtgaaagagaaattcggcaagaagctgtacgacgccctgctgcgaggggaaataccggatttgaacgacatcctggatcgggacgacctgacgattatgaagcgcgcaatcttcagcacgcagcgtcagtcgctaccacccgtcaccacccacaacatgatagacgacagcaccgaccctatcctgagcaccattcggagaattggactatttaacaacagaaccgatcgggttaaagtgatcctgcatcccgagttcctttcctctacgagcccactgttacccatggactacgaagaatttgtgcgggggtgccacttaggcgtgttcccgtcctattacgagccttgggggtatacgcccgccgaatgcaccgtgatggggataccttcggtgaccaccaacctttcgggttttgggtgcttcatgcaggagcatgttgctgatcctactgcctacggaatatatatcgtggaccggaggttccgctcaccagacgatagttgcaatcagctcaccaaatttttatacggattttgtaagcagtcccgaaggcagagaatcatacagcgtaaccgaaccgaacgcctatctgacctcctggattggcggtacctggggagatactatcagcacgctagacatcttactctttctagggccttcccagacaaattccacgtcgaattaaccagtcccccaactaccgagggcttcaagtatcctaggccgagctctgtgcccccaagcccttctggctcccaggcctccagtcctcagtcttctgacgtcgaagatgaggtggaggatgagaggtatgatgaggaagaagaggccgagagagatcgcctgaatattaagagccctttctccctcagccatgtgccccatggtaagaagaagctccacggtgaatacaagaat

SEQ ID NO: 210443 - DNA, 2109 bp, Artificial Sequence
  derived and/or modified sequence
atgttacgtggtcgttcgctatcggtaacgtcgttaggtggtttaccgcaatgggaagtagaagaactaccggttgaagaattattattatttgaagtagcgtgggaagtaacgaataaagttggtggtatatatacggttatacaaacgaaagcgaaaacgacggcggatgaatggggtgaaaattattttctaataggtccgtattttgaacataatatgaaaacgcaagttgaacaatgtgaaccggtaaatgatgcggtacgtcgagcggtagatgcgatgaataaacatggttgtcaagttcattttggtcgttggttaatagaaggttcgccgtatgttgtattatttgatataggttattcggcgtggaatctagatcgttggaaaggtgatttatgggaagcgtgttcggtaggtataccgtatcatgatcgtgaagcgaatgatatgttaatatttggttcgctaacggcgtggtttttaaaagaagtaacggatcatgcggatggtaaatatgtagttgcgcaatttcatgaatggcaagcgggtataggtctaatactatcgcgagcgcgaaaactaccgatagcgacgatatttacgacgcatgcgacgctactaggtcgatatttatgtgcggcgaatatagatttttataatcatttagataaatttaatatagataaagaagcgggtgaacgtcaaatatatcatcgttattgtatggaacgtgcgtcggtacattgtgcgcatgtttttacgacggtttcggaaataacggcgatagaagcggaacatatgctaaaacgtaaaccggatgttgtaacgccgaatggtctaaatgtaaaaaaattttcggcggtacatgaatttcaaaatttacatgcgatgtataaagcgcgaatacaagattttgtacgtggtcatttttatggtcatttagattttgatttagaaaaaacgctatttctatttatagcgggtcgttatgaattttcgaataaaggtgcggatatatttttagaatcgttatcgcgtttaaattttctattacgtatgcataaatcggatataacggtaatggttttttttataatgccggcgaaaacgaataattttaatgttgaaacgctaaaaggtcaagcggtacgtaaacaactatgggatgttgcgcattcggttaaagaaaaatttggtaaaaaattatatgatgcgctactacgtggtgaaataccggatctaaatgatatactagatcgtgatgatttaacgataatgaaacgtgcgatattttcgacgcaacgtcaatcgttaccgccggttacgacgcataatatgatagatgattcgacggatccgatactatcgacgatacgacgaataggtctatttaataatcgtacggatcgagttaaagtaatactacatccggaatttctatcgtcgacgtcgccgttattaccgatggattatgaagaatttgtacgaggttgtcatctaggtgtttttccgtcgtattatgaaccgtggggttatacgccggcggaatgtacggttatgggtataccgtcggtaacgacgaatttatcgggttttggttgttttatgcaagaacatgtagcggatccgacggcgtatggtatatatatagtagatcgtcgttttcgttcgccggatgattcgtgtaatcaactaacgaaatttttatatggtttttgtaaacaatcgcgacgacaacgtataatacaacgtaatcgaacggaacgtttatcggatctattagattggcgttatttaggtcgttattatcaacatgcgcgacatctaacgttatcgcgagcgtttccggataaatttcatgtagaattaacgtcgccgccgacgacggaaggttttaaatatccgcgtccgtcgtcggtaccgccgtcgccgtcgggttcgcaagcgtcgtcgccgcaatcgtcggatgttgaagatgaagtagaagatgaacgttatgatgaagaagaagaagcggaacgtgatcgtttaaatataaaatcgccgttttcgctatcgcatgtaccgcatggtaaaaaaaaactacatggtgaatataaaaat

SEQ ID NO: 210444 - DNA, 2109 bp, Artificial Sequence
  derived and/or modified sequence
atgctgagaggacgctccctctcagttactagcctggggggactgccacaatgggaggtggaagaactcccagtggaggagctgctgctgttcgaagtggcctgggaggtgacgaacaaagttggagggatttacaccgtgatccagactaaggccaagaccaccgccgacgagtggggcgaaaactacttccttatcggaccatactttgagcataacatgaaaacccaggtcgagcaatgcgaaccggtgaacgatgcggtgagacgcgctgtggacgccatgaacaagcacggatgccaagtgcatttcggccgttggctgatcgaaggatcgccgtacgtggtgctctttgatatcggatactctgcctggaacctggaccgctggaaaggggatctgtgggaggcttgctcggtggggatcccataccacgacagagaggccaatgatatgctgattttcggctcgcttactgcctggttcctgaaagaagtgactgaccacgcagacggcaagtacgtggtggcccaattccatgaatggcaggcgggtatcggcctcatcttgagccgcgcccgcaagctcccgatcgctaccatctttaccactcacgcgaccctgctgggaagatacctctgcgcggcgaatattgacttctacaatcatctggacaagttcaatattgacaaggaagccggagagagacagatctaccaccggtactgtatggagagagcgtccgtccactgcgcacacgtgttcactactgtgtcagaaataaccgctatcgaagccgagcacatgctgaagagaaagcctgacgtggtgactccgaacggacttaatgtgaagaagttttccgccgtgcacgaattccagaatctgcacgccatgtataaagcacgaatccaagacttcgtgcggggacatttctacggccacctggattttgaccttgagaaaactctcttcctgtttatcgccggacgctacgagttctccaacaagggggcggacattttcctggagtccctgtcgcgcctgaattttctgttgcggatgcacaaaagcgacataaccgtcatggtgttctttatcatgccggctaagactaacaatttcaacgtggaaaccctgaagggacaagcagtgcggaagcagctgtgggacgtggcccatagcgtcaaggagaagttcggaaagaaactttacgacgcactgctgcgcggagaaatcccggacctgaatgatatccttgaccgggatgacctgaccatcatgaagagggccatcttctcaactcagcggcagtcgctcccgccggtgactacgcacaatatgatcgacgactcaacggatccaattctttctaccatcagaaggatcggcctgtttaacaatcggaccgacagagttaaagtcatcctgcacccggagttcctgtcgtcgacttccccacttctgccaatggactacgaagagttcgtccgcggatgccaccttggggtttttcccagctactacgaaccgtggggttacacccctgccgagtgcacggtgatgggaatcccctctgtgactactaacctgtcgggattcggatgttttatgcaagagcacgtggccgatccgactgcgtacggcatctacattgtcgatcgcagattccgctctccggacgacagctgtaaccagctcaccaaattcttgtacggtttttgcaaacaatcgagacgccagaggatcattcagaggaaccggaccgaaaggttgtccgatttgctggactggcgctacctgggcagatactaccagcacgcgcgccacctgactttgtctcgcgcattccccgacaagttccatgtcgagctcactagcccgcctaccaccgagggcttcaagtacccacgcccgtcaagcgtgccgccttcgccatcaggttcccaggcctcgtcacctcaatcctccgacgtggaggacgaagtggaagatgaaaggtatgatgaggaagaggaagcggagcgcgatcggttgaacatcaaatcgccgtttagcctgtcccatgtgccgcacggcaagaagaagctgcacggagaatacaagaac

SEQ ID NO: 210445 - DNA, 2109 bp, Artificial Sequence
  derived and/or modified sequence
atgttgagaggtcggtctctgtcggtgacttctcttggagggttgccgcagtgggaagtggaggagctgccagtcgaagaactgctgctgtttgaagtggcctgggaggtcactaataaggttggtggcatttacacagtcatccagacgaaagccaagaccacagccgacgagtggggggagaattactttctgattgggccatactttgagcacaatatgaaaacccaggtcgaacagtgcgagccggttaacgacgcggtccgcagggcggtggacgccatgaacaagcacgggtgtcaagtgcacttcggacggtggctgatcgagggctccccctacgtggttctgtttgacattggctacagcgcctggaatctcgacagatggaagggggacctgtgggaagcctgctccgttggtatcccataccatgaccgcgaagctaatgacatgctcatctttggcagcctcacagcctggtttctgaaggaagttactgatcacgctgacggcaagtatgtggttgcacaatttcacgagtggcaggccggaattggcttgatcttgtcccgggcccgtaaacttcccatcgctacgatctttacaacccatgctactctgctcggacgctatctgtgcgctgctaatattgatttctataaccatctcgacaagtttaacatagacaaggaggccggagagagacagatctaccatcgatactgtatggaacgagcgtctgtacactgtgcacacgtcttcacaaccgtctccgagatcacagcaattgaggctgaacatatgcttaagcgcaagcctgatgttgtcacacctaacggcctcaacgtgaagaaatttagcgccgtgcacgaattccagaacttacacgctatgtacaaagcacgtatacaggatttcgtccgtggtcatttctatggacatcttgactttgacttagagaaaaccttattcctcttcatagcgggccgttatgagttcagtaataagggcgccgatatcttcctggagtctctgagtaggctgaacttcctattgagaatgcacaagagtgacataaccgtcatggtgttcttcataatgccagctaagacaaacaattttaatgtggagactctgaagggccaggctgttcgaaaacagttgtgggacgttgctcactctgtgaaggaaaaatttgggaagaaactctacgacgccctgctccggggggaaataccggatctgaacgatatactagaccgggacgatctgactatcatgaaacgggccattttcagcacgcagcgacaaagccttcctccagtaacaacacacaatatgatcgatgactccacagatcccatcctcagtacgattcggcggataggcttgttcaacaataggaccgatcgtgttaaagttatcctccacccagagtttctatcttcaaccagccccttgctgccgatggactacgaggagttcgtacgcgggtgccatctgggcgtgtttccgtcatactacgagccatgggggtacacccctgctgaatgtaccgtgatgggcatcccaagtgtgactacgaacctgtcgggttttggttgctttatgcaagaacacgttgccgaccctactgcctacggcatctatatcgtggataggagattccgttctcccgatgactcatgcaaccagctgaccaaattcctttacggcttttgcaaacagagccggcggcagcgaataattcagagaaatcgaacagagagattgtctgatctcctggattggagatatctgggcagatattaccagcacgcacgccacctgacactcagccgtgccttcccagataagtttcacgtagagcttacatcgcctcctactactgaggggttcaaatacccgaggccaagcagcgtgcccccatccccctctggaagccaggcctcatccccccagtcctccgacgtagaagatgaggtggaggatgaaagatacgatgaggaggaagaggccgagcgagacaggctgaacatcaagtcacctttctccctaagccacgtaccccatgggaaaaaaaaactgcacggggaatacaaaaat

SEQ ID NO: 210446 - DNA, 2109 bp, Artificial Sequence
  derived and/or modified sequence
atgctccgggggcgtagcctcagcgtcacgtcgctcggaggcctcccacaatgggaagtcgaggaactgccagtggaagaactgctgctcttcgaagtggcgtgggaggtgaccaacaaagtcggagggatttacaccgtgatccaaaccaaggccaaaactacggccgacgagtggggagagaactacttcttgatcggaccgtactttgaacacaatatgaaaacgcaagtcgagcagtgtgaaccggtgaacgatgcagtgcggagagccgtggacgcgatgaataagcatgggtgtcaggttcacttcggcaggtggctgatcgagggatctccgtatgtcgtgctgttcgacatcggttacagcgcgtggaatctcgaccggtggaaaggtgacctctgggaggcgtgctccgtgggaatcccttaccacgaccgcgaggcaaatgatatgctcatcttcggatcccttaccgcctggttcctcaaagaagtgacggaccatgctgacggaaaatacgtcgtggcccaattccatgaatggcaggccgggatcggcctgattctgtcaagagcgcgcaagctgccgatcgcgacgatcttcactactcacgccactttgctcggtcgatacctgtgtgccgctaatatcgatttctacaatcatctcgacaagtttaacatcgataaggaggccggagagcggcagatttaccatcggtactgcatggagcgggcgagcgtgcattgcgcccatgtgttcactaccgtgtccgagatcactgcaatcgaggcggaacacatgctcaagcgcaagccggacgttgtgactccaaacggcctgaatgtgaagaagttctccgcggtgcatgaattccagaacctgcacgcgatgtacaaggcgcggatccaagacttcgtccgcggccacttttacggacacctggacttcgatctggaaaagactctgttcctgttcatcgcgggacgatatgagttctcaaataagggcgctgacatcttcctcgagtctctctccagactgaatttcctgctgcggatgcacaagtccgacattaccgtgatggtctttttcatcatgcctgcgaaaaccaacaacttcaatgtggaaactctgaagggccaggccgtgaggaaacagctttgggacgtcgcgcattcggtaaaggaaaagttcgggaagaaattgtatgatgcgctcctccgcggagagattcccgatctgaacgatatcctcgacagagatgacctcaccatcatgaagcgcgcgatcttctcaactcaaaggcagtcactgccgccagtgactacccacaatatgatcgatgactccaccgaccctatcctgtcgactattagacggattggcctgttcaacaacagaactgaccgcgttaaggtgatcctgcatccagagtttctgtcatcaactagccctctgcttccgatggactacgaggagttcgtccggggctgtcatcttggagtgtttccgtcttactacgagccgtggggatacactccagccgaatgcactgtgatgggaatcccatcggtgactactaacctgtcgggattcggatgcttcatgcaggaacacgtggccgatccgactgcgtacgggatatacatcgtggatcggcggttccgctccccggacgactcctgcaaccagctcacgaaattcctgtacggattctgcaagcagtcgaggcgccaacgcatcatccagcggaatcgaaccgagaggctctccgacctgctggattggcggtacctgggacggtactaccagcacgcccggcacctcactctgtccagagcattcccagacaagttccacgtcgaattgaccagcccgccaactaccgaaggcttcaagtaccctcgcccatccagcgtccctccatccccctccggctcccaagcatcgagtcctcaatcaagcgatgtcgaggatgaagtcgaggatgagcgctacgatgaggaagaagaagccgagagagatcgcctcaacatcaaatcgccgttctcgctgtcccatgtgccgcatggaaagaaaaaactccatggagagtacaagaac

SEQ ID NO: 210447 - DNA, 2109 bp, Artificial Sequence
  derived and/or modified sequence
atgcttagaggccgcagcctcagcgtcaccagcctgggaggactgccacaatgggaggtggaggagctccccgtggaagagctgttgctgttcgaagttgcttgggaagtcaccaacaaggttggcggtatttacacagtgattcagaccaaagctaagaccaccgcggatgagtggggtgaaaattattttcttatcggtccctacttcgagcacaacatgaagacccaggttgaacaatgtgaacctgtcaacgatgcagtcaggagggccgtcgatgctatgaacaagcacggatgtcaggtgcattttggaaggtggcttatagaaggctctccttacgtcgttttattcgacatcggatactcagcctggaaccttgacaggtggaagggcgacctctgggaggcttgcagcgtgggcatcccataccacgatcgcgaagctaatgatatgttgattttcgggagccttacagcttggtttttaaaagaggtgacagatcatgccgatgggaaatatgtggttgcacaattccacgaatggcaggccggcatcggactgatcctgagtcgtgcacgcaaactgccgatcgccactatttttactacacatgccacgttgctgggcaggtacctgtgcgcggcaaatatcgacttttacaaccatctggacaaattcaacatagacaaagaggccggcgagagacagatctatcaccggtattgcatggagagggcctcggtgcactgtgcacatgtctttaccaccgtatctgagatcaccgcaatcgaggccgaacacatgcttaagcggaaaccagatgtcgtgacacctaacggcctgaacgtcaagaagttcagcgcggtgcatgagtttcagaacctgcatgcaatgtacaaagcaagaattcaggacttcgttagaggtcatttttatggtcatttggattttgatctggagaaaacccttttcctttttatcgcgggaaggtacgagttctccaacaagggggccgatatctttctagagagtctcagcaggctgaattttttgttgcgtatgcataaaagcgatattacggtgatggtatttttcattatgcccgctaaaaccaacaactttaacgtagaaaccctgaaggggcaagcggtgaggaaacagttgtgggacgtcgcccatagcgttaaagagaaattcgggaagaagctgtacgatgccctcctgcgaggtgagatccccgacctcaacgacatcctggacagggatgacctgacgatcatgaagagagctatcttctctacccaaaggcagagtctcccccctgtgaccactcacaatatgatcgacgatagcacagacccaatactctctaccatcaggaggatcggattgttcaataacaggaccgacagggtcaaagtgatcctccaccctgagttcctcagctcaacctcaccactgctgcctatggactatgaggaattcgtgaggggatgccacctgggggtgtttccttcttactacgagccatggggctacactcctgcagaatgcaccgtgatgggcattccaagcgtgaccacaaacctgagcggttttggttgcttcatgcaggaacacgttgccgaccccacagcttacggaatctacatcgttgataggagattcagatcacccgatgactcctgcaaccaactgaccaaattcctgtacggcttctgcaaacaatctcgccggcaacgcatcattcaaagaaatcgtactgagcgcctctcagacctcctggattggaggtacctgggcagatactaccagcatgctcgtcacctcaccctgagccgtgcatttccggacaagtttcatgttgaacttacttctcctcctaccacagaagggtttaaataccctcggccctccagtgtgcccccgtctccgagcggctcccaagccagttctcctcaaagctctgacgttgaggacgaggtagaagacgagagatatgacgaagaagaagaagcagaaagagatagacttaacatcaagtctcccttctccctgagccacgtgccacatgggaaaaaaaagctgcacggggagtacaagaac

SEQ ID NO: 210448 - DNA, 2109 bp, Artificial Sequence
  derived and/or modified sequence
atgttacgcggtcgatcactgtcagtgacttctctcggggggctgccccagtgggaggtggaggaacttccagtggaggagctattgctgttcgaagttgcatgggaggtcacaaataaagtcgggggaatttacaccgttatccagacaaaggctaaaacaactgctgatgaatggggggagaattatttcctaattggcccttacttcgaacacaatatgaaaacccaagttgaacagtgtgagccagtgaatgatgctgtgcgccgggccgtagatgccatgaataaacacgggtgccaagtgcactttgggagatggctgatagagggaagcccttatgtggtactctttgacatagggtattccgcctggaacttggacaggtggaagggggatctgtgggaggcgtgcagcgtggggatcccctatcacgatcgcgaagctaacgacatgctaatatttggcagcctaactgcctggttcttgaaggaggtgaccgatcatgctgatgggaaatatgtggtagcccaattccatgagtggcaggccgggatcgggctcattctgagccgagctagaaaattgccaatcgcgaccatattcaccacccacgctacgctgctcgggagatacctgtgcgcagccaatattgacttttacaaccatcttgacaagttcaacattgacaaagaggccggcgaacgacagatttaccacaggtattgtatggagcgggcatcagtccactgcgcccatgtgttcactacggtgtccgagataacagccattgaggctgaacatatgcttaaaagaaagccagacgtggtgacacctaacggcctgaacgttaaaaaattttccgcagtccacgaatttcaaaatctgcatgctatgtacaaggcccggattcaggattttgttagaggtcacttctacggccatctggactttgaccttgagaagaccctgttcctctttatcgccggtaggtatgaattttctaataaaggcgcggatatcttcctggaaagtttgagccggttaaattttctgctgaggatgcacaagtctgacatcacggtgatggtgttctttatcatgccagccaaaaccaacaactttaacgtcgaaacattaaagggccaggccgttaggaaacagctctgggacgtggcacattctgtcaaggagaaattcggtaaaaaactttatgacgctctgctgcgaggtgagatcccggatctcaacgacattcttgatcgggatgatctcaccatcatgaaaagagccatcttctccactcagcggcaaagtttgccacccgtaaccacacacaatatgatcgatgatagcacagatcctatcctaagcaccatccgccgcattggtctgtttaataatagaactgatagggtgaaagtgatcttgcatccagaatttttgtcgagtactagtcccttgcttcccatggattacgaggagtttgtgcggggatgccacctgggtgtcttcccaagttactacgaaccatggggttatacaccagccgaatgtacagtgatgggtataccctcagtcactaccaatttatctggcttcggatgctttatgcaggagcacgtggcggacccaaccgcctacggaatctatatcgtggatcgccgcttcaggtctccagatgacagctgcaaccagctgaccaagttcctttacgggttctgtaaacaatctcgccgccaaagaataatccaaagaaacaggaccgagagactgtctgacctactcgactggagatacctggggcgctactatcagcacgcccgacatctgactctgtcccgggctttccccgacaaattccacgtcgaactgacttcccccccaaccaccgagggctttaagtatccaaggccctcatctgtgcccccatcacccagtggctctcaggcttcatcgcctcagagtagcgatgtggaggatgaggttgaggacgagagatatgacgaagaagaggaagccgagcgcgatcggcttaatatcaaatctcccttttcccttagccacgtgccacacggcaaaaagaaactgcacggggagtacaagaac

SEQ ID NO: 210449 - DNA, 2109 bp, Artificial Sequence
  derived and/or modified sequence
atgttgcgtggaagatcattgtccgttacatcattgggtggactaccacagtgggaggtcgaagaactgccagttgaggagctactgctttttgaggttgcatgggaagtgaccaataaggtcggcggcatttataccgtcatccaaactaaggcaaagactaccgccgacgaatggggcgagaattatttcctgattggaccatacttcgaacacaatatgaaaacacaggtagagcaatgcgaacctgtgaatgatgctgtcagacgagctgtagacgccatgaacaaacatggctgtcaggttcatttcggaagatggctgattgaaggctcaccgtacgtcgtgttatttgatataggatatagcgcttggaacctggaccggtggaaaggggatttatgggaggcttgttcagtcgggatcccgtaccacgaccgggaggcaaacgacatgctgatcttcggatcactaactgcttggttcctgaaggaggttactgatcacgccgacggtaagtacgtggtcgcacagttccacgagtggcaggcaggtattgggctcattttgtctagggctaggaaactgccaatagctaccatttttactacccacgcaactctcctcggccggtatctttgcgctgcgaacatagacttctacaaccacctagataaattcaacatcgacaaggaggcgggcgaacgtcagatctaccatagatattgtatggaaagagcaagtgtgcactgtgcccatgtgtttactacagtctcggaaatcaccgccatcgaagcagaacacatgcttaagcgcaagcctgatgttgtaactcctaatggcttgaacgtaaagaaattctcagccgttcacgagtttcagaacctccacgcaatgtataaggcgaggattcaggattttgtccgagggcacttctacggccacttggactttgacctggagaagactctctttctcttcatcgccggtaggtatgaattcagcaataaaggggctgacatcttcctggagtccctctctagactgaacttcttgttgagaatgcacaagagcgacataacagtcatggtgtttttcatcatgccagccaagactaataacttcaatgttgagacactgaagggacaagccgtgcgtaagcagctctgggacgtggctcattctgtcaaggagaagtttggcaagaagttgtacgacgctctgctccgcggagagattccggatctgaatgatattctcgatcgggacgatctcaccataatgaagcgggctatctttagcacccagcggcagagcctgcctccagtaaccactcataatatgatcgatgactcgaccgatcccattctttcaaccattcgacgtattggactgttcaataatcgcacagacagggtgaaagtcatcctccaccccgagtttctgtcatcgacatctcccctgctgccaatggattacgaggagttcgtgagagggtgccacctgggagtttttccttcgtattacgaaccctggggatatacccccgctgaatgcaccgtaatgggaatcccatccgtcacaaccaacctctcaggatttggatgctttatgcaggagcacgtggctgaccccacggcttacggcatatatatcgtcgaccggcggtttagatcacccgacgactcatgtaaccaactgactaaattcctgtacggcttctgcaagcagagtaggcgtcagcggattattcaaagaaaccggacggagcggctttccgatctgctcgactggcgctacttaggacggtactatcagcatgcgaggcatttgacactgagtagagccttccccgacaaatttcacgtcgaattgacgagtccgccaacaactgagggattcaagtaccctcgccccagcagcgtgcccccctcaccgagcggtagccaggcctccagcccacagtcttcggacgtggaggatgaagtggaagatgaaaggtatgatgaagaggaagaggctgagagagataggttgaacataaagagtcccttcagcctgtcacacgtgccccacgggaagaagaaactccatggtgagtacaagaat

SEQ ID NO: 210450 - DNA, 2109 bp, Artificial Sequence
  derived and/or modified sequence
atgcttagaggtcgatcactctcagtcacctcacttggcggactccctcagtgggaagttgaagagctgcccgtcgaagagcttttgctctttgaagtcgcctgggaggtcactaataaggtcggcgggatttacaccgtgattcagaccaaggcgaaaactactgcagacgagtggggagagaattacttcctgattggcccatactttgagcacaacatgaaaacccaggtggaacaatgcgaaccggtcaacgatgcagtccggcgcgctgtggacgcgatgaataagcacgggtgtcaagtgcacttcggaaggtggctgattgagggctcaccttacgtggtgctttttgacattgggtactcggcatggaacctggatagatggaagggagatctttgggaagcctgttccgtgggaattccttatcacgaccgggaagcaaacgacatgctgattttcggatccctcaccgcctggttcctgaaagaggtcacggatcatgccgatggaaagtacgtggtggcccagtttcatgaatggcaggccgggataggacttatcctgtcccgggcaagaaaacttcctattgcgaccattttcaccacccacgcaactctgctcggccggtacctgtgtgcagcaaacattgacttttacaatcacctggataagtttaacatcgacaaggaggcaggtgagcgtcaaatctaccatagatactgcatggaacgcgcatcagtgcattgtgcacacgtgtttacgactgtgtcggaaattaccgcgattgaagccgagcatatgctgaagcgcaagccagatgtcgtgaccccgaatggtcttaatgtgaaaaagttctcggcagtccatgaattccaaaaccttcatgcaatgtacaaggcaagaatccaagactttgtgcgcggacacttttatggacatctggattttgatctcgaaaagaccctgtttctgtttattgccggtagatacgaattttcaaacaaaggtgcggacatttttctggaaagcctgtcacgtctgaactttctgctgagaatgcacaagagcgatattacggtcatggtgttctttatcatgcctgccaagaccaacaactttaatgtggaaaccctgaagggacaagctgtccggaagcaactgtgggatgtggcacattcggtgaaggaaaagtttggtaagaagctgtacgatgcacttctcaggggagaaattcctgatctgaacgacattctcgatagagacgacctcactattatgaaaagagctattttctcaacgcaacggcagtccctgcctcccgtgactactcataacatgattgatgactccaccgatcctattttgtccactattcgtagaatcggccttttcaataaccggaccgacagagtcaaagtgatccttcatccggaattcctgtcctcgacctcgccccttctcccaatggactacgaagagttcgtgaggggttgtcacctgggcgtgttccctagctactacgaaccatggggttacactcctgccgaatgcacggtgatgggcataccttcagtcaccactaatctgtcgggattcggttgttttatgcaggaacacgtcgcagatccaactgcgtacggtatatacatcgtggacagacggtttcgatcccctgatgattcgtgcaatcaactgaccaagttcctttacggattctgcaaacagtcaagacggcagcgcatcatccagagaaaccgtaccgaacgactcagcgacctgctcgactggcggtacctgggaagatactaccagcacgcacggcacctcactctgtcaagggcatttccagataagtttcacgtggaattgacctcgccaccaactaccgaagggtttaagtacccacgtccgagctcagtgcctccttccccctcgggaagccaggcctcgtctccgcaatcctccgacgtcgaagatgaggtggaagatgaaaggtacgatgaagaagaagaagcagaacgtgaccgcttgaacattaagtcgcctttctcgctttcgcatgtcccacacggtaagaagaagttgcatggcgaatacaagaat

SEQ ID NO: 210451 - DNA, 2112 bp, Artificial Sequence
  derived and/or modified sequence
atgctgagaggcagaagcctgagcgtgaccagcctgggcggcctgccccagtgggaggtggaggagctgcccgtggaggagctgctgctgttcgaggtggcctgggaggtgaccaacaaggtgggcggcatctacaccgtgatccagaccaaggccaagaccaccgccgacgagtggggcgagaactacttcctgatcggcccctacttcgagcacaacatgaagacccaggtggagcagtgcgagcccgtgaacgacgccgtgagaagagccgtggacgccatgaacaagcacggctgccaggtgcacttcggcagatggctgatcgagggcagcccctacgtggtgctgttcgacatcggctacagcgcctggaacctggacagatggaagggcgacctgtgggaggcctgcagcgtgggcatcccctaccacgacagagaggccaacgacatgctgatcttcggcagcctgaccgcctggttcctgaaggaggtgaccgaccacgccgacggcaagtacgtggtggcccagttccacgagtggcaggccggcatcggcctgatcctgagcagagccagaaagctgcccatcgccaccatcttcaccacccacgccaccctgctgggcagatacctgtgcgccgccaacatcgacttctacaaccacctggacaagttcaacatcgacaaggaggccggcgagagacagatctaccacagatactgcatggagagagccagcgtgcactgcgcccacgtgttcaccaccgtgagcgagatcaccgccatcgaggccgagcacatgctgaagagaaagcccgacgtggtgacccccaacggcctgaacgtgaagaagttcagcgccgtgcacgagttccagaacctgcacgccatgtacaaggccagaatccaggacttcgtgagaggccacttctacggccacctggacttcgacctggagaagaccctgttcctgttcatcgccggcagatacgagttcagcaacaagggcgccgacatcttcctggagagcctgagcagactgaacttcctgctgagaatgcacaagagcgacatcaccgtgatggtgttcttcatcatgcccgccaagaccaacaacttcaacgtggagaccctgaagggccaggccgtgagaaagcagctgtgggacgtggcccacagcgtgaaggagaagttcggcaagaagctgtacgacgccctgctgagaggcgagatccccgacctgaacgacatcctggacagagacgacctgaccatcatgaagagagccatcttcagcacccagagacagagcctgccccccgtgaccacccacaacatgatcgacgacagcaccgaccccatcctgagcaccatcagaagaatcggcctgttcaacaacagaaccgacagagtgaaggtgatcctgcaccccgagttcctgagcagcaccagccccctgctgcccatggactacgaggagttcgtgagaggctgccacctgggcgtgttccccagctactacgagccctggggctacacccccgccgagtgcaccgtgatgggcatccccagcgtgaccaccaacctgagcggcttcggctgcttcatgcaggagcacgtggccgaccccaccgcctacggcatctacatcgtggacagaagattcagaagccccgacgacagctgcaaccagctgaccaagttcctgtacggcttctgcaagcagagcagaagacagagaatcatccagagaaacagaaccgagagactgagcgacctgctggactggagatacctgggcagatactaccagcacgccagacacctgaccctgagcagagccttccccgacaagttccacgtggagctgaccagcccccccaccaccgagggcttcaagtaccccagacccagcagcgtgccccccagccccagcggcagccaggccagcagcccccagagcagcgacgtggaggacgaggtggaggacgagagatacgacgaggaggaggaggccgagagagacagactgaacatcaagagccccttcagcctgagccacgtgccccacggcaagaagaagctgcacggcgagtacaagaactag

SEQ ID NO: 210452 - DNA, 2255 bp, Artificial Sequence
  derived and/or modified sequence
gggaaataagagagaaaagaagagtaagaagaaatataagagccaccatgttgaggggtagatcgttgtcggtcacgagccttggaggattgccgcagtgggaagtcgaagaactcccggtggaagaactcttgctgttcgaagtggcatgggaggtgacgaataaggtgggtggtatctacacagtgattcagaccaaggccaagacgacagcggacgagtggggagagaactattttcttattgggccctattttgaacacaacatgaaaacccaagtagaacagtgcgagccggtaaacgatgctgtgcgcagggcagtcgatgcgatgaataagcacggctgccaagtccactttgggcgctggttgatcgaagggtccccatacgtggtgctcttcgacattggctatagcgcgtggaatttggacaggtggaagggtgacctttgggaggcgtgctcagtcggaatcccctaccatgatcgagaggcaaatgacatgctgatctttggcagcctcacagcctggttcttgaaggaggtaacggaccacgcagatgggaaatacgtggtcgcacagttccatgagtggcaggcggggattggacttatcctgtcgcgagcgaggaagttgcccatcgcgacaatcttcacaacgcacgccacactgcttggtaggtatttgtgtgccgcgaatatcgatttctacaatcacttggacaaattcaacattgataaagaggccggagaacggcaaatctaccatcggtactgcatggagagagcgtccgtgcactgtgcccacgtgttcactacggtgagcgaaattactgcaatcgaagcagagcacatgctgaagagaaaaccggacgtcgtcacgcccaacgggctgaatgtgaagaagttttccgctgtccatgagttccagaaccttcatgctatgtataaagccaggattcaagatttcgtgagagggcatttctacggacatcttgattttgatcttgagaaaacgctgttcctcttcatcgcggggagatacgagttttccaacaagggtgccgacatttttctcgaatcactttcgaggctcaacttcttgttgcggatgcacaaatcggatatcaccgtcatggtctttttcatcatgcccgcgaaaaccaacaacttcaatgtggagacactgaagggacaggcggtccgcaaacaactgtgggacgtagcgcactcggtaaaagaaaagttcggcaaaaagctctacgacgcgctccttcgaggcgagatcccggacctcaacgacatcctcgatcgcgatgacctgaccatcatgaaacgcgcgatcttcagcacacagcgccagtcattgcctcccgtcaccactcataacatgattgacgactcgaccgatccgatcctctcgacaattcggagaattgggttgtttaacaataggacagacagggtgaaggtaatcctccacccggagttcctgtcctccaccagccctttgttgcccatggattatgaggagttcgtacgaggttgtcatctcggtgtgtttccctcatattacgaaccgtggggatatacgcccgctgagtgtactgtaatggggattcccagcgtaacgacgaatctttcgggttttgggtgcttcatgcaagagcacgtagctgatcccacggcatatggaatctacattgtcgataggcgctttagatcacccgacgattcgtgtaaccagttgaccaagtttctttacggattttgcaaacagtcacggagacagcggatcatccagagaaatcggaccgaacgccttagcgatttgctcgattggagatatctgggtaggtactatcagcatgcacggcacttgactctgagccgggcattccccgacaagtttcacgtcgagctcacatcaccgccgacgactgagggattcaaataccctcgcccaagctcagtgcctccttcgccgtcggggtcccaggcatcgtcgccgcagtcgtcagacgtggaggatgaagtagaggacgagcggtatgacgaggaagaagaagccgagcgcgaccgcttgaacatcaagtcgcccttttcgcttagccatgtcccgcatgggaagaaaaagctccacggagaatacaagaattgataagctgccttctgcggggcttgccttctggccatgcccttcttctctcccttgcacctgtacctcttggtctttgaataaagcctgagtaggaag

SEQ ID NO: 210453 - DNA, 2112 bp, Artificial Sequence
  derived and/or modified sequence
atgttacggggaaggtccctttcagtgacctcactaggcggcctgccacagtgggaggtggaagagctgcctgtggaggagttgctgctctttgaggtggcttgggaagtgacgaataaagtgggagggatctataccgttatccaaactaaggccaagacaaccgccgatgaatggggggagaactacttcttaattggaccctatttcgaacacaacatgaagacgcaagtggaacagtgtgaaccagtcaacgatgcagtgaggcgggctgtagacgccatgaacaaacatgggtgccaggtgcactttggacgatggttgatagaaggatctccttatgtcgtgttgtttgatattgggtacagcgcttggaatctggatcgctggaaaggcgatctctgggaggcctgttccgtgggcatcccctaccatgaccgggaggccaacgatatgctcatattcggcagcctgaccgcctggttcctcaaggaggtgaccgaccatgcagacggcaaatacgtggtagcacagttccatgagtggcaggccggaattggcctcatcttatctagagcccgcaagctgcctatcgcgaccatatttacaactcacgcaactcttcttgggagatacctgtgcgctgcgaacatcgacttttacaatcatctcgacaagttcaatatcgacaaggaagctggtgagagacagatttaccaccggtactgcatggagagagcctctgtccactgcgcacacgtatttacaacagtgagcgagattactgcgatcgaggctgagcacatgctaaaaaggaagccagatgtagtgacaccaaacggcctgaatgtaaagaagttctctgccgtgcacgagttccagaacctgcacgctatgtataaggctaggatacaggacttcgtccggggtcacttttacggtcatcttgactttgatcttgaaaagactctcttcctcttcatcgccggtcgctacgaattctccaataaaggcgcagacatctttcttgaatccctgagccgactgaatttcctgctccgtatgcataaatctgacattacagtcatggtgtttttcatcatgcccgccaagactaacaactttaatgtggagactctcaagggacaggcagtgcgaaagcaactctgggatgtagcccattccgttaaggaaaagttcgggaagaaattatacgacgctctgctccgaggcgagatccctgacctaaacgatatccttgacagggatgatttaaccatcatgaaaagggccatcttcagtacacagcgccaatctctaccaccggtcaccacacataacatgatagacgattccactgatcctatattgtccactattaggcggattggtctgttcaataatcggactgacagagtgaaagttattcttcaccccgagttcctaagtagcacaagccctctgcttcccatggactacgaagaattcgtgagaggatgtcacctgggagtgttcccttcttactatgaaccatggggctacacccccgctgagtgtacggtcatgggaatcccttcagtcacaacaaacttgtccgggtttggttgctttatgcaggaacatgtagcagaccctactgcctatggcatctacattgtagatagaaggttccgtagccccgatgattcctgtaatcagcttactaagtttttgtacgggttttgcaaacaatcccgcagacaacgtattatacaacgcaaccggacggaacgtctgtctgatctgctcgactggagatatctgggccgatactaccaacacgcccggcacctgactctgtccagggcctttcctgacaagtttcacgtggagctaactagccccccaacaactgaaggctttaagtaccctcgccctagctccgtccctccatctccttcagggtcacaggccagctcaccacagtcctcagatgtcgaggatgaggtggaggacgagcgctatgacgaagaggaggaggcagaacgggatcggttgaacattaaaagtcccttctcactctcacatgtgccacatggcaagaagaaactgcacggcgagtacaaaaactag

SEQ ID NO: 210454 - DNA, 2112 bp, Artificial Sequence
  derived and/or modified sequence
atgctgcggggccgcagcctgtctgtgaccagcctgggcggcctgccccagtgggaggtggaggagctgcctgtggaggagctgctgctgtttgaggtggcctgggaggtgaccaacaaggtgggcggcatctacaccgtcatccagaccaaggccaagaccacagcagatgagtggggcgagaactacttcctgattggcccctactttgagcacaacatgaagacccaggtggagcagtgtgagcctgtgaatgatgctgtgagaagagctgtggatgccatgaacaagcacggctgccaggtgcacttcggccgctggctgattgagggcagcccctacgtggtgctgtttgacatcggctacagcgcctggaacctggaccgctggaagggggacctgtgggaggcctgcagcgtgggcatcccctaccatgaccgggaggccaatgacatgctgatcttcggcagcctgacagcctggttcctgaaggaggtgacagaccacgcagatggcaagtatgtggtggcccagttccacgagtggcaggccggcatcggcctcatcctgagccgggccaggaagctgcccatcgccaccatcttcaccacccacgccaccctgctgggccgctacctgtgtgccgccaacatcgacttctacaaccacctggacaagttcaacatcgacaaggaggccggggagcggcagatctaccaccgctactgcatggagcgggcctctgtgcactgtgcccacgtgttcaccaccgtgtctgagatcacagccatcgaggccgagcacatgctgaagaggaagccagatgtggtgacccccaacggcctgaatgtgaagaagttctctgctgtgcatgagttccagaacctgcacgccatgtacaaggcccgcatccaggactttgtgcggggccacttctacggccacctggactttgacctggagaagaccctcttcctgttcatcgccggccgctatgagttcagcaacaagggagctgacatcttcctggagagcctgagccggctgaacttcctgctgaggatgcacaagagtgacatcaccgtgatggtgttcttcatcatgcctgccaagaccaacaacttcaacgtggagaccctgaagggccaggccgtgaggaagcagctgtgggatgtggcccacagcgtgaaggagaagtttgggaagaagctgtatgatgccctgctgcggggggagatcccagacctgaatgacatcctggacagagatgacctgaccatcatgaagagggccatcttcagcacccagaggcagagcctgccccctgtgaccacccacaacatgattgatgacagcacagaccccatcctgagcaccatcagaagaattggcctcttcaacaacagaacagacagagtgaaggtgatcctgcaccctgagttcctgagcagcaccagccccctgctgcccatggactatgaggagtttgtgcggggctgccacctgggcgtcttccccagctactatgagccctggggctacaccccagctgagtgcaccgtgatgggcatccccagcgtgaccaccaacctgagcggcttcggctgcttcatgcaggagcacgtggccgaccccacagcctacggcatctacatcgtggaccggcgcttccgcagcccagatgacagctgcaaccagctgaccaagttcctgtatggcttctgcaagcagagccggcggcagaggatcatccagaggaacagaacagagcggctgagtgacctgctggactggagatacctgggccgctactaccagcacgcccggcacctgaccctgagccgggccttcccagacaagttccacgtggagctgaccagcccccccaccacagagggcttcaagtacccccggcccagctctgtgccccccagccccagcggcagccaggccagcagcccccagagcagtgatgtggaggatgaggtggaggatgaaagatatgatgaggaggaggaggccgagcgggaccggctgaacatcaagagccccttcagcctgagccacgtgccccacggcaagaagaagctgcacggggagtacaagaactag

SEQ ID NO: 210455 - DNA, 2112 bp, Artificial Sequence
  derived and/or modified sequence
atgctgcggggccggagcctgagcgtgaccagcctgggcggcctgcctcagtgggaagttgaagagcttcctgttgaagaactgctcctatttgaggtggcttgggaggtcaccaacaaagtgggggggatatatacggtgatacagacaaaagctaagacaactgctgacgagtggggcgagaattattttcttatcggcccgtacttcgagcacaacatgaagactcaggtcgagcagtgcgaacccgtaaatgacgcagttaggcgcgctgtcgatgcaatgaataagcatggatgtcaggtgcacttcgggagatggctgatcgaaggcagcccttacgtggtcttatttgatattggctatagcgcctggaaccttgacagatggaagggcgacctgtgggaggcgtgctcagtggggattccgtaccatgatagggaagccaatgatatgctcatcttcggatccctcacagcttggttcctaaaggaggtaacggaccatgccgacggaaagtatgtcgtcgcccagtttcacgagtggcaggccggcattgggctcatcttatccagggccaggaaacttccgatcgccactatcttcaccacgcacgctacactgttaggccggtatctgtgcgcggcgaatattgacttttacaatcacttggacaaattcaacattgataaggaagcgggcgagagacagatttatcacagatactgcatggagagagcctccgtgcattgcgcgcatgtctttaccaccgtgagtgaaattacagccattgaggctgagcacatgctcaagagaaagccagatgtggtgacgccaaatggattgaatgttaagaagttcagcgcagtgcacgaatttcaaaacttgcacgccatgtataaagcacgcattcaagactttgtgaggggtcatttctatgggcatcttgactttgacctcgagaagaccctgttcctgtttattgcgggaaggtatgagttctcaaacaaaggcgcagatattttcctagagagcctgagtagattaaactttctgttgagaatgcacaagtccgatataaccgtgatggtgttctttattatgcccgccaagacgaataatttcaacgttgaaactctcaaaggccaagccgtccggaagcagctttgggatgtggcccacagtgtgaaggagaagtttgggaaaaagctctacgacgcgcttctacgcggcgagatcccagacctgaacgacatcttagatcgggatgatcttactatcatgaagcgggcaatcttcagtacacaacgccagagcctgccccccgtcaccacgcacaacatgattgatgactctacagaccccatcctcagcacaatccgccggattggcctgtttaataacagaacagaccgggttaaggttattctccacccagagttcttaagttccacaagccccctgttacccatggattatgaggagttcgtgaggggatgccatctcggcgtgttcccttcttactacgagccttgggggtacacgccagctgagtgcactgttatgggaattccctctgttaccaccaacctgtccggctttgggtgctttatgcaggagcacgttgcggatccgacggcttacggcatctatatcgtcgatcgcaggtttcggtcccctgatgatagctgcaaccagctcactaagttcctgtacggcttctgcaagcagtctaggcgtcagcgtattatccaacgcaacaggactgagcggctctcagatctgcttgattggaggtacttgggaaggtattaccagcacgcccggcatttaaccctcagccgagcctttcccgacaagtttcatgttgaactgacatccccccctaccaccgaaggcttcaaatatcccaggccctcaagtgtgcctccatccccctccggctctcaggcatcctcaccgcagtcaagtgatgtggaagacgaggtagaagacgaacgctatgacgaggaggaggaggccgagcgcgatagactgaatatcaagtcccctttttcactgtcacatgttccacatgggaaaaaaaaactgcatggtgagtacaagaactag

SEQ ID NO: 210456 - DNA, 3132 bp, Artificial Sequence
  derived and/or modified sequence
agatactgacagggcagataccgtcctcacaatacctgcccagaaagacgagaaagaggaggaagaattcctccttccaccaggaattctgtgggaagcacataagatttcatgctactagtttattcccaagagaagctaccaaagcctggtaactctaccaactctaacttttgtgcctgtaagttctcttctcctgggattacaactaattgaaacaggaattcaaaggagtctcggaggactgtaagaagaatgcttcgaggccgatccctctctgtaacatccctgggtgggcttccccagtgggaagtcgaagaacttcctgtggaggagttactgctctttgaagttgcttgggaagtgaccaataaagttggaggcatctatactgtgattcagacaaaggccaaaacaacagcagatgaatggggagagaactattttctgataggtccatattttgagcataatatgaagactcaggtggaacagtgtgaacctgtaaatgatgctgtcagaagagcagtggacgcaatgaataagcatggctgccaggtgcattttggaagatggctgatagaaggaagtccttatgtggtactttttgacataggctattcagcttggaatctggacaggtggaagggtgacctctgggaagcatgcagtgtcggcattccttatcatgaccgagaagccaatgatatgctgatatttggatctttaactgcctggttcttaaaagaggtgacagatcatgcagatggtaaatatgtcgttgcccaattccatgaatggcaggctggaattggactgatcctttctcgagccaggaaacttcctattgccacaatatttacaacccacgctacactacttgggaggtatctctgtgcagcaaatattgatttctacaaccatcttgataagtttaacattgacaaagaggctggggaaaggcagatttaccaccggtactgcatggagcgagcttccgttcattgcgctcacgtgttcaccacggtttctgaaataacagcaatagaagctgaacatatgctgaagagaaagcctgatgtagttactccaaacggcttgaatgttaagaaattttcagcagtgcatgagtttcaaaatctacatgccatgtacaaggccagaatccaagattttgttcgaggtcatttctatggtcatctcgactttgatcttgaaaagactttgttccttttcattgctgggaggtatgagttttcaaacaaaggagctgacatcttcctagaatccttatccaggctaaatttcctgctgaggatgcataaaagtgacatcacagtgatggtgtttttcattatgcctgccaagacaaataatttcaacgtggaaaccctgaaaggacaagcagtgcgaaaacagctgtgggatgttgcacattctgtgaaggaaaagtttggaaaaaaactctatgatgcattattaagaggagaaattcctgacctgaacgatattttagatcgagatgatctaacaattatgaaaagagccatcttttcaactcagcgacagtcattgcccccagtgaccacgcacaacatgattgatgactccaccgaccccatcctcagcaccattagacggattggacttttcaacaaccgcacagatagagtcaaggtgattttgcacccagagtttctatcctccaccagtcccttactacccatggactatgaagagtttgttagaggttgtcatcttggagtatttccatcatactatgaaccctggggttatactccagctgaatgcactgtgatgggtatccccagtgtgaccacgaatctctccgggtttggctgtttcatgcaggagcacgtggctgatcctactgcttacggtatttacatcgttgacaggcggttccgttctccagatgattcttgcaatcagctgactaagtttctctatggattttgcaaacagtcacgccgccaaaggattatccagaggaacagaactgagaggctctcagatcttctggattggagatacttaggcagatattaccagcatgccagacacctgacattaagcagagcttttccagataaattccatgtggaactaacatcaccaccaacgacagaaggatttaaatatcccaggccttcctcagtaccaccttctccttcagggtctcaggcctccagtcctcagagcagtgatgtggaagatgaagtggaggatgagagatacgatgaggaagaggaggctgaaagggatcggttaaatatcaagtcaccattttcactgagccacgttcctcatgggaagaaaaagctgcatggtgaatataagaactgaattctacatgtgctgcatgaagagctaatttaaaaaagcaaagtaagactaattatttaaaataaaaatgccacaaatttcattttctccttctaagtattacaatggagtttattctctgcctaaaaagtggaagaaattgagtgaatgacaattttgtaatttaggataagatccaagttattttccccaactcttgtttcccccataaagttaggcatgaggaggagcactcattaaaggcagaagacggaaaagtgtttttaaaatggtgaatttaagtggtaaggattttctcttactctgtttatttttaaatgatcatcataatcctttgcttactatttatgcagcttctctaccccaccacacaaatttcccatttcccccccgaaaaccttgatcttacccatgaatgtgcactacctacattttttaaatagctaggtttttactgattattttcatttttcacatgcatcagaaccatgatttagatgtagttttgcagagacaaaaatccatgagtgaatagctatcctaagtccatattttgatgcatattaatggacatttatgtcacttttgaaatctagaattgatgttgtaattaatgcaagatattaccatgtacatggtaccaccatcttactgtaacatttttctattgtttaaatagaaagcctttttaaaatttggtcaatcttcatagatgataacttgtaaaatccaagtaaataaacacattaatatttaataacttaa

SEQ ID NO: 210457 - DNA, 2112 bp, Artificial Sequence
  derived and/or modified sequence
atgctacgtgggcgttccctcagcgttactagtttgggcggactgccccagtgggaagtcgaagagctgcctgtggaggagttgttattgtttgaggtggcttgggaagtaacgaacaaggtgggcggtatttacactgtgattcagactaaggcaaagacaactgcggatgagtggggcgaaaattactttcttatcggcccatactttgaacacaatatgaagacccaggtggagcagtgtgagccagtgaatgatgccgtccggcgtgcggttgatgcgatgaacaagcacgggtgtcaggttcacttcggtagatggctcatcgaaggtagcccttacgttgtcctttttgacataggatacagtgcctggaacctcgatcgctggaagggagacttatgggaggcttgtagcgtaggaatcccttatcacgatagggaggctaatgacatgctaattttcggcagtctgacagcctggttcctgaaggaggtcacagatcacgccgatggcaagtatgtggtggcccagtttcacgaatggcaggccggaattggccttatcctttcccgcgcacgtaaactccctatagccaccattttcaccacacatgccacccttctgggtcgttatctctgcgcagctaatatcgatttttacaatcacctggataagtttaacatcgataaggaggcaggcgagaggcagatataccatcggtattgcatggaacgcgcaagtgtgcactgtgctcacgtgttcacaaccgtgtctgaaattacagcgatcgaggcagaacacatgcttaagaggaaacctgatgtggtcacacctaatgggctaaacgttaaaaaattctccgcagtccacgaattccaaaatctccatgcgatgtacaaagcgaggatacaggacttcgtccggggacatttctatggccacctcgatttcgatctggaaaagaccttgttcctctttatcgcaggccgatacgagttctcaaataaaggcgcagacatattcctagaatctttgtccaggctgaattttctgcttcggatgcataaatccgatatcaccgttatggttttcttcattatgccagctaaaacgaacaacttcaatgtggagacacttaagggccaggcggtccggaagcagctgtgggatgtggctcattctgtcaaggagaagtttgggaaaaagttgtacgacgctctcctgcgcggagagatccctgacctgaatgacattctggaccgagatgatctcacaatcatgaaaagggctattttctcaacccagaggcagtctctgccacccgtcaccacccacaacatgatcgacgattctaccgatcccatcttgagcacaattcggaggatcgggctgttcaacaaccgaacagatagggtgaaagtaattttgcatccagaatttctgtcctctacctcgcctctgctacccatggattatgaagagttcgtgcgaggatgccacctcggggtcttccctagttactacgagccctggggctacacgccggcagagtgtacagtcatgggcatccccagtgtaaccactaacctgtctggcttcggctgttttatgcaagaacacgttgcagaccccacagcttatgggatctatattgtcgatcgtcggttcagatctccagatgactcatgtaaccaactcacaaaatttctgtacggtttctgtaagcagagcaggaggcagcgcattatccagcgcaatcggacagagaggctctcggacctgctggactggcggtatctaggcagatattaccaacatgctagacatttgaccttaagccgcgcttttcctgataagtttcatgtcgagctcacgagtccccctaccaccgaggggtttaaatatccacggccaagttctgtgccaccatctccaagtggctcccaggccagtagtccccaaagcagcgatgtggaggatgaagtcgaggacgaaagatatgacgaagaagaagaggccgagagagatcggctcaatattaaaagtccattttcactatcccatgtgccccatgggaaaaaaaaactgcatggagaatacaaaaactag

SEQ ID NO: 210458 - RNA, 2255 nt, Artificial Sequence
  derived and/or modified sequence
gggaaauaagagagaaaagaagaguaagaagaaauauaagagccaccauguugagggguagaucguugucggucacgagccuuggaggauugccgcagugggaagucgaagaacucccgguggaagaacucuugcuguucgaaguggcaugggaggugacgaauaaggugggugguaucuacacagugauucagaccaaggccaagacgacagcggacgaguggggagagaacuauuuucuuauugggcccuauuuugaacacaacaugaaaacccaaguagaacagugcgagccgguaaacgaugcugugcgcagggcagucgaugcgaugaauaagcacggcugccaaguccacuuugggcgcugguugaucgaaggguccccauacguggugcucuucgacauuggcuauagcgcguggaauuuggacagguggaagggugaccuuugggaggcgugcucagucggaauccccuaccaugaucgagaggcaaaugacaugcugaucuuuggcagccucacagccugguucuugaaggagguaacggaccacgcagaugggaaauacguggucgcacaguuccaugaguggcaggcggggauuggacuuauccugucgcgagcgaggaaguugcccaucgcgacaaucuucacaacgcacgccacacugcuugguagguauuugugugccgcgaauaucgauuucuacaaucacuuggacaaauucaacauugauaaagaggccggagaacggcaaaucuaccaucgguacugcauggagagagcguccgugcacugugcccacguguucacuacggugagcgaaauuacugcaaucgaagcagagcacaugcugaagagaaaaccggacgucgucacgcccaacgggcugaaugugaagaaguuuuccgcuguccaugaguuccagaaccuucaugcuauguauaaagccaggauucaagauuucgugagagggcauuucuacggacaucuugauuuugaucuugagaaaacgcuguuccucuucaucgcggggagauacgaguuuuccaacaagggugccgacauuuuucucgaaucacuuucgaggcucaacuucuuguugcggaugcacaaaucggauaucaccgucauggucuuuuucaucaugcccgcgaaaaccaacaacuucaauguggagacacugaagggacaggcgguccgcaaacaacugugggacguagcgcacucgguaaaagaaaaguucggcaaaaagcucuacgacgcgcuccuucgaggcgagaucccggaccucaacgacauccucgaucgcgaugaccugaccaucaugaaacgcgcgaucuucagcacacagcgccagucauugccucccgucaccacucauaacaugauugacgacucgaccgauccgauccucucgacaauucggagaauuggguuguuuaacaauaggacagacagggugaagguaauccuccacccggaguuccuguccuccaccagcccuuuguugcccauggauuaugaggaguucguacgagguugucaucucgguguguuucccucauauuacgaaccguggggauauacgcccgcugaguguacuguaauggggauucccagcguaacgacgaaucuuucggguuuugggugcuucaugcaagagcacguagcugaucccacggcauauggaaucuacauugucgauaggcgcuuuagaucacccgacgauucguguaaccaguugaccaaguuucuuuacggauuuugcaaacagucacggagacagcggaucauccagagaaaucggaccgaacgccuuagcgauuugcucgauuggagauaucuggguagguacuaucagcaugcacggcacuugacucugagccgggcauuccccgacaaguuucacgucgagcucacaucaccgccgacgacugagggauucaaauacccucgcccaagcucagugccuccuucgccgucggggucccaggcaucgucgccgcagucgucagacguggaggaugaaguagaggacgagcgguaugacgaggaagaagaagccgagcgcgaccgcuugaacaucaagucgcccuuuucgcuuagccaugucccgcaugggaagaaaaagcuccacggagaauacaagaauugauaagcugccuucugcggggcuugccuucuggccaugcccuucuucucucccuugcaccuguaccucuuggucuuugaauaaagccugaguaggaag

SEQ ID NO: 210459 - protein, 488 aa, Artificial Sequence
  derived and/or modified sequence
MFAAGLAPFYASNFSLWSAAYCSSAGPGGCSFPLDPAAVKKPSFCIADILHAGVGDLGAAPEGLAGASAAALTAHLGSVHPHASFQAAARSPLRPTPVVAPSEVPAGFPQRLSPLSAAYHHHHPQQQQQQQQPQQQQPPPPPRAGALQPPASGTRVVPNPHHSGSAPAPSSKDLKFGIDRILSAEFDPKVKEGNTLRDLTSLLTGGRPAGVHLSGLQPSAGQFFASLDPINEASAILSPLNSNPRNSVQHQFQDTFPGPYAVLTKDTMPQTYKRKRSWSRAVFSNLQRKGLEKRFEIQKYVTKPDRKQLAAMLGLTDAQVKVWFQNRRMKWRHSKEAQAQKDKDKEAGEKPSGGAPAADGEQDERSPSRSEGEAESESSDSESLDMAPSDTERTEGSERSLHQTTVIKAPVTGALITASSAGSGGSSGGGGNSFSFSSASSLSSSSTSAGCASSLGGGGASELLPATQPTASSAPKSPEPAQGALGCL

SEQ ID NO: 210460 - DNA, 2308 bp, Artificial Sequence
  derived and/or modified sequence
aaaactttgggagtttttagagacgagtttttttttttttctattacttttccccccccctaactaacggactattattgttgttgttttaaatttagctcttagggcttagctatttgggttttcttgcggtgtccggctcccgtctccctggctcccccgcccgccctgcggccccagcgcccctcgctctcatccagcccgcgaggagtgcgggcgccgcgccgcctttaaagcgaggccagggagcgaggcggtgaccggccgagatccggccctcgcctcctccctcggtggcgctagggctcccggcctctcttcctcagtgcgggcggagaagcgaaagcggatcgtcctcggctgccgccgccttctccgggactcgcgcgcccctccccgcgcgcccacccacccagtccggctggactgcggcagccgcgcggctcaccccggcaggatgttcgcagccgggctggctcccttctacgcctccaacttcagcctctggtcggccgcttactgctcctcggccggcccaggcggctgctccttccccttggaccccgccgccgtcaaaaagccctccttctgcatcgcagacattctgcacgccggcgtgggggatctgggggcggccccggagggcctggcaggggcctcggccgccgccctcaccgcgcacttgggctcggttcacccgcacgcctctttccaagcggcggccagatccccgcttcgacccaccccagtggtggcgccctccgaagtcccggctggcttcccgcagcggctgtctccgctctcagccgcctaccaccaccatcacccgcaacaacaacagcagcagcaacagccgcagcagcaacagcctccgcctccgccccgggctggcgccctgcagcccccggcctcggggacgcgagtggttccgaacccccaccacagtggctctgccccggccccctccagcaaagacctcaaatttggaattgaccgcattttatctgcagaatttgacccaaaagtcaaagaaggcaacacgctgagagatctcacttccctgctaaccggtgggcggcccgccggggtgcacctctcaggcctgcagccctcggccggccagttcttcgcatctctagatcccattaacgaggcttctgcaatcctgagtcccttaaactcgaacccaagaaattcagttcagcatcagttccaagacacgtttccaggtccctatgctgtgctcacgaaggacaccatgccgcagacgtacaaaaggaagcgttcatggtcgcgcgctgtgttctccaacctgcagaggaaaggcctggagaaaaggtttgagattcagaagtacgtgaccaagccggaccgaaagcagctggcggcgatgctgggcctcacggacgcacaggtgaaggtgtggttccagaaccggcggatgaagtggcggcactccaaggaggcccaggcccaaaaggacaaggacaaggaggctggcgagaagccatcaggtggagccccggctgcggatggcgagcaggacgagaggagccccagccgttctgaaggcgaggctgagagcgagagcagcgactccgagtccctggacatggcccccagcgacacggagcggactgaggggagtgagcgttctctgcaccaaacaacagttattaaggccccggtcactggcgccctcattaccgccagcagtgctgggagtggtgggagcagcggcggcggcggcaatagtttcagcttcagcagcgccagcagtcttagtagcagcagcaccagtgcgggttgcgccagcagccttggcggcggcggcgcctcggagcttctccctgcaacacagcccacagccagcagcgctcccaaaagccccgagccagcccaaggcgcgcttggctgcttatagactgtactagggcggaggggatccgggccttgcgtgcagcctcccaaccatgggctgggttttgtgcttactgtatgttggcgacttggtagggcaggagacgcagcgtggagcctacctcccgacattcacgcttcgccccacgctgctccgactggctgcagcggacactgcccaaagcagaggggagtctcagtgtcctgctagccagccgaacacttctctccggaagcaggctggttcgactgtgaggtgtttgactaaactgtttctctgactcgccccagaggtcgtggctcaaaggcacttaggacgccttaaatttgtaaataaaatgtttactacggtttgtaaaaaaaaaaaaaaaaaaaaaaaaaaaaaaaa

SEQ ID NO: 210461 - DNA, 1467 bp, Artificial Sequence
  derived and/or modified sequence
atgttcgccgctgggctggcgccattttacgcctccaacttctccttgtggagtgctgcttattgtagcagcgccggacccggcggctgcagctttcccctggatcccgcagccgtcaagaagcccagtttttgtatcgctgatattctacacgctggtgtcggcgacttaggcgctgcccctgagggactcgccggcgcttcagcggctgcattgaccgcccaccttggcagcgtacaccctcatgcaagctttcaggctgctgctaggtccccactgcgccctacccctgtcgtggcaccaagtgaggtgcccgccgggtttccacagcgcctgtcccctcttagcgcagcatatcaccatcaccaccctcagcagcaacagcagcagcagcaacctcaacaacaacagcctccacccccccctagggccggggctctgcagcccccagcttcaggcactagggtggttccaaacccccaccactccggaagcgcgcccgctccatccagcaaagacctgaagttcggaattgaccgcatactgtctgccgagtttgatcctaaagtgaaagagggaaacacgctgagagacttaaccagtctgctgacaggtggacgtccagccggggttcatctgtcgggccttcagccttctgccggccagttctttgcctccctggatccaatcaatgaagcgagcgcaattttgagcccactgaattccaatccacggaattcagtccagcatcaattccaggatacattcccaggaccctatgctgtgcttactaaggataccatgccacagacgtataagagaaaacgaagttggtctagggccgttttttccaaccttcagcgaaaaggattggaaaaacggttcgaaatacagaaatacgttacaaaacccgataggaaacagctcgcagctatgttggggctgacagatgctcaggtgaaggtgtggtttcagaatcggcgaatgaaatggcgccactcaaaagaggcccaagctcagaaggacaaggacaaggaggctggcgagaagccgtctggtggagccccggccgccgacggagagcaggacgagcgctctccaagccgttccgagggggaggctgagtccgagagcagtgacagcgaatctctagacatggctccttcagatactgagcggaccgaaggaagcgagaggtccctccaccagactactgttattaaggcacccgttaccggcgccttaatcacagcaagcagcgcaggcagcgggggcagttcaggagggggaggcaacagcttttcatttagcagcgcgtcttccctgagctcatcctctacttccgcagggtgcgcctcctcactggggggcggtggcgcaagcgagctgttgccggctactcagccaaccgcaagttccgcccccaaatcccctgagcccgcccagggcgccctgggatgtctgtag

SEQ ID NO: 210462 - DNA, 1467 bp, Artificial Sequence
  derived and/or modified sequence
atgtttgctgctggcctggcccccttctacgccagcaacttcagcctgtggagcgctgcctactgcagcagcgctggccctgggggctgcagcttccccctggaccctgctgctgtgaagaagcccagcttctgcatcgctgacatcctgcacgccggcgtgggggacctgggcgccgcccctgagggcctggccggggccagcgctgctgccctgacagcccacctgggctctgtgcacccccacgccagcttccaggccgccgcccggagccccctgcggcccacccctgtggtggcccccagcgaggtgcctgctggcttcccccagaggctgagccccctgtctgctgcctaccaccaccaccacccccagcagcagcagcagcagcagcagccccagcagcagcagcccccacctccaccccgggccggggccctgcagcccccagccagcggcaccagggtggtgcccaacccccaccacagcggcagcgccccagcccccagcagcaaggacctgaagtttggcatcgaccgcatcctgtctgctgagtttgaccccaaggtgaaggagggcaacaccctgcgggacctgaccagcctgctgaccggcggccggcctgctggggtgcacctgagcggcctgcagcccagcgctggccagttctttgccagcctggaccccatcaatgaggccagcgccatcctgagccccctgaacagcaaccccagaaattctgtgcagcaccagttccaggacaccttccctggcccctatgctgtgctgaccaaggacaccatgccccagacctacaagaggaagaggtcctggagcagagctgtgttcagcaacctgcagaggaagggcctggagaagagatttgagatccagaagtatgtgaccaagccagacaggaagcagctggccgccatgctgggcctgacagatgcccaggtgaaggtgtggttccagaacagaaggatgaagtggaggcacagcaaggaggcccaggcccagaaggacaaggacaaggaggccggggagaagcccagcggcggggccccagctgctgatggagagcaggatgagaggagccccagccgctctgagggggaggccgagagcgagagcagtgacagcgagagcctggacatggcccccagcgacacagagaggacagagggcagcgagaggagcctgcaccagaccaccgtcatcaaggcccctgtgactggagccctgatcacagccagcagcgctggcagcggcggcagcagcggcggcggcggcaacagcttctccttcagcagcgccagcagcctgagcagcagcagcaccagcgctggctgtgccagcagcctgggcggcggcggggccagcgagctgctgcctgccacccagcccacagccagcagcgcccccaagagccctgagcccgcccagggcgccctgggctgcctgtag

SEQ ID NO: 210463 - DNA, 1467 bp, Artificial Sequence
  derived and/or modified sequence
atgttcgccgccggcctggcccccttctacgccagcaacttcagcctgtggtcagcagcttattgttcgagtgccgggcccggtggctgttccttcccgctcgaccccgccgctgtgaagaagccctcattttgcatcgcagacatcctgcacgctggagtcggggatctgggggccgcccctgaaggccttgctggagcttcagctgccgccctgaccgcccacctgggaagcgtccaccctcatgcctcattccaggccgctgctcggagccctctacgcccaactcctgtcgtggcacccagcgaagtgccagccgggttcccacaaagattatcacccctgtctgccgcataccatcaccatcacccacagcagcagcagcagcagcagcagccgcagcagcagcagccacctccgccgcctcgcgccggcgcactgcagcccccggcaagcggaactagggtggtgcccaaccctcaccactccggctcggctcctgctccttcttctaaggacctaaagttcgggatcgatagaattctgtctgctgagtttgaccctaaggttaaagaaggcaacacacttagagacctcacttccctcctgacgggagggcgcccggccggggtgcacctgagtggactgcagccatctgccggacaatttttcgcaagcctcgacccaattaacgaggcgtctgctatcctgagccctcttaacagtaacccgcgcaatagtgttcagcaccagttccaggacacattcccaggtccctatgccgttctgacaaaagataccatgccccagacatacaagcgcaagcgctcatggtcacgggccgtgttcagtaatctgcaaaggaagggcttagagaagcgattcgagatccaaaagtatgtgaccaagcctgaccgcaaacagttggccgctatgctgggattgactgatgcacaggtgaaggtttggtttcagaaccgcagaatgaaatggcgtcacagtaaggaggcccaggcccagaaggacaaggacaaggaagccggcgaaaagccttccggtggcgcgcccgctgcggacggagagcaggacgagcgctccccgagtcggtcggagggagaagctgagagcgaatcctccgattctgaatctctagacatggcccccagcgataccgagagaactgagggatccgaaagatccctacatcagactactgtgattaaagccccagttacaggagcactgatcacagcatcctcagccgggagtggtgggtccagcgggggtggcggaaattcttttagctttagcagcgcttccagcttgtccagctcgtcaactagcgcaggatgcgctagcagtctagggggtggaggcgccagcgaactcttaccagccacccagccaacagcatctagtgctcctaaatccccagaacccgctcagggtgctctggggtgcctgtag

SEQ ID NO: 210464 - DNA, 1467 bp, Artificial Sequence
  derived and/or modified sequence
atgtttgccgcaggtctcgccccattttacgcctccaatttctcgctgtggtcagccgcatactgcagctccgctgggccaggcggttgttcttttccactggaccctgcggctgtcaaaaaaccatcattctgcattgctgacatactgcacgctggcgtcggggaccttggagcagctcccgaggggctggccggtgcttccgctgccgctctcacagcacatctggggagtgttcacccccatgcttcttttcaagctgcagccaggtctcctttgcgaccaacaccagtggtggccccaagtgaggttcctgccggatttccccagagattgtcccctcttagcgccgcatatcaccatcatcacccgcagcaacaacagcagcagcagcagccacagcagcagcaacccccaccgcctccacgcgctggcgctttgcagccacccgcttctggaacaagggtagtcccgaacccacaccattcgggctcagctccagcaccctcaagcaaggacctcaagttcggaatagacaggatcctatccgcagagttcgacccgaaggtgaaagagggtaatacgcttcgtgatttaaccagtctgctgaccggtggacgaccggctggagtgcatctctccgggttgcagccatcagccggtcagtttttcgccagccttgatcctatcaacgaagcttcggccattttgtcaccactcaatagtaatccacggaacagtgttcaacatcagttccaggacacctttccaggcccttacgcagtacttactaaggatacgatgccacagacctataagcgcaagcggtcctggagtagggctgtcttctcaaatctccaaaggaagggactggagaagcgctttgagattcagaagtacgtaaccaaacccgatagaaaacagttagccgctatgttgggtcttacggacgcccaggtcaaggtgtggttccagaatcgcagaatgaaatggcgtcacagcaaggaggctcaggcacagaaggacaaagataaggaggccggagagaaaccaagcggcggagccccagcagccgacggagaacaagatgagcgcagccccagccgatcagagggcgaggctgagagcgagtcgtccgatagtgagtcgctggacatggccccttcagatactgagcggaccgagggatccgagcggagtttgcatcagacaacagtgatcaaggctccagttactggcgcactcataacggccagcagcgctggatccggaggctcatccgggggaggaggcaactctttctcgtttagctcggcttcaagcctttcgtcttcgagcacatctgccggatgtgcttcttcccttgggggaggtggggcaagcgaacttctccctgctacacaacccaccgcctcatccgcccctaaaagcccagagccggcacagggtgccctgggatgcctttag

SEQ ID NO: 210465 - DNA, 4046 bp, Artificial Sequence
  derived and/or modified sequence
atgtcgatgttgcacaaaacctccaccaccactaccctgcgttctaaagacccaaggcacgaatggaagacgttgaccaccacgcagctcctcctgcaaccaggcccaaggggttcctggggaagctgtcacagaattgaaagcagtattgaaccccacggaaatctgctcttgtgggcacttgcaaaacaacgaaccccacgtgatccggagatgtggtggaggggtgaggctaacatttcctacaacctcctgcaaaggatggaagcgcgtgccgctctcccgggtttcgggaggcagcctgttttgtagcctctgaggctccggggaaaggtttggctgcgtctaagagagacgtttggagccatccgtcttattttgtttgaaaagtcactcgttcaatttgtcactgtgtgacagctcagaataaaaccaatttgcggccgcccctcctcctcgcttcccggaggatctcctgggaggcacgaggcggacgcggtgctgagttgggccgggactcagggcggcaacatttgggcaagggcccaggaaagatgaggggctttgccgaggacacggactcctggaataaaagcagaatgaggtcaagagaagggaagcaaaggggccaaagcgcgctccgctctccaccgggaggcgggctttgcagagccctaaagagtgagattaccgtcccttccccacgcccccaactcgccccgggtgacaagcgcttcaggaaagctcctgtgatcaaccctccttgccccgtggcggttcggagctgcagaagttagaagagagtcagagccctccggagcggctgcctggcccctacgcagagtagcaagaagcactgcgatgtgcgctactaagcccacgcggccgcagcaaaaactttggcgtggccggggcgtggctagggtccggccaggcccccttgttcctaattcccctccactccccgctcccattggtcacgaggatgaccaatgagcgctcggatcgaggtcctaccccgggcctgactcgaaagctcctgccaaaactttgggagtttttagagacgagtttttttttttttctattacttttccccccccctaactaacggactattattgttgttgttttaaatttagctcttagggcttagctatttgggttttcttgcggtgtccggctcccgtctccctggctcccccgcccgccctgcggccccagcgcccctcgctctcatccagcccgcgaggagtgcgggcgccgcgccgcctttaaagcgaggccagggagcgaggcggtgaccggccgagatccggccctcgcctcctccctcggtggcgctagggctcccggcctctcttcctcagtgcgggcggagaagcgaaagcggatcgtcctcggctgccgccgccttctccgggactcgcgcgcccctccccgcgcgcccacccacccagtccggctggactgcggcagccgcgcggctcaccccggcaggatgttcgcagccgggctggctcccttctacgcctccaacttcagcctctggtcggccgcttactgctcctcggccggcccaggcggctgctccttccccttggaccccgccgccgtcaaaaagccctccttctgcatcgcagacattctgcacgccggcgtgggggatctgggggcggccccggagggcctggcaggggcctcggccgccgccctcaccgcgcacttgggctcggttcacccgcacgcctctttccaagcggcggccagatccccgcttcgacccaccccagtggtggcgccctccgaagtcccggctggcttcccgcagcggctgtctccgctctcagccgcctaccaccaccatcacccgcaacaacaacagcagcagcaacagccgcagcagcaacagcctccgcctccgccccgggctggcgccctgcagcccccggcctcggggacgcgagtggttccgaacccccaccacagtggctctgccccggccccctccagcaaagacctcaaatttggaattgaccgcattttatctgcagaatttgacccaaaagtcaaagaaggcaacacgctgagagatctcacttccctgctaaccggtgggcggcccgccggggtgcacctctcaggcctgcagccctcggccggccagttcttcgcatctctagatcccattaacgaggcttctgcaatcctgagtcccttaaactcgaacccaagaaattcagttcagcatcagttccaagacacgtttccaggtccctatgctgtgctcacgaaggacaccatgccgcagacgtacaaaaggaagcgttcatggtcgcgcgctgtgttctccaacctgcagaggaaaggcctggagaaaaggtttgagattcagaagtacgtgaccaagccggaccgaaagcagctggcggcgatgctgggcctcacggacgcacaggtgaaggtgtggttccagaaccggcggatgaagtggcggcactccaaggaggcccaggcccaaaaggacaaggacaaggaggctggcgagaagccatcaggtggagccccggctgcggatggcgagcaggacgagaggagccccagccgttctgaaggcgaggctgagagcgagagcagcgactccgagtccctggacatggcccccagcgacacggagcggactgaggggagtgagcgttctctgcaccaaacaacagttattaaggccccggtcactggcgccctcattaccgccagcagtgctgggagtggtgggagcagcggcggcggcggcaatagtttcagcttcagcagcgccagcagtcttagtagcagcagcaccagtgcgggttgcgccagcagccttggcggcggcggcgcctcggagcttctccctgcaacacagcccacagccagcagcgctcccaaaagccccgagccagcccaaggcgcgcttggctgcttatagactgtactagggcggaggggatccgggccttgcgtgcagcctcccaaccatgggctgggttttgtgcttactgtatgttggcgacttggtagggcaggagacgcagcgtggagcctacctcccgacattcacgcttcgccccacgctgctccgactggctgcagcggacactgcccaaagcagaggggagtctcagtgtcctgctagccagccgaacacttctctccggaagcaggctggttcgactgtgaggtgtttgactaaactgtttctctgactcgccccagaggtcgtggctcaaaggcacttaggacgccttaaatttgtaaataaaatgtttactacggtttgtaaaggccgcttggctttgctgggggttgttaaggccagagatctacaaccggaccttagtcccggggacactgtagaatgcagcagctgaaggtggtggggctggagtttcaggggaagtggctcaacctcagagccatcttgttacagacatcagagatgggcgtctgggtttagaggcttctaattaagagatttctagcgccaactgccactgaaagtgccctctgagaccctgagtagcctgagagtggagcaggccatagaaactgttaggccagtgcaacagatggtttccccattcacagtatggacgaaatgagttcctagagtactcagagttggaatggggaaggcagtgatgccaggcggggtcaatctaggcacagctgtaatcactatgtggacgcgaagcgcgggcccagagccctgcacaaacttttccttgttccgggatggggtagaggacaggtttgcaatgttgctgaggaaaggacagacatgacacagtggttagagctggaagcttgggtcttagagtgccagggccctggttgtaaacatgccaaacaaagaggtgacttcttcaaggtgaagcagaggcacagcccagatcagaacttggacttcctggcctacatgtggccacggatagaactatgaagttgcatcctccattccctcatccacgcaaaaattttcctttgcaatttggccactggaggtg

SEQ ID NO: 210466 - DNA, 1467 bp, Artificial Sequence
  derived and/or modified sequence
atgttcgccgccggcctggcccccttctacgccagcaacttcagcctgtggagcgccgcctactgcagcagcgccggccccggcggctgcagcttccccctggaccccgccgccgtgaagaagcccagcttctgcatcgccgacatcctgcacgccggcgtgggcgacctgggcgccgcccccgagggcctggccggcgccagcgccgccgccctgaccgcccacctgggcagcgtgcacccccacgccagcttccaggccgccgccagaagccccctgagacccacccccgtggtggcccccagcgaggtgcccgccggcttcccccagagactgagccccctgagcgccgcctaccaccaccaccacccccagcagcagcagcagcagcagcagccccagcagcagcagcccccccccccccccagagccggcgccctgcagccccccgccagcggcaccagagtggtgcccaacccccaccacagcggcagcgcccccgcccccagcagcaaggacctgaagttcggcatcgacagaatcctgagcgccgagttcgaccccaaggtgaaggagggcaacaccctgagagacctgaccagcctgctgaccggcggcagacccgccggcgtgcacctgagcggcctgcagcccagcgccggccagttcttcgccagcctggaccccatcaacgaggccagcgccatcctgagccccctgaacagcaaccccagaaacagcgtgcagcaccagttccaggacaccttccccggcccctacgccgtgctgaccaaggacaccatgccccagacctacaagagaaagagaagctggagcagagccgtgttcagcaacctgcagagaaagggcctggagaagagattcgagatccagaagtacgtgaccaagcccgacagaaagcagctggccgccatgctgggcctgaccgacgcccaggtgaaggtgtggttccagaacagaagaatgaagtggagacacagcaaggaggcccaggcccagaaggacaaggacaaggaggccggcgagaagcccagcggcggcgcccccgccgccgacggcgagcaggacgagagaagccccagcagaagcgagggcgaggccgagagcgagagcagcgacagcgagagcctggacatggcccccagcgacaccgagagaaccgagggcagcgagagaagcctgcaccagaccaccgtgatcaaggcccccgtgaccggcgccctgatcaccgccagcagcgccggcagcggcggcagcagcggcggcggcggcaacagcttcagcttcagcagcgccagcagcctgagcagcagcagcaccagcgccggctgcgccagcagcctgggcggcggcggcgccagcgagctgctgcccgccacccagcccaccgccagcagcgcccccaagagccccgagcccgcccagggcgccctgggctgcctgtag

SEQ ID NO: 210467 - DNA, 63 bp, Artificial Sequence
  derived and/or modified sequence
atcatgcccctgtacagcagcagcggggacaggacccccatcagcaagaaccccaccaagtag

SEQ ID NO: 210468 - DNA, 63 bp, Artificial Sequence
  derived and/or modified sequence
atcatgcccctgtacagcagcagcggcgaccggacccccatcagcaagaaccccactaagtag

SEQ ID NO: 210469 - protein, 74 aa, Artificial Sequence
  derived and/or modified sequence
MGRRSSKCCCIYEKPRAFGESSTESDEEEEEGCGHTHCVRGHRKGRRRATLGPTPTTPPQPPDPSQPPPGPMQH

SEQ ID NO: 210470 - protein, 126 aa, Artificial Sequence
  derived and/or modified sequence
MAEAGAGLSETVTETTVTVTTEPENRSLTIKLRKRKPEKKVEWTSDTVDNEHMGRRSSKCCCIYEKPRAFGESSTESDEEEEEGCGHTHCVRGHRKGRRRATLGPTPTTPPQPPDPSQPPPGPMQH

SEQ ID NO: 210471 - DNA, 381 bp, Artificial Sequence
  derived and/or modified sequence
atggccgaagctggagccggcctgagtgagactgtgactgagacgacagtaacggtaaccacggaaccagagaaccggagtctgaccataaagctgagaaaacggaagcctgaaaagaaagtcgaatggacatcggatacagtagataatgagcacatgggtaggcgctcatcaaagtgttgttgcatttacgaaaagcctagggccttcggcgaaagctcaacggagagtgatgaggaggaagaggaagggtgtggccatactcactgtgttcggggccacaggaagggtagacgcagagccacactcggtcctactcccactacacccccccagccacccgatcccagccagccaccccctgggccaatgcaacactag

SEQ ID NO: 210472 - DNA, 381 bp, Artificial Sequence
  derived and/or modified sequence
atggcggaagcgggcgccggcctcagtgaaaccgtcacggaaacgaccgtgacagtgacaactgagccggagaacaggtcgttaacaattaagctgaggaagcgtaaacctgagaagaaggtggagtggaccagtgatactgtggacaacgagcacatgggaaggaggagttcaaaatgctgttgcatctacgagaagccaagggccttcggcgaatcgtcaacggaatcagatgaggaggaggaagaggggtgtggccacactcactgtgtgagagggcatagaaaggggagacgtcgagccaccctgggacctactcctacaacacccccccagccaccagatccttcacagcccccccctgggccaatgcagcactag

SEQ ID NO: 210473 - DNA, 381 bp, Artificial Sequence
  derived and/or modified sequence
atggcggaggcaggagccgggctctcagagacagtaacagaaaccactgttacagtcacaactgagcctgaaaaccggagtctaaccattaaattgagaaagagaaagcctgagaagaaggtggagtggactagcgacactgttgacaatgagcatatgggaaggcgttcttctaagtgctgctgcatctacgaaaaaccgcgtgccttcggcgaatcaagcaccgagtcggacgaggaagaggaggaaggctgcgggcatacacactgtgtgaggggacaccgaaagggtaggcggagggctacacttggacctactcccacaacaccgccccagcctccggacccctctcaaccgcccccggggcctatgcagcattag

SEQ ID NO: 210474 - DNA, 381 bp, Artificial Sequence
  derived and/or modified sequence
atggccgaggccggagccggtctgtcagaaacagttactgaaactaccgtcactgtaacgaccgaacccgagaatcgatccctgacgattaaattgcgcaaacggaagccagaaaagaaggtggagtggacaagcgacacggtggataacgagcatatggggaggcggagttctaaatgttgttgcatatatgaaaagcccagagcattcggggaaagcagcacagaatccgacgaggaagaagaagagggctgtggccatacgcattgtgttcgcggtcatcgtaagggaaggcgtagggcgaccctcggccctacgccaacgacaccacctcagccacccgatcccagccaacccccacccggaccaatgcagcattag

SEQ ID NO: 210475 - DNA, 381 bp, Artificial Sequence
  derived and/or modified sequence
atggccgaggctggagccggtctctcagaaactgtgaccgaaacaactgtgaccgttacgacagaaccagaaaaccgcagcttaactataaagttgaggaaacgaaaacccgagaagaaggtcgagtggacctcagataccgtcgataacgagcatatgggccgaagatcttccaaatgctgttgtatttatgagaaaccaagagcctttggagaatcgagcacagagagcgatgaggaagaggaagagggttgtggccatactcactgcgttaggggacatcggaagggtcgaaggagagccactctcggtccaaccccaacaacacccccacaaccccctgatccatcccaacctcccccagggccaatgcaacactag

SEQ ID NO: 210476 - DNA, 381 bp, Artificial Sequence
  derived and/or modified sequence
atggccgaggctggcgccgggctcagcgaaaccgtgacagagacaaccgttaccgttacgacagaacccgagaaccggagcttgactattaagctgagaaagcgcaagccagaaaaaaaggttgagtggacatccgatacagtagataacgagcatatggggaggcgatcctcgaaatgttgctgcatatatgagaagccacgggcgtttggcgaaagcagtacagaaagcgacgaggaagaagaggagggttgtgggcacacccactgcgtgcgaggtcaccgcaagggtcggagacgtgctactctggggcctactcctactactcctccacagcctccagacccttctcaaccacctcctggcccaatgcagcattag

SEQ ID NO: 210477 - DNA, 381 bp, Artificial Sequence
  derived and/or modified sequence
atggccgaagccggggcaggactgagtgaaacggtgaccgaaaccacagttaccgtcactactgagcctgagaacagaagcctgactatcaagctgcggaagagaaagcctgagaagaaagttgaatggacctctgacaccgtggacaacgaacacatgggacggcggtcctctaaatgctgttgtatctatgagaaaccgcgagcctttggtgagtctagcacagagagcgacgaagaggaggaagagggatgcggccatacccattgtgtacggggccaccggaagggcaggcggcgggcaacacttggacccacaccgacgacccctcctcaaccccctgacccctcccagcccccccccggccccatgcagcactag

SEQ ID NO: 210478 - DNA, 381 bp, Artificial Sequence
  derived and/or modified sequence
atggccgaggctggcgctgggctttccgaaactgtgaccgaaaccaccgttacggtgacaactgagccagagaacagaagcctgactataaagcttagaaagaggaagcctgaaaaaaaagttgaatggacctctgacacagttgacaatgagcacatgggcagaaggtcaagtaagtgctgttgcatatacgagaagccccgggcttttggcgagtcaagcacggaaagcgatgaagaggaggaagaggggtgcggacatacgcactgcgtgaggggccatcgaaagggccggcgccgggctacgcttggcccaacccccactactcccccacagccacctgaccccagtcagcccccccctggccctatgcagcactag

SEQ ID NO: 210479 - DNA, 381 bp, Artificial Sequence
  derived and/or modified sequence
atggccgaggccggggccggcctgtctgaaacagtgacagagaccaccgtgacagtgaccacagagcctgagaacagaagcctgaccatcaagctgaggaagaggaagccagagaagaaggtggagtggaccagtgacacagtggacaatgagcacatgggcagaagaagcagcaagtgctgctgcatctatgagaagccccgggccttcggggagagcagcacagaaagtgatgaggaggaggaggagggctgcggccacacccactgtgtgcggggccacaggaagggcagaagaagagccaccctgggccccacccccaccaccccaccccagcccccagaccccagccagcccccacctggccccatgcagcactag

SEQ ID NO: 210480 - DNA, 381 bp, Artificial Sequence
  derived and/or modified sequence
atggccgaggccggcgccggcctgagcgagaccgtgaccgagaccaccgttactgtaacaacggagcccgagaatcgcagtctcacaattaaactgcgcaaacgaaagccagagaaaaaagtagagtggactagcgatacggtggacaatgaacatatgggcagaagaagcagtaagtgctgttgtatttatgagaagccgagagcttttggcgagtcttccaccgaatcagatgaagaggaagaagaagggtgcggacacactcactgcgtgcggggacacagaaagggccggaggcgtgcaactctaggaccaacacccacaacacccccccagcctcctgacccttctcaaccccctccaggccctatgcaacactag

SEQ ID NO: 210481 - DNA, 381 bp, Artificial Sequence
  derived and/or modified sequence
atggccgaggccggcgccggcctgagcgagaccgtgaccgagaccactgtgacagtgactacagaacctgaaaaccgtagcctgaccattaagctccggaaaagaaagccagagaagaaggtcgaatggacctcggatacggtcgataacgaacacatggggaggaggtcttctaaatgctgctgtatttatgagaagccacgcgctttcggtgaatcctccaccgaaagcgatgaggaggaggaagagggctgcggccatactcactgcgtgcgaggacaccggaaaggacggaggcgggcaacactgggccccactcccacaactcccccccaaccgcctgatccttctcagcctccacctgggccaatgcaacactag

SEQ ID NO: 210482 - DNA, 381 bp, Artificial Sequence
  derived and/or modified sequence
atggccgaggccggcgccggcctgagcgagaccgtgaccgagaccactgtgactgtcactacggagccagaaaacaggagtctcaccattaaactgagaaaaagaaagcctgaaaaaaaagtagagtggacgtctgacaccgtagataacgaacacatgggtcggagaagctcaaaatgctgttgtatctatgagaagcctcgggccttcggagaaagcagcacagagagtgacgaggaggaagaggagggatgtggtcacacccattgcgtcagaggccataggaaaggccggcgccgcgcgactctgggccctacacccaccacacccccacagccaccagacccatctcagcctccccccggccctatgcagcactag

SEQ ID NO: 210483 - DNA, 381 bp, Artificial Sequence
  derived and/or modified sequence
atggccgaggccggcgccggcctgagcgagaccgtgaccgagaccactgtgaccgtcacgactgaaccagagaatcgcagtttaacaatcaagctaagaaagagaaaacccgaaaagaaggtggaatggacttccgacacggtagacaacgaacacatgggcaggcgaagctccaaatgctgctgtatatacgaaaagccccgagccttcggagaatcctctaccgagtctgatgaagaggaggaggagggatgtgggcatactcactgcgtccgcggccaccggaaagggagacgcagggctacgttggggcccacacccactacccccccccagcccccggaccccagccagccaccccccgggccaatgcagcactag

SEQ ID NO: 210484 - DNA, 381 bp, Artificial Sequence
  derived and/or modified sequence
atggccgaggccggcgccggcctgagcgagaccgtgaccgagaccactgttacagttacaacagagccagagaaccggtcgttaacaattaagttgaggaagcgcaaaccagagaaaaaggtggagtggacctctgacaccgtggacaatgaacatatgggccggcggtcctctaaatgttgttgcatctatgaaaaaccacgcgcttttggcgagtcatccaccgagagtgatgaggaggaggaagagggatgtggccacactcactgcgtgagagggcatcggaaggggcggcggcgtgctactctgggtccgaccccaactacacccccccagcctcccgacccttctcaacctccccctggaccaatgcagcactag

SEQ ID NO: 210485 - DNA, 381 bp, Artificial Sequence
  derived and/or modified sequence
atggccgaggccggcgccggcctgagcgagaccgtgaccgagaccactgtgacggtgaccaccgagccagagaatcgctccttgactatcaagcttcggaaaagaaagccggagaagaaggtcgagtggacttctgatacagtcgacaacgagcatatggggcgccgaagtagcaaatgttgctgcatttacgagaagcctcgcgcgtttggagagagcagcaccgagagcgacgaggaggaggaagagggctgtgggcatactcattgcgtccgcgggcaccggaaaggcaggcgccgggcgactctggggcccaccccaacaactccaccacagccacccgaccccagtcagcctccccctgggccaatgcagcattag

SEQ ID NO: 210486 - DNA, 381 bp, Artificial Sequence
  derived and/or modified sequence
atggccgaggccggcgccggcctgagcgagaccgtgaccgagaccacagtgacggtgacaactgaacccgagaatcggtccctgacgatcaaattacgtaagcgcaagcctgaaaagaaggtcgagtggactagcgacacagtcgataacgagcacatgggaagacgcagctcgaagtgctgctgtatttacgaaaagcccagggctttcggtgagagctctaccgaaagtgacgaagaggaagaggaggggtgtggacacacgcattgcgttcgcgggcacaggaaaggccgaagacgggccacgctgggcccaacacctaccactcccccccagcccccagaccctagtcaaccccccccagggcctatgcagcactag

SEQ ID NO: 210487 - DNA, 381 bp, Artificial Sequence
  derived and/or modified sequence
atggccgaggccggcgccggcctgagcgagaccgtgaccgagaccaccgttacagtaactactgaacctgagaatcggtcattgacaatcaaacttcgcaaaaggaagccagaaaaaaaagttgagtggacctcggataccgtggataatgaacatatgggacgtcggagcagtaaatgttgttgcatttacgaaaagcccagggccttcggtgaatctagcacagaatcagacgaggaggaagaagaggggtgcggacatacccactgcgtgcggggtcaccgcaaaggcagacgacgtgctaccctaggtcctaccccaaccacacctccccagccccccgatccctcgcagcctccacctggccccatgcagcattag

SEQ ID NO: 210488 - DNA, 381 bp, Artificial Sequence
  derived and/or modified sequence
atggctgaggccggagcaggactgtcagaaactgtcacagagaccaccgttaccgtcactaccgagcccgagaatcggagccttaccattaaactgcgcaagcgaaaacccgagaagaaagttgagtggacgtctgacaccgttgacaacgaacacatgggaagaaggtcttctaaatgctgctgcatttacgaaaagccgagagcattcggagaatcctccactgaaagtgacgaggaagaagaggaaggctgcggacacacccactgcgttagaggacacaggaaggggaggagaagagctaccttaggacctacacctacgacgccccctcaacccccagatccatctcaaccacctcccggtcctatgcagcattag

SEQ ID NO: 210489 - DNA, 381 bp, Artificial Sequence
  derived and/or modified sequence
atggccgaggcgggagcgggactgtccgagactgtcacagagaccaccgtcactgttaccacagagcctgaaaaccgcagtctgaccataaaactgcgcaagcggaaacctgagaagaaggtggagtggaccagcgacactgtcgacaacgaacatatggggagaaggagctctaaatgctgttgtatctatgagaagccaagagctttcggcgagagttccaccgaatcagatgaagaggaggaggagggttgcgggcacactcactgtgtccggggacatcgcaagggtaggaggcgcgcaactctggggcctacaccaacaaccccaccccagccaccagacccctctcagcctccccctggaccaatgcaacactag

SEQ ID NO: 210490 - DNA, 381 bp, Artificial Sequence
  derived and/or modified sequence
atggcggaagctggcgcagggctgagcgagaccgtgactgagacaacggtcaccgtcacaacggaacctgagaataggtctctgacaattaaactgcgcaagcgtaagcccgagaagaaagtcgaatggacatctgacactgtggataacgaacacatggggcgaaggtcatccaaatgttgctgcatttacgaaaaacccagagccttcggcgaatctagtaccgaaagcgatgaagaggaggaggaagggtgcgggcacacacactgcgtcaggggacacagaaaagggcgacgaagagcaacactcgggccaacccccactaccccaccacagcctccagatccttctcaaccacctcccggtcccatgcagcattag

SEQ ID NO: 210491 - DNA, 381 bp, Artificial Sequence
  derived and/or modified sequence
atggcagaggccggtgctggcttaagcgagacggtgacagaaactaccgtgactgttacaactgaaccggagaaccgctcccttacgattaaactgcgcaagaggaagcccgagaagaaggtggaatggacttcagacaccgtagataatgaacacatggggagaagatcatccaagtgctgctgtatctacgaaaaaccacgggctttcggggagagttctacggaatccgacgaggaggaagaagaaggatgcggccacactcactgtgttcgaggtcaccgcaaaggccgaagaagggctacattgggacccactccaactacgccaccacagcctccggatccttcccagcccccaccaggacccatgcagcattag

SEQ ID NO: 210492 - DNA, 381 bp, Artificial Sequence
  derived and/or modified sequence
atggccgaggctggagccggactgtccgagaccgttaccgagactactgtaacagtgacgacagagccagagaaccgcagcctgaccatcaagctcaggaaaaggaagccagaaaaaaaggtcgagtggacttctgacaccgttgacaacgaacatatgggcaggcggtcttcaaaatgctgttgcatctacgagaaacctcgtgcctttggcgagtcatctaccgagagtgacgaggaagaagaggaaggatgcggacacacccattgcgtgcgcggtcaccgcaagggcagacggagggctaccctgggcccaacaccaacaaccccccctcagccccctgacccctcccagcctcccccaggcccaatgcagcactag

SEQ ID NO: 210493 - DNA, 381 bp, Artificial Sequence
  derived and/or modified sequence
atggctgaggcaggcgcaggactgtccgaaaccgttacagaaaccactgtgaccgtgacaacagaaccagagaacaggagtctgacaatcaagttgcgcaaacgcaagccagagaagaaggtggaatggacctctgacaccgtcgacaacgaacacatgggcagacggagttcaaagtgttgttgtatctatgagaagccgagggccttcggagaatcttctacagagtcggacgaggaagaggaagagggctgtgggcatacacactgcgtccgcggtcacagaaagggccgtaggcgtgcgactctcggccctacgcctaccactccccctcagcccccagacccaagccagcccccacctggccctatgcagcactag

SEQ ID NO: 210494 - DNA, 381 bp, Artificial Sequence
  derived and/or modified sequence
atggcggaggccggagctggcctatccgagaccgtgacggagacaactgtgaccgtaacaacagagcccgagaaccgcagtctcactataaaactcaggaagagaaagcctgagaagaaggtggagtggaccagcgatacggtagacaatgagcatatgggcaggaggtccagcaagtgctgctgcatatacgagaagccacgtgcgtttggagagtctagcacagagtctgacgaggaggaagaggaaggatgtggtcacacacattgcgtacgcggtcataggaaggggcgtcggcgtgcgaccttgggcccaacaccgactacccccccacagccacctgatccatctcagccaccaccaggcccaatgcaacattag

SEQ ID NO: 210495 - DNA, 381 bp, Artificial Sequence
  derived and/or modified sequence
atggccgaagccggagccggattgtctgaaaccgtgacagagacaacagtgacagttacaaccgaacctgagaatcggagcctgaccattaaattgaggaaacggaaacctgaaaagaaggttgagtggacatccgacaccgtagacaatgaacatatgggcaggcggtctagtaagtgctgttgcatctacgagaaacctagggctttcggagaaagtagtacagagtcagacgaggaagaagaggagggctgtggccacactcactgtgtacgcggtcacaggaaaggcaggcgacgggctaccctgggacccactccaacaaccccccctcaaccccctgacccctctcagcctcctcccggacccatgcaacactag

SEQ ID NO: 210496 - DNA, 1731 bp, Artificial Sequence
  derived and/or modified sequence
ctttctttcagcgcctgcgcgctgtcacgttacggcggaactaatccagcgacgcctgcgctttgacgcatttggtgccgtggaagggaaaaagggggactgcagtatgcgtcacacccggaagcggcgagccggaagtggggttagccaggttatccccaggggtggagaagcggaggcccaggaggagggggaataaagaaggtggaggatcctggctaccactctgaatccgataccgcttctcttagacctcagcgacagaaaaagggaagggtgtctcatcccccttcctcctctcctccctgtcctgagccttagccatggccgaggcaggggctgggctgagcgagaccgtcactgagacaacggttaccgtgacaaccgagcccgagaaccggagccttaccatcaaacttcggaaacggaagccagagaaaaaggtagaatggacaagtgacactgtggacaatgaacacatgggccgccgctcatccaaatgctgctgtatttatgagaaacctcgggcctttggcgagagctccacggaaagtgatgaggaggaagaagagggctgtggtcatacacactgtgtacgtggccaccgcaaaggacggcgtcgtgcaaccctaggaccgacccccaccacccctccccagcctcctgacccttcccagccccctccagggccaatgcagcactaaatccctctctcctccagcattcctgtgtctgtctggccctaaatgtatccatgtggctacttctccagccccctccttccctctcttctgcctgatagagggaagaggaagaggaggacgaacagagatcctgaaattctgacttgctgctattccagaacccagcctcctgggtttccccagtcctcatttttcctcccaatacccacccttctctctcgagggatctaggcaccttggtcccagtgtcttccttttgttctcactgccaaactgcctgtcctgggatctagttatcttggccctgcactctcaacatgagtagcgaacacttaaattgggttttcaacagtcccagctttcactgccagggtcccagtcagattccaggaatttgcgccctaactttgcttgctaatcctggtttagagctatcccactaaaatatttaatcctaattcttagtccttgcctgtgagatatgaggtcttacaggagacctcagagctcccagcccttctcctcctgctaacccttctcacaccctcaagaggagttagaaaagaggtccttgtcattctcacctcttatggaaaatggaataagaaataatcatatcctttcttcccacccttctcctgttatttaggatttctgacaaagctggcttgagattggtcacttagagccgactgtctcctctgccttttgtttttcagcttcagagacagatccaatatagtcccagggacctgggtctctgggagaggaaggaagagggagggagcaaagagattggggtatgtcccctgtagtacactcttacctcttacttcctagactttgatttctccggcagcccagatgttcagttctcttggcccctctctaccccttactgggatccggttttcattttccggtccttttgccatacacagttacagagatcagtcaaatccataccaccactgagatctcatttattgccacagatgcacaaaataaataacccaaaatcacaaaa

SEQ ID NO: 210497 - DNA, 1731 bp, Artificial Sequence
  derived and/or modified sequence
ctttctttcagcgcctgcgcgctgtcacgttacggcggaactaatccagcgacgcctgcgctttgacgcatttggtgccgtggaagggaaaaagggggactgcagtatgcgtcacacccggaagcggcgagccggaagtggggttagccaggttatccccaggggtggagaagcggaggcccaggaggagggggaataaagaaggtggaggatcctggctaccactctgaatccgataccgcttctcttagacctcagcgacagaaaaagggaagggtgtctcatcccccttcctcctctcctccctgtcctgagccttagccatggccgaggcaggggctgggctgagcgagaccgtcactgagacaacggttaccgtgacaaccgagcccgagaaccggagccttaccatcaaacttcggaaacggaagccagagaaaaaggtagaatggacaagtgacactgtggacaatgaacacatgggccgccgctcatcaaaatgctgctgtatttatgagaaacctcgggcctttggcgagagctccacggaaagtgatgaggaggaagaagagggctgtggtcatacacactgtgtacgtggccaccgcaaaggacggcgtcgtgcaaccctaggaccgacccccaccacccctccccagcctcctgacccttcccagccccctccagggccaatgcagcactaaatccctctctcctccagcattcctgtgtctgtctggccctaaatgtatccatgtggctacttctccagccccctccttccctctcttctgcctgatagagggaagaggaagaggaggacgaacagagatcctgaaattctgacttgctgctattccagaacccagcctcctgggtttccccagtcctcatttttcctcccaatacccacccttctctctcgagggatctaggcaccttggtcccagtgtcttccttttgttctcactgccaaactgcctgtcctgggatctagttatcttggccctgcactctcaacatgagtagcgaacacttaaattgggttttcaacagtcccagctttcactgccagggtcccagtcagattccaggaatttgcgccctaactttgcttgctaatcctggtttagagctatcccactaaaatatttaatcctaattcttagtccttgcctgtgagatatgaggtcttacaggagacctcagagctcccagcccttctcctcctgctaacccttctcacaccctcaagaggagttagaaaagaggtccttgttattctcacctcttatggaaaatggaacaagaaataatcatatcctttcttcccacccttctcctgttatttaggatttctgacaaagctggcttgagattggtcacttagagccgactgtctcctctgccttttgtttttcagcttcagagacagatccaatatagtcccagggacctgggtctctgggagaggaaggaagagggagggagcaaagagattggggtatgtcccctgtagtacactctttcctcttacttcctagactttgatttctccggcagcccagatgttcagttctcttggcccctctctaccccttactgggatctggttttcattttccggtccttttgccatacacagttacagagatcagtcaaatccataccaccactgagatctcatttattgccacagatgcacaaaataaataacccaaaatcacaaaa

SEQ ID NO: 210498 - DNA, 1614 bp, Artificial Sequence
  derived and/or modified sequence
ccggaagcggcgagccggaagtggggttagccaggttatccccaggggtggagaagcggaggcccaggaggagggggaataaagaaggtggaggatcctggctaccaatctgaatccgataccgcttctcttagacctcagcgacagaaaaagggaagggtgtctcatcccccttcctcctctcctccctgtcctgagccttagccatggccgaggcaggggctgggctgagcgagaccgtcactgagacaacggttaccgtgacaaccgagcccgagaaccggagccttaccatcaaacttcggaaacggaagccagagaaaaaggtagaatggacaagtgacactgtggacaatgaacacatgggccgccgctcatccaaatgctgctgtatttatgagaaacctcgggcctttggcgagagctccacggaaagtgatgaggaggaagaagagggctgtggtcatacacactgtgtacgtggccaccgcaaaggacggcgtcgtgcaaccctaggaccgacccccaccacccctccccagcctcctgacccttcccagccccctccagggccaatgcagcactaaatccctctctcctccagcattcctgtgtctgtctggccctaaatgtatccatgtggctacttctccagccccctccttccctctcttctgcctgatagagggaagaggaagaggaggacgaacagagatcctgaaattctgacttgctgctattccagaacccagcctcctgggtttccccagtcctcatttttcctcccaatacccacccttctctctcgagggatctaggcaccttggtcccagtgtcttccttttgttctcactgccaaactgcctgtcctgggatctagttatcttggccctgcactctcaacatgagtagcgaacacttaaattgggttttcaacagtcccagctttcactgccagggtcccagtcagattccaggaatttgcgccctaactttgcttgctaatcctggtttagagctatcccactaaaatatttaatcctaattcttagtccttgcctgtgagatatgaggtcttacaggagacctcagagctcccagcccttctcctcctgctaacccttctcacaccctcaagaggagttagaaaagaggtccttgtcattctcacctcttatggaaaatggaataagaaataatcatatcctttcttcccacccttctcctgttatttaggatttctgacaaagctggcttgagattggtcacttagagccgactgtctcctctgccttttgtttttcagcttcagagacagatccaatatagtcccagggacctgggtctctgggagaggaaggaagagggagggagcaaagagattggggtatgtcccctgtagtacactcttacctcttacttcctagactttgatttctccggcagcccagatgttcagttctcttggcccctctctaccccttactgggatctggttttcattttccggtccttttgccatacacagttacagagatcagtcaaatccataccaccactgagatctcatttattgccacagatgcacaaaataaataacccaaaatcacaaaa

SEQ ID NO: 210499 - DNA, 1607 bp, Artificial Sequence
  derived and/or modified sequence
cggcgagccggaagtggggttagccaggttatccccaggggtggagaagcggaggcccaggaggagggggaataaagaaggtggaggatcctggctaccactctgaatccgataccgcttctcttagacctcagcgacagaaaaagggaagggtgtctcatcccccttcctcctctcctccctgtcctgagccttagccatggccgaggcaggggctgggctgagcgagaccgtcactgagacaacggttaccgtgacaaccgagcccgagaaccggagccttaccatcaaacttcggaaacggaagccagagaaaaaggtagaatggacaagtgacactgtggacaatgaacacatgggccgccgctcatccaaatgctgctgtatttatgagaaacctcgggcctttggcgagagctccacggaaagtgatgaggaggaagaagagggctgtggtcatacacactgtgtacgtggccaccgcaaaggacggcgtcgtgcaaccctaggaccgacccccaccacccctccccagcctcctgacccttcccagccccctccagggccaatgcagcactaaatccctctctcctccagcattcctgtgtctgtctggccctaaatgtatccatgtggctacttctccagccccctccttccctctcttctgcctgatagagggaagaggaagaggaggacgaacagagatcctgaaattctgacttgctgctattccagaacccagcctcctgggtttccccagtcctcatttttcctcccaatacccacccttctctctcgagggatctaggcaccttggtcccagtgtcttccttttgttctcactgctaaactgcctgtcctgggatctagttatcttggccctgcactctcaacatgagtagcgaacacttaaattgggttttcaacagtcccagctttcactgccagggtcccagtcagattccaggaatttgcgccctaactttgcttgctaatcctggtttagagctatcccactaaaatatttaatcctaattcttagtccttgcctgtgagatatgaggtcttacaggagacctcagagctcccagcccttctcctcctgctaaaccttctcacaccctcaagaggagttagaaaagaggtccttgtcattctcacctcttatggaaaatggaataagaaataatcatatcctttcttcccacccttctcctgttatttaggatttctgacaaagctggcttgagattggtcacttagagccgactgtctcctctgccttttgtttttcagcttcagagacagatccaatatagtcccagggacctgggtctctgggagaggaaggaagagggagggagcaaagagattggggtatgtcccctgtagtacactcttacctcttacttcctagactttgatttctccggcagcccagatgttcagttctcttggcccctctctaccccttactgggatctggttttcattttccggtccttttgccatacacagttacagagatcagtcaaatccataccaccactgagatctcatttattgccacagatgcacaaaataaataacccaaaatcacaaaa

SEQ ID NO: 210500 - DNA, 1731 bp, Artificial Sequence
  derived and/or modified sequence
ctttctttcagcgcctgcgcgctgtcacgttacggcggaactaatccagcgacgcctgcgctttgacgcatttggtgccgtggaagggaaaaagggggactgcagtatgcgtcacacccggaagcggcgagccggaagtggggttagccaggttatccccaggggtggagaagcggaggcccaggaggagggggaataaagaaggtggaggatcctggctaccactctgaatccgataccgcttctcttagacctcagcgacagaaaaagggaagggtgtctcatcccccttcctcctctcctccctgtcctgagccttagccatggccgaggcaggggctgggctgagcgagaccgtcactgagacaacggttaccgtgacaaccgagcccgagaaccggagccttaccatcaaacttcggaaacggaagccagagaaaaaggtagaatggacaagtgacactgtggacaatgaacacatgggccgccgctcatccaaatgctgctgtatttatgagaaacctcgggcctttggcgagagctccacggaaagtgatgaggaggaagaagagggctgtggtcatacacactgtgtacgtggccaccgcaaaggacggcgtcgtgcaaccctaggaccgacccccaccacccctccccagcctcctgacccttcccagccccctccagggccaatgcagcactaaatccctctctcctccagcattcctgtgtctgtctggccctaaatgtatccatgtggctacttctccagccccctccttccctctcttctgcctgatagagggaagaggaagaggaggacgaacagagatcctgaaattctgacttgctgctattccagaacccagcctcctgggtttccccagtcctcatttttcctcccaatacccacccttctctctcgagggatctaggcaccttggtcccagtgtcttccttttgttctcactgccaaactgcctgtcctgggatctagttatcttggccctgcactctcaacatgagtagcgaacacttaaattgggttttcaacagtcccagctttcactgccagggtcccagtcagattccaggaatttgcgccctaactttgcttgctaatcctggtttagagctatcccactaaaatatttaatcctaattcttagtccttgcctgtgagatatgaggtcttacaggagacctcagagctcccagcccttctcctcctgctaacccttctcacaccctcaagaggagttagaaaagaggtccttgtcattctcacctcttatggaaaatggaataagaaataatcatatcctttcttcccacccttctcctgttatttaggatttctgacaaagctggcttgagattggtcacttagagccgactgtctcctctgccttttgtttttcagcttcagagacagatccaatatagtcccagggacctgggtctctgggagaggaaggaagagggagggagcaaagagattggggtatgtcccctgtagtacactcttacctcttacttcctagactttgatttctccggcagcccagatgttcagttctcttggcccctctctaccccttactgggatctggttttcattttccggtccttttgccatacacagttacagagatcagtcaaatccataccaccactgagatctcatttattgccacagatgcacaaaataaataacccaaaatcacaaaa

SEQ ID NO: 210501 - DNA, 381 bp, Artificial Sequence
  derived and/or modified sequence
atggccgaggccggcgccggcctgagcgagaccgtgaccgagaccaccgtgaccgtgaccaccgagcccgagaacagaagcctgaccatcaagctgagaaagagaaagcccgagaagaaggtggagtggaccagcgacaccgtggacaacgagcacatgggcagaagaagcagcaagtgctgctgcatctacgagaagcccagagccttcggcgagagcagcaccgagagcgacgaggaggaggaggagggctgcggccacacccactgcgtgagaggccacagaaagggcagaagaagagccaccctgggccccacccccaccacccccccccagccccccgaccccagccagcccccccccggccccatgcagcactag

SEQ ID NO: 210502 - protein, 411 aa, Artificial Sequence
  derived and/or modified sequence
MERMSDSADKPIDNDAEGVWSPDIEQSFQEALAIYPPCGRRKIILSDEGKMYGRNELIARYIKLRTGKTRTRKQVSSHIQVLARRKSRDFHSKLKDQTAKDKALQHMAAMSSAQIVSATAIHNKLGLPGIPRPTFPGAPGFWPGMIQTGQPGSSQDVKPFVQQAYPIQPAVTAPIPGFEPASAPAPSVPAWQGRSIGTTKLRLVEFSAFLEQQRDPDSYNKHLFVHIGHANHSYSDPLLESVDIRQIYDKFPEKKGGLKELFGKGPQNAFFLVKFWADLNCNIQDDAGAFYGVTSQYESSENMTVTCSTKVCSFGKQVVEKVETEYARFENGRFVYRINRSPMCEYMINFIHKLKHLPEKYMMNSVLENFTILLVVTNRDTQETLLCMACVFEVSNSEHGAQHHIYRLVKD

SEQ ID NO: 210503 - protein, 426 aa, Artificial Sequence
  derived and/or modified sequence
IEPSSWSGSESPAENMERMSDSADKPIDNDAEGVWSPDIEQSFQEALAIYPPCGRRKIILSDEGKMYGRNELIARYIKLRTGKTRTRKQVSSHIQVLARRKSRDFHSKLKDQTAKDKALQHMAAMSSAQIVSATAIHNKLGLPGIPRPTFPGAPGFWPGMIQTGQPGSSQDVKPFVQQAYPIQPAVTAPIPGFEPASAPAPSVPAWQGRSIGTTKLRLVEFSAFLEQQRDPDSYNKHLFVHIGHANHSYSDPLLESVDIRQIYDKFPEKKGGLKELFGKGPQNAFFLVKFWADLNCNIQDDAGAFYGVTSQYESSENMTVTCSTKVCSFGKQVVEKVETEYARFENGRFVYRINRSPMCEYMINFIHKLKHLPEKYMMNSVLENFTILLVVTNRDTQETLLCMACVFEVSNSEHGAQHHIYRLVKD

SEQ ID NO: 210504 - protein, 330 aa, Artificial Sequence
  derived and/or modified sequence
MRYVLSWCVTVTFKDQTAKDKALQHMAAMSSAQIVSATAIHNKLGLPGIPRPTFPGAPGFWPGMIQTGQPGSSQDVKPFVQQAYPIQPAVTAPIPGFEPASAPAPSVPAWQGRSIGTTKLRLVEFSAFLEQQRDPDSYNKHLFVHIGHANHSYSDPLLESVDIRQIYDKFPEKKGGLKELFGKGPQNAFFLVKFWADLNCNIQDDAGAFYGVTSQYESSENMTVTCSTKVCSFGKQVVEKVETEYARFENGRFVYRINRSPMCEYMINFIHKLKHLPEKYMMNSVLENFTILLVVTNRDTQETLLCMACVFEVSNSEHGAQHHIYRLVKD

SEQ ID NO: 210505 - protein, 68 aa, Artificial Sequence
  derived and/or modified sequence
IEPSSWSGSESPAENMERMSDSADKPIDNDAEGVWSPDIEQSFQEALAIYPPCGRRKIILSDEGKMYG

SEQ ID NO: 210506 - DNA, 9448 bp, Artificial Sequence
  derived and/or modified sequence
ttccgaacattcttagcatcgctcgcgccgcgccgcgccgcctgagccgagccgagcctctgctgccgccgccgcggccccgccgcccgccgcgggcgcccaccaagcactttgcagactcgcttccaccctgcgggccattccgcgcggcggggcccgggcccggggcggccgcgtccaggcacaggccatgcagtgacgcccccccacccctccacctttgcccggagcgcgggcagcagcccagcgcgccagccggccccggggcaggagcggtgctaggcaggggtggggtggccgggcccagggaccgggagccggggagggagccgggcaccgagcagagggcgggggaagcggcgccgaagtttgcctcggactcgccgggcgctgcggtggctccctgggccgaggactgttgctgccgctgccgccgccgcttcattgcacattcaagtggaaaattttcaggagtcagcagaaacattgtgtccaaaaaagactgagtcgcagttaccaccaaacccaggaggagactctccctggaaaacttcccttccctttcggtttattttcttgaaaaggctccaggcttcggcttggaaaatcccaccgccaaaattgagcccagcagctggagcggcagtgagagccctgccgaaaacatggaaaggatgagtgactctgcagataagccaattgacaatgatgcagaaggggtctggagccccgacatcgagcaaagctttcaggaggccctggctatctatccaccatgtgggaggaggaaaatcatcttatcagacgaaggcaaaatgtatggtaggaatgaattgatagccagatacatcaaactcaggacaggcaagacgaggaccagaaaacaggtgtctagtcacattcaggttcttgccagaaggaaatctcgtgattttcattccaagctaaaggatcagactgcaaaggataaggccctgcagcacatggcggccatgtcctcagcccagatcgtctcggccactgccattcataacaagctggggctgcctgggattccacgcccgaccttcccaggggcgccggggttctggccgggaatgattcaaacagggcagccaggatcctcacaagacgtcaagccttttgtgcagcaggcctaccccatccagccagcggtcacagcccccattccagggtttgagcctgcatcggccccagctccctcagtccctgcctggcaaggtcgctccattggcacaaccaagcttcgcctggtggaattttcagcttttctcgagcagcagcgagacccagactcgtacaacaaacacctcttcgtgcacattgggcatgccaaccattcttacagtgacccattgcttgaatcagtggacattcgtcagatttatgacaaatttcctgaaaagaaaggtggcttaaaggaactgtttggaaagggccctcaaaatgccttcttcctcgtaaaattctgggctgatttaaactgcaatattcaagatgatgctggggctttttatggtgtaaccagtcagtacgagagttctgaaaatatgacagtcacctgttccaccaaagtttgctcctttgggaagcaagtagtagaaaaagtagagacggagtatgcaaggtttgagaatggccgatttgtataccgaataaaccgctccccaatgtgtgaatatatgatcaacttcatccacaagctcaaacacttaccagagaaatatatgatgaacagtgttttggaaaacttcacaattttattggtggtaacaaacagggatacacaagaaactctactctgcatggcctgtgtgtttgaagtttcaaatagtgaacacggagcacaacatcatatttacaggcttgtaaaggactgaacatggttatttatatatatagatatctgtatatacacacacacatatgtgcacacacacactctctctccattatcgaacgactgactgtaaacctcaccacacagggtggtgccctggccccgaggtcaccccgacttttctaaatcttgtttgagtgaagtcattttttcatgtgttcatactatcattgtagctgtgaagttctggtacagttgtaaaaagagaaattgagttgtttctctatgttcttcagatgtgcagcccacaattcctcgggaaaggtgaacctgaacaacccaagtctctctctgcagagccctgtttctaattgtggtagaaaatattgagacagagcatttgccatgggacatttacagcctttatacaaatgtatttagttctcttttttccaacataaaattcttgttttaagatacaagtaaaattaatctttaaatataaatgtaaattagtacacaaaactaagaatctttagacttatctttgtaactaattagggtggaagttatgaaagaatgtaattcactaaattattttttaaatgaaacctttttttttctttttgaaaccaaatgttaaactatagccttaagaaatgcttggtagaagtgtcctaatgagacaaatttgtacttttatcctcaaggttaacactaatctcctaatccattaaactcttgaacaggtattacaaaggaagaaaacttcaccccttatccttaacatatatagtatatttaaaaaatataaaattgtattgtactaatgtgatgatggattatttaatgaaaaagaaaaaatggctctttttgcaataagtagatacatactgaaaaaatctaaacttacaatgtttatagtcttgtgtgtgcagttatattttatatggacgaccaaattttttattaagatgagtaaatatttgaaccactgaattttaataacaaaattttaaaattggcatgaatacggaatactgcactgtgagatgcaaagtatacagaatctgtggctgggagaaaatttcatcaaatagacaagtaaaaggctcatcagttttagcatctctgctccccagaaaattgtaagcatcctcaccagcctgtggatacattctttatttctagtgacccaatatgcatattaacctgctataactagggctatatgtgtaggtatgtgtatacatatacacaaatgcacatatagagttaacacatttagtgaacacttgtttagtgtcactcagtttgctaggtgctgatatgtacgtatatctcaatgtgtctgtagacttagatacatcctcttgaagcacatccatttctttagcgtctctcagtaagttacagtacttgtttgacttaggtttaagaggcccagctacctatctctgaccttttcaaataggctcatttgggagattcttttgccaggagagattcaactttccaatctaagtattccagagcattgcccaggcagagttggtttgatgtggccagatgttttgagttatttcccttaagtgtttcactggggagagaacagggagtgctcctccagcttcccaaagaaatatgtttttgtaagtggtaggaacatgtgcacacaatagaacatgaaataagttttttaacttgtaaaacatgtcaagatttttccaccaagctagaaaataaaaaacttagttctaccacatccaattaacttacacacccccttccctgtctcaacacctgctttgaccctgcttttctattattacatcagtcagcatcttgtggtccctaacatgaggatgtggctggctcgtgggaaacagcaaaacactaagcctgacctctcccaaattgggaagaccagaggagaaagtgcaaaactgtccccatttggaatgcccattccttctagaaaccagttggacagtgctcctctgcccttcataaacagactactgttgggtccctgattccaggctggcctgtgaaggattgccccaggtgtcccctttcacggttgtcacatttacagtgacttctgttgaacacccctcttagggatgtttcttttgctcttatttcctgcatctttccttaagggaagccccatcctctcccaggaccaggagtttatgaccaggcgagcacaaatggctaaaagccaagctgtcctagaacttcagtgggagagctgtctggttcatattctacccaggaatggtacttttcagtgcagccaggagggctcttgggatttcctttccaaagcacaaaaatactgggacccaagaagaacagctagaggacaactctgttggcacagagacggggacagcccagtctgctgacctcacagggtcagctgggcccccctggtgcttcaccacctgcatcctcttgctcagaatgcctttgcagttgagttttctgggtttctatgattgaccttgaggtttactccttgctcttacaacatttctaaggatttttaaaagtttacttcttgtcttgttcttctaaagctttctccaggacagatattttccctgtcttaaccactggtccagtcatcccagtgggcttctctttgtctctcccagattagacctttgggtgagattggcatcacaacatctaatctgagtctgtcttttgtccttcattctgtatggcagtctccctttgttataaaagctttctaaagcatactaaagaagccttcccagagccccgtcttgcttctcttccaggtgctctatcccctcgagaccctctggtgccaggcttgcttcacggccatcttgtgttgtcactgcagagtttggaggccagttttccacagcctaaacagggaggagctgcagaatggggctctggtctctgggcattcatttccctcatagaggctgagaataaaacaaggacttattcacacatgttctagaaccccagaatggcccaagttacctgagaccagggtttctcaaccttgacaccattgacattttggactgggtaattctttgttctgcagagctgtcctttgcactgtaggagatttactaatatccctggcctctacccagtagtaccactagcacctattccccacccagcgtgtctccagatattgtcaaatatcccatcgggtgcaaaatgatccctggtcaagatctgttgcccaagatgttacaggtcacaatgaccacatttgaaattgttttccctttcattttaccctgtgaaagcatctctcctagagccttgcaagaggcaggtgacattgtgtccatatttcttcctgtttcagaacttctgtttcacaacaatttctctctcgctacaagtattctttcactcagcactggggaagttgggaacagctggtcaccatcatccctttaatcaactcacacctgtttaaagagtgtttctgatttgaccttcatcccttagtttactggcgttaaaaaaagtctcagcaattttcattatttctcgtgggtctcattatcaaacctttacttatttcggcatatttcctctgggcttcttctagtttctgccttacaagcaatgctgttctgtaaatttattgaaacctctggaacatttcacctttagagatggaggatggaaggattggtaccagaagagggctaagatacgttttctgtcttgagctgaaagcacagtctactctccttcgttttgtcgatgagaaagttgaggccagaggggaggtgacatgtttagagtcacccagctggttagtgacagaaaaagcgtgagagttgtctaggattcctgccactttggtccctggcctctcctgggggaggctgctgttcttaggtgctctaagcttaatccctcagaatgtgtggacaggtcagcttagaagagatggggagattcaggatccccctgtgccagagcacagcctcaccggatgctgcttcccacactgaagtgtcctgtccgaccattgctatctgaggcatccacaagcaggtaggaaagctggcgagccattttacttcctgaggacaattccccagccacaggctctgagtcaaatttctatttggtaagcatcctagcagcaaagtcctgcactcagaccagccaaaaaacagcccccattccaagtacttggtgtcaaaagtccccgaacgacttttaaacccaagtcttcttaaggtttcagtactgtggtggctttagcagttgtttttgtgcaactataaattatttaaatcatctgagatgacagtcaattttacaaaccaggtacatattaatttgtataattttgtatatgctctggtacactacctgaactaacgaagggtagaactaattctgtttgtcagtgttcacacctgtaacattaggaggatatgtctgcattgcttatttctttatgttggtgtttctgtggcaaagccctgcacatggcatttctgaaaagccttaaatctttaagatgttgcatgtagggtatgcagtgcaaaaggctgcctcagaactgtgagcccttttgtaagctggaagcatttctcttactactgttacttttgtaggaagttttcaattcagagctgccaaagtgttcccgtaagcagtgccttagtaataccttagtcatgccgccagccttttcttacaccaattcctaatgttcatttacgaattggcccaatattggaaacaaaacaagcaaaaattgtcttcatttttgttttgtaagcccattttttctccagttctataggaaactgactgcttggtgtaaaatccgaaactggacacaagtcagttctttcaccacactcaaatgtatataccaaaacaaaaggttgcaacttcatagtttactatgaaaagcaaattgtactttttaatgttgccttttaaattcatgaccaaatacttagctatttgtgaatcttctgcactctagcatgaaagtgcctttggtttgagattccagcttagaaaagtgctgccataataacgataatttgtagagagaccaaaaatattttgagatcaccgtaatgcctttggtttaccgggatgagtaaccaaccacaggcctctgttcacaagagcacgacgtggtccccgcctgctgctagtctgtctgccactgggggcctcccaacatccatagcacacttcagcggaaggaccccagaaactgttgtgtttgtgtgtgctgatgacctagtgtgtcatttcacctcgtcacccagccctgcgtccggatgaggggacttctgcacaaatgacagaatctcggctggtggacagatactacagctttctcctcctccttgtgttcgtgttcagtctctgtggagactttcttttccattcaaatgacagtgcgcacttatctggtttacacaatgataccattttgaaagttggaagcctcaaactgagacgacagtgcagaacaaaacaaaagtgagttagggtcgttaaaattgaagtgttcttcttagggcaaacatgttgactccgagtattgtgtatgaatgtgctacgagaaacttccaaagagcaccattcacaatttggcattttcaaagaatgttccagccctcaaaggggcaactctttaaagtccttgttggcttttatccaaaccttgtagaaattgggaaagctgatagaggtaaggaagacgagtgaaaaggacaagaaggccaaacaccagccaaaaagaaactaggaaaaaaagattttctttgctaatatagatgtaaaaataacatcagacatctttgaaaattagcctctaaactcttaatacatacgttctgtgtgtctctacctggcgtctttaagaatatcctctctgggctctgaaattttaggagtgattcttatccactccaagttgtaagtatttgtagaaatttgtgcaaacaaacaaaaactatcaaatgaaaagaaaatgtactcaacctaacttatagttagcagctggaattctcaactcttccctgccagcactataccacagtgtggaagaaattagtcaaatgcttgttttcctgcttctcttttcaactgttactgtgctttgtttgaaagtagttttctctctcaaagccgttgcttatatcgttaagaatgaaggtttgtgtttaaaatttattgcattgcaaagggtagtttcactgaagtcatgcaccattaaataagatgaaatatttgtatttattgtcctacttcctaagccgtaacttcttttcctctgtgaatttgcattgagtcactcatgctacactacatcgctttagtatttgagatggcatttatgtttcctctcgtttatcatgaaatggggtcagattccatcagattccacctctgtcaggtggactcttgtctgccttccatgatgagattttttttctccttcccctttctttaagagaggctgacagatctaggtgtcaatcaattggaaaccagtctctgattttttttcattagttattttctatcattagtttcactgtgtaaattagatatcaactgcacttctttaaaaaaaaatacatctccctattacctccttgaaagatttacttctgtaggcctttttcaataggctcatgactgcagacaaggaaaaaaaaagtaaaaacaaaaacagtatgtgcctgaaaatgacaaaaaaaaaatttgtaacatttaaaaaagaaacctgaatagcctttaattctttaataatacacttaaattttatgtaaatcggttttcgccacgtgtgtttgttcacattctaaatgacttaatgggattctcacggtctgtgtctttgtgtcacgtgtataaaatgggcttgtgatgtaagcgtttcatctggtcagtggttcctttgatattgtactgctgctgggagtgggctgtggaacctgccttcgggtaactgggttcctcttgggtagattggagagatgggggtgggcgtgggcaaattctcacacatgttttcttaacctatttgcagaaactttcaaaaggcatttgattaaacctcttggcagtacagtattcttgtatttgttaacgtctgtgtttaggtactggtacctttttgttttaaaatgttctaagtgttggctttaaagtgaatttatctttagtatgatagttatatgaaaattataggatttgtgtgcagagaatttttttataaagtgctttgtaaaaaaaaaaaaatgtattctagcttttgcggtacatatgtgtgataactttaatacccatgacagttaagtgcaattatttcatcactctaaaaatgctatttttgtgtcagttcctgcaggtgttttcatgtctttgcaaagtgacacattttgatgccttcttgataaagtggtagacattttgtagctttctagaaactttgtattcatacggtatcaatgaaaaataaagaaaatgaaagtgtgggtcaccttttttatctgcaaaaaaaaaaaaaaaaaa

SEQ ID NO: 210507 - DNA, 1074 bp, Artificial Sequence
  derived and/or modified sequence
atggagagaatgagcgacagcgccgacaagcccatcgacaacgacgccgagggcgtgtggagccccgacatcgagcagagcttccaggaggccctggccatctaccccccctgcggcagaagaaagatcatcctgagcgacgagggcaagatgtacggcagaaacgagctgatcgccagatacatcaagctgagaaccggcaagaccagaaccagaaagcaggtgagcagccacatccaggtgctggccagaagaaagagcagagacttccacagcaagctgaaggtgaccagcatggaccagaccgccaaggacaaggccctgcagcacatggccgccatgagcagcgcccagatcgtgagcgccaccgccatccacaacaagctgggcctgcccggcatccccagacccaccttccccggcgcccccggcttctggcccggcatgatccagaccggccagcccggcagcagccaggacgtgaagcccttcgtgcagcaggcctaccccatccagcccgccgtgaccgcccccatccccggcttcgagcccgccagcgcccccgcccccagcgtgcccgcctggcagggcagaagcatcggcaccaccaagctgagactggtggagttcagcgccttcctggagcagcagagagaccccgacagcgccgacctgaactgcaacatccaggacgacgccggcgccttctacggcgtgaccagccagtacgagagcagcgagaacatgaccgtgacctgcagcaccaaggtgtgcagcttcggcaagcaggtggtggagaaggtggagaccgagtacgccagattcgagaacggcagattcgtgtacagaatcaacagaagccccatgtgcgagtacatgatcaacttcatccacaagctgaagcacctgcccgagaagtacatgatgaacagcgtgctggagaacttcaccatcctgctggtggtgaccaacagagacacccaggagaccctgctgtgcatggcctgcgtgttcgaggtgagcaacagcgagcacggcgcccagcaccacatctacagactggtgaaggactag

SEQ ID NO: 210508 - DNA, 1236 bp, Artificial Sequence
  derived and/or modified sequence
atggagagaatgagcgacagcgccgacaagcccatcgacaacgacgccgagggcgtgtggagccccgacatcgagcagagcttccaggaggccctggccatctaccccccctgcggcagaagaaagatcatcctgagcgacgagggcaagatgtacggcagaaacgagctgatcgccagatacatcaagctgagaaccggcaagaccagaaccagaaagcaggtgagcagccacatccaggtgctggccagaagaaagagcagagacttccacagcaagctgaaggaccagaccgccaaggacaaggccctgcagcacatggccgccatgagcagcgcccagatcgtgagcgccaccgccatccacaacaagctgggcctgcccggcatccccagacccaccttccccggcgcccccggcttctggcccggcatgatccagaccggccagcccggcagcagccaggacgtgaagcccttcgtgcagcaggcctaccccatccagcccgccgtgaccgcccccatccccggcttcgagcccgccagcgcccccgcccccagcgtgcccgcctggcagggcagaagcatcggcaccaccaagctgagactggtggagttcagcgccttcctggagcagcagagagaccccgacagctacaacaagcacctgttcgtgcacatcggccacgccaaccacagctacagcgaccccctgctggagagcgtggacatcagacagatctacgacaagttccccgagaagaagggcggcctgaaggagctgttcggcaagggcccccagaacgccttcttcctggtgaagttctgggccgacctgaactgcaacatccaggacgacgccggcgccttctacggcgtgaccagccagtacgagagcagcgagaacatgaccgtgacctgcagcaccaaggtgtgcagcttcggcaagcaggtggtggagaaggtggagaccgagtacgccagattcgagaacggcagattcgtgtacagaatcaacagaagccccatgtgcgagtacatgatcaacttcatccacaagctgaagcacctgcccgagaagtacatgatgaacagcgtgctggagaacttcaccatcctgctggtggtgaccaacagagacacccaggagaccctgctgtgcatggcctgcgtgttcgaggtgagcaacagcgagcacggcgcccagcaccacatctacagactggtgaaggactag

SEQ ID NO: 210509 - DNA, 1281 bp, Artificial Sequence
  derived and/or modified sequence
atcgagcccagcagctggagcggcagcgagagccccgccgagaacatggagagaatgagcgacagcgccgacaagcccatcgacaacgacgccgagggcgtgtggagccccgacatcgagcagagcttccaggaggccctggccatctaccccccctgcggcagaagaaagatcatcctgagcgacgagggcaagatgtacggcagaaacgagctgatcgccagatacatcaagctgagaaccggcaagaccagaaccagaaagcaggtgagcagccacatccaggtgctggccagaagaaagagcagagacttccacagcaagctgaaggaccagaccgccaaggacaaggccctgcagcacatggccgccatgagcagcgcccagatcgtgagcgccaccgccatccacaacaagctgggcctgcccggcatccccagacccaccttccccggcgcccccggcttctggcccggcatgatccagaccggccagcccggcagcagccaggacgtgaagcccttcgtgcagcaggcctaccccatccagcccgccgtgaccgcccccatccccggcttcgagcccgccagcgcccccgcccccagcgtgcccgcctggcagggcagaagcatcggcaccaccaagctgagactggtggagttcagcgccttcctggagcagcagagagaccccgacagctacaacaagcacctgttcgtgcacatcggccacgccaaccacagctacagcgaccccctgctggagagcgtggacatcagacagatctacgacaagttccccgagaagaagggcggcctgaaggagctgttcggcaagggcccccagaacgccttcttcctggtgaagttctgggccgacctgaactgcaacatccaggacgacgccggcgccttctacggcgtgaccagccagtacgagagcagcgagaacatgaccgtgacctgcagcaccaaggtgtgcagcttcggcaagcaggtggtggagaaggtggagaccgagtacgccagattcgagaacggcagattcgtgtacagaatcaacagaagccccatgtgcgagtacatgatcaacttcatccacaagctgaagcacctgcccgagaagtacatgatgaacagcgtgctggagaacttcaccatcctgctggtggtgaccaacagagacacccaggagaccctgctgtgcatggcctgcgtgttcgaggtgagcaacagcgagcacggcgcccagcaccacatctacagactggtgaaggactag

SEQ ID NO: 210510 - DNA, 993 bp, Artificial Sequence
  derived and/or modified sequence
atgagatacgtgctgagctggtgcgtgaccgtgaccttcaaggaccagaccgccaaggacaaggccctgcagcacatggccgccatgagcagcgcccagatcgtgagcgccaccgccatccacaacaagctgggcctgcccggcatccccagacccaccttccccggcgcccccggcttctggcccggcatgatccagaccggccagcccggcagcagccaggacgtgaagcccttcgtgcagcaggcctaccccatccagcccgccgtgaccgcccccatccccggcttcgagcccgccagcgcccccgcccccagcgtgcccgcctggcagggcagaagcatcggcaccaccaagctgagactggtggagttcagcgccttcctggagcagcagagagaccccgacagctacaacaagcacctgttcgtgcacatcggccacgccaaccacagctacagcgaccccctgctggagagcgtggacatcagacagatctacgacaagttccccgagaagaagggcggcctgaaggagctgttcggcaagggcccccagaacgccttcttcctggtgaagttctgggccgacctgaactgcaacatccaggacgacgccggcgccttctacggcgtgaccagccagtacgagagcagcgagaacatgaccgtgacctgcagcaccaaggtgtgcagcttcggcaagcaggtggtggagaaggtggagaccgagtacgccagattcgagaacggcagattcgtgtacagaatcaacagaagccccatgtgcgagtacatgatcaacttcatccacaagctgaagcacctgcccgagaagtacatgatgaacagcgtgctggagaacttcaccatcctgctggtggtgaccaacagagacacccaggagaccctgctgtgcatggcctgcgtgttcgaggtgagcaacagcgagcacggcgcccagcaccacatctacagactggtgaaggactag

SEQ ID NO: 210511 - DNA, 207 bp, Artificial Sequence
  derived and/or modified sequence
atcgagcccagcagctggagcggcagcgagagccccgccgagaacatggagagaatgagcgacagcgccgacaagcccatcgacaacgacgccgagggcgtgtggagccccgacatcgagcagagcttccaggaggccctggccatctaccccccctgcggcagaagaaagatcatcctgagcgacgagggcaagatgtacggctag

SEQ ID NO: 210512 - DNA, 1074 bp, Artificial Sequence
  derived and/or modified sequence
atggagaggatgtccgactccgccgacaaacccattgacaacgacgccgagggtgtgtggtcaccagatatcgaacagagtttccaggaggccttagccatttatcctccttgtggaagacgcaaaattatcctgtctgatgagggtaaaatgtacggaagaaatgaattaattgcccggtacatcaagctgcggaccgggaaaactcgtacgaggaagcaggtcagcagccatatccaggtccttgcccggcggaaaagcagagattttcacagcaagctgaaagttacatccatggatcagactgcgaaggacaaggcactgcagcacatggcggccatgtcaagtgcacaaatagtcagtgccacagccatccataataagctgggcctacccgggatacccagacccaccttccccggagcgccagggttctggcccggaatgatacagaccggccagccaggatcatctcaggacgttaagccattcgtccagcaagcctaccctatccaacccgctgtgactgcaccaatcccaggatttgagccagcctctgcacctgcccccagcgtacccgcctggcaggggaggagcatcggcacaacaaagctgcggttagtggagtttagcgcatttttggagcagcagagagaccccgatagcgctgacctgaattgcaacatccaggatgatgctggcgcattctatggcgttaccagccaatacgaatccagtgagaacatgacagtcacttgcagtaccaaggtgtgttcgttcggcaaacaggttgtcgaaaaagtggagactgagtacgcgcggttcgaaaatggtagatttgtgtaccgcatcaatagaagcccaatgtgcgagtacatgattaatttcatccacaagctgaaacatctccctgagaagtacatgatgaactctgtgcttgagaactttacaatattgctcgtggttaccaatagagatacccaggaaacactgctctgcatggcttgcgtcttcgaggtcagtaattccgagcatggtgcccagcatcacatttaccgcttggttaaggactag

SEQ ID NO: 210513 - DNA, 1236 bp, Artificial Sequence
  derived and/or modified sequence
atggagaggatgtctgacagcgcggacaagccaatcgacaatgatgccgaaggcgtgtggtccccggatatcgaacaatccttccaggaggctctggccatctaccccccctgtggccgacggaagattattctctctgatgagggcaagatgtacgggcggaacgagctcatagcccgatacatcaagctccgtacaggcaagactaggaccaggaagcaggtgtctagccatatccaggtgttagccaggaggaagtcacgtgatttccacagtaaactgaaggatcagaccgctaaggataaagccctgcagcatatggctgcaatgtctagcgctcaaatcgtatctgctacagcaatacacaataagcttggcctccctggtattccacgaccaacctttccaggcgcccctggtttctggcccggaatgatccaaacagggcagcccggttccagccaggacgttaaacctttcgtgcagcaagcctatccgatccagccagcagtgaccgcaccaattcctgggttcgagcctgcttccgctcccgcgccatccgtgccagcttggcaaggaaggagcattgggaccactaaattgaggctcgtggagtttagtgcctttttagagcagcagcgggacccggatagctacaataagcacctgttcgtccacattggccacgcgaatcattcttactccgatcctcttctcgaaagcgtcgacattcgacaaatttacgacaagttcccggaaaagaagggagggttgaaggagctttttggcaaggggcctcaaaacgcgtttttcctagttaagttttgggcagatctcaactgcaacattcaagatgatgcaggagcattctatggggttacatcacagtatgaatcttctgagaacatgaccgtcacatgtagcaccaaagtgtgttcctttggaaagcaggtcgtggaaaaggtggaaaccgagtatgctagattcgagaacggcaggttcgtatatcggattaatcgcagtcccatgtgtgaatacatgatcaactttatacataaactgaagcatttacccgaaaaatacatgatgaattcagtactggagaatttcaccattctactggtcgtaaccaacagagacacgcaggagactctgctgtgcatggcatgtgtgttcgaggtttcaaacagcgaacatggagcgcaacaccacatttatcggctggtgaaagactag

SEQ ID NO: 210514 - DNA, 1281 bp, Artificial Sequence
  derived and/or modified sequence
atcgaacctagctcctggtccggctctgagagtcctgctgagaacatggagcgtatgagcgattcggctgacaagccgattgacaatgatgcagaaggtgtctggtcccctgacatagaacagagttttcaggaagcgctagctatctatccaccctgtggccgtcggaagatcattctgtctgatgagggcaagatgtacggacgtaacgagttaattgctcgttacattaagctgagaacgggaaagactcggaccaggaaacaggtatcatctcacattcaggtgctggcacgaagaaagtcccgagacttccattccaaacttaaggaccagaccgctaaggacaaggccctccagcatatggctgcgatgtcctccgcccagatagtctctgccactgcaatccacaacaaattaggactgccagggatccctaggcctactttccccggggcccccggcttctggcccgggatgatacaaaccggccagcccggatcctctcaggatgtaaagccatttgtgcagcaggcatatcctattcaaccagccgtgacggcgcctatccccggattcgagcccgccagtgcaccagcgccatccgtgccggcctggcaaggaagatccatcggcaccacaaagttgcgtttagtcgaattcagtgcgttcctggaacaacagcgagatccagactcttacaataaacatttgttcgtccacattggacacgccaatcacagctactcagatccccttctggagagcgttgacatcaggcagatctacgacaagttcccagagaagaagggtgggctaaaggaactgtttggcaaaggcccacaaaatgccttctttttggtgaagttttgggctgacttaaactgtaatatacaggatgacgctggggccttctacggggtaactagccagtatgaatcctccgaaaacatgaccgttacctgttcgaccaaggtctgcagcttcggtaagcaggttgtcgaaaaggtggaaaccgaatatgcgagatttgagaacggaagattcgtgtacagaatcaacagatctccgatgtgcgagtacatgattaattttatacataaactcaaacacctgcctgagaagtatatgatgaatagcgtgctggaaaattttacgatcctgctggttgtgaccaaccgggacacgcaggaaaccttgctgtgtatggcatgcgtcttcgaggtgtccaactcagaacacggagcccagcatcatatctatcggttggtcaaagactag

SEQ ID NO: 210515 - DNA, 993 bp, Artificial Sequence
  derived and/or modified sequence
atgcgctatgtgctgtcctggtgcgtgacagtaacttttaaggatcagactgcgaaggacaaagccttacagcacatggctgcaatgtcgtctgcccagatcgtttcagcaactgccatccacaataagctgggcttgcccggcatccctaggcccacttttccgggcgcaccaggcttttggccagggatgattcagactggacagccaggttctagccaggacgtcaagcccttcgtccagcaggcctatcccattcagccagccgtgacggcccccattcccgggtttgagcccgcctccgcccccgccccctctgtcccggcgtggcagggtcggtccatcggaacgaccaagctcaggctggtcgagttcagtgcgttcttagaacaacaacgagatcctgactcctacaacaagcaccttttcgtgcatattggacacgcaaatcattcttactccgacccactcctcgaaagtgtcgatattcggcagatttatgataagttccctgagaagaagggaggcctgaaggagctgttcgggaaaggccctcaaaacgcttttttcctcgtgaagttttgggcagatctgaattgtaatatccaggatgacgccggcgcattttacggagtgacatcacagtacgagtcttctgagaacatgaccgtaacctgctcgactaaggtgtgttcctttggcaaacaagttgttgagaaggtcgaaacagaatatgctaggttcgagaacgggcgcttcgtttacagaatcaatcgctctcccatgtgtgaatacatgatcaattttattcacaagttgaagcaccttccagagaagtacatgatgaactcagtactggagaattttaccatcttgctcgtggtcaccaatagggatacccaggaaacactactttgtatggcctgcgttttcgaagtcagtaacagcgagcacggtgcccagcatcatatctaccgcctggttaaggactag

SEQ ID NO: 210516 - DNA, 207 bp, Artificial Sequence
  derived and/or modified sequence
attgagcccagtagctggtctggttccgaatcaccagccgaaaacatggaacgcatgtccgattctgctgataagcccattgataatgatgcggaaggagtatggtctcctgatattgaacagagtttccaagaggccctcgctatatatcccccttgtggacggcgaaaaatcatccttagcgacgaaggcaagatgtacgggtag

SEQ ID NO: 210517 - DNA, 1281 bp, Artificial Sequence
  derived and/or modified sequence
attgaaccgagttcatggagtgggtctgagtcacctgccgagaatatggagagaatgtcagacagcgccgataaaccaatcgacaatgatgccgaaggcgtatggtctccggatattgagcaatcatttcaagaggcccttgccatatatccaccctgcggccgcaggaaaatcattctctccgacgaaggcaaaatgtatggccgcaatgaacttatagcccggtacataaaactacggaccggcaagacacgcacccgaaagcaggtgtcttcacacatccaggttctcgcacgcaggaaaagcagggactttcattctaagttgaaggatcagaccgcgaaggataaggccctgcagcatatggccgcgatgtcttccgcccagattgtcagtgcgaccgccatccacaataaactcgggctcccagggatacctaggccaacttttccaggcgctcccgggttttggcccgggatgatccagacaggacagcccggcagctcccaggacgtaaaaccttttgtgcaacaggcttaccctatccagccagcagtaaccgctcctattcctggtttcgaacccgcttccgctcccgctccttctgtgcccgcatggcaggggcgctccatcggtaccacaaagttaaggctggttgagttttcggcttttctggagcagcagagggaccctgatagctacaataaacacttgttcgtgcatatcggtcacgcaaaccattcatacagtgacccgcttctggagagtgtggatattaggcaaatctatgacaaattcccagagaagaaggggggtttaaaggagctattcgggaagggaccccaaaatgccttcttccttgtcaagttctgggccgatctgaattgcaacattcaagatgacgcaggagccttctacggagtcacatcgcaatacgagagctccgaaaatatgaccgtcacctgtagcactaaagtctgctcctttggcaaacaggttgtggaaaaggtggagactgagtatgctcgcttcgaaaatgggaggtttgtgtaccgcattaacaggtctcctatgtgtgagtatatgatcaacttcatccataaactgaagcacttacccgagaagtatatgatgaactctgtgttagagaactttaccattttactcgtagtgacaaatcgagatactcaggaaactctcctctgtatggcatgtgtattcgaagtctccaatagtgagcatggtgcccagcaccacatctaccggcttgttaaggactag

SEQ ID NO: 210518 - DNA, 1074 bp, Artificial Sequence
  derived and/or modified sequence
atggagaggatgtctgattctgctgacaagcccatcgacaatgatgctgagggcgtgtggagcccagacatcgagcagagcttccaggaggccctggccatctacccaccctgtggccgcaggaagatcatcctgagtgatgagggcaagatgtatggaagaaatgaactcatcgcccgctacatcaagctgaggacaggcaagaccaggaccaggaagcaggtgagcagccacatccaggtgctggcccggaggaagagccgggacttccacagcaagctgaaggtgacctccatggaccagacagccaaggacaaggccctgcagcacatggccgccatgagcagcgcccagatcgtgtctgccacagccatccacaacaagctgggcctgcccggcatcccccggcccaccttccctggggcccctggcttctggccaggcatgatccagacaggccagcccggcagcagccaggatgtgaagccctttgtgcagcaggcctaccccatccagcctgctgtgacagcccccatccctggctttgagcccgccagcgccccagcccccagcgtgcctgcctggcagggccgcagcatcggcaccaccaagctgcggctggtggagttcagcgccttcctggagcagcagagggaccctgacagcgctgacctgaactgcaacatccaggatgatgctggggccttctatggagtgaccagccagtatgagagcagcgagaacatgacagtgacctgcagcaccaaggtgtgcagctttgggaagcaggtggtggagaaggtggagacagaatatgccaggtttgaaaatggccgctttgtgtaccgcatcaacagaagccccatgtgtgagtacatgatcaacttcatccacaagctgaagcacctgcctgagaagtacatgatgaacagcgtgctggagaacttcaccatcctgctggtggtgaccaacagagacacccaggagaccctgctgtgcatggcctgtgtgtttgaggtgagcaacagcgagcacggggcccagcaccacatctaccgcctggtgaaggactag

SEQ ID NO: 210519 - DNA, 1236 bp, Artificial Sequence
  derived and/or modified sequence
atggagaggatgtctgattctgctgacaagcccatcgacaatgatgctgagggcgtgtggagcccagacatcgagcagagcttccaggaggccctggccatctacccaccctgtggccgcaggaagatcatcctgagtgatgagggcaagatgtatggaagaaatgaactcatcgcccgctacatcaagctgaggacaggcaagaccaggaccaggaagcaggtgagcagccacatccaggtgctggcccggaggaagagccgggacttccacagcaagctgaaggaccagacagccaaggacaaggccctgcagcacatggccgccatgagcagcgcccagatcgtgtctgccacagccatccacaacaagctgggcctgcccggcatcccccggcccaccttccctggggcccctggcttctggccaggcatgatccagacaggccagcccggcagcagccaggatgtgaagccctttgtgcagcaggcctaccccatccagcctgctgtgacagcccccatccctggctttgagcccgccagcgccccagcccccagcgtgcctgcctggcagggccgcagcatcggcaccaccaagctgcggctggtggagttcagcgccttcctggagcagcagagggaccctgacagctacaacaagcacctgtttgtgcacatcggccacgccaaccacagctacagcgaccccctgctggagagcgtggacatccggcagatctatgacaagtttcctgagaagaagggcggcctgaaggagctgtttgggaagggcccccagaatgccttcttcctggtgaagttctgggccgacctgaactgcaacatccaggatgatgctggggccttctatggagtgaccagccagtatgagagcagcgagaacatgacagtgacctgcagcaccaaggtgtgcagctttgggaagcaggtggtggagaaggtggagacagaatatgccaggtttgaaaatggccgctttgtgtaccgcatcaacagaagccccatgtgtgagtacatgatcaacttcatccacaagctgaagcacctgcctgagaagtacatgatgaacagcgtgctggagaacttcaccatcctgctggtggtgaccaacagagacacccaggagaccctgctgtgcatggcctgtgtgtttgaggtgagcaacagcgagcacggggcccagcaccacatctaccgcctggtgaaggactag

SEQ ID NO: 210520 - DNA, 1281 bp, Artificial Sequence
  derived and/or modified sequence
attgagcccagctcctggagcggcagcgagagccctgctgagaacatggagaggatgtctgacagcgctgacaagcccatcgacaatgatgctgagggcgtgtggagcccagacatcgagcagagcttccaggaggccctggccatctacccaccctgtggccgcaggaagatcatcctgagtgatgagggcaagatgtatggaagaaatgagctgattgcccgctacatcaagctgaggacaggcaagaccaggaccaggaagcaggtgagcagccacatccaggtgctggcccggaggaagagccgggacttccacagcaagctgaaggaccagacagccaaggacaaggccctgcagcacatggccgccatgagcagcgcccagatcgtgtctgccacagccatccacaacaagctgggcctgcccggcatcccccggcccaccttccctggggcccctggcttctggccaggcatgatccagacaggccagcccggcagcagccaggatgtgaagccctttgtgcagcaggcctaccccatccagcctgctgtgacagcccccatccctggctttgagcccgccagcgccccagcccccagcgtgcctgcctggcagggccgcagcatcggcaccaccaagctgcggctggtggagttcagcgccttcctggagcagcagagggaccctgacagctacaacaagcacctgtttgtgcacatcggccacgccaaccacagctacagcgaccccctgctggagagcgtggacatccggcagatctatgacaagtttcctgagaagaagggcggcctgaaggagctgtttgggaagggcccccagaatgccttcttcctggtgaagttctgggccgacctgaactgcaacatccaggatgatgctggggccttctacggcgtgaccagccagtatgagagcagcgagaacatgacagtgacctgcagcaccaaggtgtgcagctttgggaagcaggtggtggagaaggtggagacagaatatgccaggtttgaaaatggccgctttgtgtaccgcatcaacagaagccccatgtgtgagtacatgatcaacttcatccacaagctgaagcacctgcctgagaagtacatgatgaacagcgtgctggagaacttcaccatcctgctggtggtgaccaacagagacacccaggagaccctgctgtgcatggcctgtgtgtttgaggtgagcaacagcgagcacggggcccagcaccacatctaccgcctggtgaaggactag

SEQ ID NO: 210521 - DNA, 993 bp, Artificial Sequence
  derived and/or modified sequence
atgagatatgtgctgtcctggtgtgtgacagtgaccttcaaggaccagacagccaaggacaaggccctgcagcacatggccgccatgagcagcgcccagatcgtgtctgccacagccatccacaacaagctgggcctgcccggcatcccccggcccaccttccctggggcccctggcttctggccaggcatgatccagacaggccagcccggcagcagccaggatgtgaagccctttgtgcagcaggcctaccccatccagcctgctgtgacagcccccatccctggctttgagcccgccagcgccccagcccccagcgtgcctgcctggcagggccgcagcatcggcaccaccaagctgcggctggtggagttcagcgccttcctggagcagcagagggaccctgacagctacaacaagcacctgtttgtgcacatcggccacgccaaccacagctacagcgaccccctgctggagagcgtggacatccggcagatctatgacaagtttcctgagaagaagggcggcctgaaggagctgtttgggaagggcccccagaatgccttcttcctggtgaagttctgggccgacctgaactgcaacatccaggatgatgctggggccttctacggcgtgaccagccagtatgagagcagcgagaacatgacagtgacctgcagcaccaaggtgtgcagctttgggaagcaggtggtggagaaggtggagacagaatatgccaggtttgaaaatggccgctttgtgtaccgcatcaacagaagccccatgtgtgagtacatgatcaacttcatccacaagctgaagcacctgcctgagaagtacatgatgaacagcgtgctggagaacttcaccatcctgctggtggtgaccaacagagacacccaggagaccctgctgtgcatggcctgtgtgtttgaggtgagcaacagcgagcacggggcccagcaccacatctaccgcctggtgaaggactag

SEQ ID NO: 210522 - DNA, 207 bp, Artificial Sequence
  derived and/or modified sequence
attgagcccagctcctggagcggcagcgagagccctgctgagaacatggagaggatgtctgacagcgctgacaagcccatcgacaatgatgctgagggcgtgtggagcccagacatcgagcagagcttccaggaggccctggccatctacccaccctgtggccgcaggaagatcatcctgagtgatgagggcaagatgtatggatag

SEQ ID NO: 210523 - DNA, 1074 bp, Artificial Sequence
  derived and/or modified sequence
atggagcggatgagcgacagcgccgacaagcccatcgacaacgacgcagagggggtgtggtctcccgatatcgagcagagttttcaggaggctttggcaatttaccccccctgcggacggagaaagatcatattgagcgacgagggcaagatgtacggacgaaatgaactgatcgctaggtatataaagctccgcaccgggaagactagaacgcgcaagcaggtgtccagccacatacaggtcttggcgcggaggaagtctagagacttccactctaaactgaaggtgactagtatggatcagacggccaaggacaaggcgctacagcatatggcagccatgtccagtgcccaaatagtgtccgccacagccatccataacaaactgggcctgcccggtatcccccgccctaccttccccggtgccccaggcttctggcccggtatgattcagacgggccagccaggtagctcacaagatgtgaagccattcgtgcagcaggcgtatcctatccagcccgctgttaccgcaccaatcccaggcttcgagcccgctagtgctcctgctccatctgtacccgcttggcaggggcgtagcattgggaccacaaaactgcggctggtagaattctccgcctttctggagcagcagcgggaccccgacagcgccgacctcaattgtaatattcaggacgatgccggcgccttctatggagtgacaagccagtacgagtcctctgaaaacatgactgttacttgcagcacaaaagtgtgtagcttcggtaagcaggtagtggagaaggtggagactgagtacgccagatttgagaacggtaggttcgtgtatcgtataaatcgctctcccatgtgcgagtacatgataaatttcatccataaacttaagcatctgcctgaaaaatatatgatgaactcagtccttgaaaacttcaccattttactcgtcgttacaaatagagacacacaggagaccttactgtgcatggcctgtgtgttcgaagtctctaattcggagcacggcgcccagcaccacatttatcgtctggttaaggattag

SEQ ID NO: 210524 - DNA, 1236 bp, Artificial Sequence
  derived and/or modified sequence
atggagcggatgagcgacagcgccgacaagcccatcgacaacgacgccgagggcgtgtggagccctgatattgagcagagctttcaggaggccctggcgatctaccccccctgcggcaggagaaagattattctgtccgatgagggtaaaatgtatggaagaaacgaactgatcgcccggtatattaagctgcgcacgggcaaaacgaggactcgaaagcaggtgagttcccatatccaggtcctggctcgcaggaagtcacgggacttccatagcaagttaaaggatcaaacagccaaggacaaggcgctccagcacatggccgccatgtcaagtgcccagatcgtgtccgctactgccatacacaacaagctgggccttccaggcatccctcgacccaccttccctggggcacccgggttttggccaggaatgatccagaccggccaacccggctcttcccaggacgttaagccctttgtccagcaggcatacccaatacagcctgccgtgaccgccccaatccccgggttcgaaccagccagtgctcctgcaccaagcgtgcccgcctggcaggggaggtcaatagggacaaccaaattgagactagtcgaattttctgcattcctggagcagcaaagagaccccgatagttataataagcacttattcgttcacattggacacgccaatcattcgtactcagacccactgctggaatccgttgacattcggcaaatctacgataagttccctgaaaagaagggcggacttaaagaactattcggaaaggggccccagaacgcattctttcttgtgaagttttgggctgatctgaattgcaatattcaggacgacgccggagctttttacggcgttacctcacagtacgagtcctcagagaacatgactgttacatgttccaccaaagtttgcagcttcgggaagcaagtggtggagaaggttgaaactgagtacgcccggtttgaaaacgggagatttgtctatcggatcaataggtcgcccatgtgcgagtatatgatcaattttatccacaaacttaaacacctgcccgagaagtacatgatgaactccgtactcgagaattttactatcctgcttgtagttaccaacagggatacccaagaaacactgctgtgtatggcatgcgtctttgaagtctctaactctgagcacggggcgcagcatcacatataccgcctggtaaaagattag

SEQ ID NO: 210525 - DNA, 1281 bp, Artificial Sequence
  derived and/or modified sequence
atcgagcccagcagctggagcggcagcgagagccccgccgagaacatggaacggatgtcagattcggctgataagcccattgacaacgatgcagagggagtctggtcccctgatatcgagcagtcttttcaggaagctttagctatttaccccccctgcggccgtaggaagatcatcttatccgatgaaggaaagatgtacggccgcaatgagctgatcgcacgctatataaagctgcgcactgggaagaccagaacacgcaagcaggtctcaagtcatattcaggttctggctaggcgcaagtctcgcgattttcacagcaagctgaaggatcagacagccaaagacaaggcgttacaacacatggccgcaatgagctccgcgcagatagtctcggctactgctatccacaacaagctcgggttgcccgggattccaaggccaacatttcccggggctccgggcttctggcccggcatgattcaaacaggtcagccaggcagcagtcaggacgtgaagccattcgttcaacaagcttatccaatccagcctgcggttacagcaccaatacctggcttcgagccagcttccgcccctgctccttccgttcccgcctggcaagggagaagcatcggaacaactaagctccggctggttgaatttagcgctttcctggaacagcaacgggaccctgactcatataataagcatctgtttgtgcacataggacatgccaatcactcatactcagatcctttattggaaagcgtcgatatccgccagatttacgataaattccccgagaagaaagggggtctgaaggagttatttggcaagggccctcagaacgccttctttcttgtcaagttttgggctgatttgaattgtaacatccaggatgatgccggagccttctatggcgtcacttcgcagtacgagtcatctgaaaatatgactgtcacctgtagtactaaagtgtgttcttttgggaagcaggtggtggagaaggtggagaccgagtatgcacgcttcgagaatggcagattcgtgtatcgcatcaatcgcagcccaatgtgcgagtatatgattaattttatccataaattgaagcacctgccggaaaaatacatgatgaattctgtgcttgaaaatttcacaatcctcctcgtggtgactaatcgggacactcaggaaactctgctgtgtatggcctgtgtgttcgaggtgtctaattctgaacacggtgcacagcatcacatctacaggctcgtgaaagactag

SEQ ID NO: 210526 - DNA, 993 bp, Artificial Sequence
  derived and/or modified sequence
atgcggtacgtgctgagctggtgcgtgaccgtgaccttcaaggaccagacagccaaggataaagccctccagcacatggctgctatgtcctctgcccaaattgtctccgctactgccatccacaacaagttaggcctgcctggcatcccaagaccaacatttccaggcgccccaggattctggccgggcatgattcagactggacagccaggcagtagccaggatgtgaaacccttcgtgcagcaggcctatcctatccaacctgccgtcacggcacccatacccggcttcgagccagcaagcgctccggcaccatccgtacctgcgtggcaggggcgatcaatcggtacaaccaagctgcggcttgtagaattctccgcctttttggagcagcagcgggaccccgacagctacaacaagcatctattcgtgcatatcggccacgcaaatcactcctacagcgaccctctgcttgagagcgtagacatacggcagatctacgataagttcccagaaaagaagggaggactgaaagaactttttggaaaaggcccccagaacgcctttttcttggtgaaattctgggccgacttgaattgtaacattcaggacgatgctggagctttttacggcgtgacttcccagtatgaatcaagcgaaaacatgaccgtaacttgctcaaccaaggtgtgctcctttggtaaacaggtggttgagaaggttgagactgagtatgccagatttgaaaatggccgattcgtgtaccggatcaatcgctcacctatgtgcgaatacatgataaacttcatacacaagctcaagcatctcccggagaagtatatgatgaacagtgtcctggaaaatttcacaatcctcttggtcgttaccaatcgggacacacaggagactcttttatgcatggcgtgcgtgtttgaggtgagcaactcggagcatggagctcagcaccacatctataggcttgtgaaggactag

SEQ ID NO: 210527 - DNA, 207 bp, Artificial Sequence
  derived and/or modified sequence
atcgagcccagcagctggagcggcagcgagagccccgccgagaacatggagagaatgtccgattccgccgacaaaccgattgataacgatgcagagggcgtatggtcgccggatatagaacagagcttccaagaagccctggccatctatcccccgtgcggaaggcgaaaaatcatcctttcagatgaaggaaagatgtacggatag

SEQ ID NO: 210528 - DNA, 1281 bp, Artificial Sequence
  derived and/or modified sequence
atcgagcccagcagctggagcggcagcgagagccccgccgagaacatggagcgcatgtcagactctgcggacaagcccatcgataacgacgcagagggcgtgtggagccccgatattgagcagtccttccaggaagctctggcgatctatccaccatgcggtagaagaaaaattattctttcggacgaaggaaaaatgtatgggcgcaacgagcttattgcgcgatacatcaaattaagaactggaaaaactaggactcgaaaacaggtgtcttcgcatatccaagttctagcacgccgtaaatctcgagattttcactcaaaactgaaagatcaaaccgccaaagataaggccttacaacatatggctgcaatgagctcagctcagatcgtgtccgcaaccgctatccataacaagctcggcctcccagggatccctcggcccacatttcccggggcacctggattctggcccgggatgatccaaacaggtcagcccggctcttcccaagacgtcaagccctttgtgcagcaggcataccccatccagccagccgtcactgcacctattcctggttttgagcctgcatcagctccggccccatccgtgccagcgtggcaaggacgtagtatcggcaccactaaactaagactggtggagtttagcgctttccttgagcagcagagagatcccgactcttataataagcatctttttgtgcacatcggacacgccaatcattcctactccgaccctctgctcgaatctgtcgatataaggcagatctacgacaaatttcctgaaaaaaaaggtggtctcaaagagctgttcggcaaggggccccagaacgccttttttctagttaaattctgggctgacctcaattgtaatattcaagacgacgccggggctttttatggggtcacaagccagtatgagtcctccgagaatatgaccgtcacctgctccacaaaagtgtgctcttttggcaagcaggtggtggaaaaggtggagacagagtatgcccgatttgaaaatggcaggtttgtttatcggattaacagaagtccgatgtgtgagtacatgattaatttcatccataagttgaaacatttacctgaaaagtatatgatgaactcagtccttgagaactttacaatcctgcttgtcgtgaccaatcgggatactcaggagacattgttgtgcatggcctgcgtgtttgaggtgtccaatagcgagcacggagctcagcaccacatctaccggctcgttaaggattag

SEQ ID NO: 210529 - DNA, 1074 bp, Artificial Sequence
  derived and/or modified sequence
atggagaggatgtcagattccgcagacaaacccatagacaatgatgcagagggagtttggtcaccagatatcgaacagtctttccaagaagctctcgccatctatccaccatgcgggagacgcaagatcattctgagcgatgagggcaagatgtacggcagaaatgagctgatcgccagatacattaagttgaggaccggaaaaacccgaacgagaaagcaggtctcatcccatattcaggtcctggcgaggaggaaatccagggatttccactccaaactaaaggtcacaagcatggaccagacggcaaaagacaaggcactgcaacacatggcggctatgtcttctgcccaaatcgttagcgccaccgcaatccataacaagctcggactgccagggatcccccgacccactttcccgggagccccaggcttctggccgggtatgatccagacaggacaacctggaagcagtcaggatgttaagccatttgttcagcaggcctaccctatccagcctgctgtaactgctcctatccctgggttcgagcccgcatcggctcccgctccttctgtccccgcttggcaggggaggagtattggaaccacgaagttgcggttggtcgagtttagtgccttccttgaacagcagcgcgaccctgacagtgccgacctgaactgcaatatacaagatgatgccggagccttttatggagtaacatctcagtacgagagctcagaaaacatgaccgtgacctgcagcacaaaagtgtgtagcttcggaaaacaggtggtggagaaggtagagactgagtatgctaggttcgagaacggcaggtttgtctatagaattaaccgcagtcctatgtgtgaatatatgattaatttcatccacaagctaaaacacctgccagagaagtatatgatgaatagcgtgctggagaactttacaatccttctcgtggtgaccaatcgagacactcaagaaaccctattgtgtatggcatgtgtgtttgaagtctccaactcagaacatggagctcagcatcatatctacaggctggtgaaggattag

SEQ ID NO: 210530 - DNA, 1236 bp, Artificial Sequence
  derived and/or modified sequence
atggaaagaatgagcgatagcgcagataagccaatcgacaatgatgcggagggagtgtggtcgcctgacatagagcagagctttcaggaggccttagccatttacccaccttgcggccgtcgaaagatcattctctctgacgagggcaaaatgtatggcagaaatgagctgatagccaggtacattaaattgcgcacaggcaaaactcggacacgcaaacaggttagcagtcacattcaggtcctggccagacgcaaaagccgtgactttcatagcaagcttaaggatcagacagctaaagataaggcacttcaacacatggctgccatgtcttcggcccagattgtgagcgccactgccattcacaacaaactcggcctccccggaattcctaggcccacgtttcccggagctcccggtttctggcctggcatgatccagaccggccagccagggagcagtcaggacgtgaagcccttcgttcagcaggcctatccaattcagccagccgtgactgcccctataccgggttttgagcctgcatccgctccagccccatccgtcccggcttggcagggacgatcaatagggactactaaactgcgtcttgtggagttcagtgcctttttggaacaacaacgggatcctgactcatacaacaagcatctttttgtccatatcggacatgctaaccactcttacagtgatccactgcttgagtctgtagacatcagacaaatctacgataaatttccggagaaaaagggcggactgaaggagttgttcggaaaggggccacagaatgctttctttctggtgaaattttgggctgacctgaattgcaacatacaggacgatgccggtgcgttttacggtgtaacctcacagtatgagagttcagagaatatgaccgttacctgttctacaaaagtctgtagttttgggaagcaagttgtagaaaaggtcgaaaccgaatacgctagatttgaaaatggccgatttgtctacagaataaacagatctcccatgtgcgagtatatgattaacttcattcataagctgaagcacctgcccgagaaatacatgatgaacagcgttctggaaaactttactatcctgttggtggtcacaaaccgggacacccaggagactctgctgtgcatggcctgtgtgttcgaggttagtaatagcgagcacggcgcacaacatcatatttatagactagtgaaggactag

SEQ ID NO: 210531 - DNA, 1281 bp, Artificial Sequence
  derived and/or modified sequence
attgaacccagtagttggtctgggtcagagtcccccgctgagaacatggagaggatgtccgactctgcagataaacctatagataacgatgctgaaggcgtatggtcccctgacatagaacaatcgtttcaggaggctctagctatttacccaccgtgcggtaggaggaagattatcctctcagacgaaggcaaaatgtatggcagaaatgagctcattgcgaggtacatcaagctgagaacagggaagacccggactagaaagcaggtctcttcccacatccaagtcctggctaggagaaagagtcgcgattttcattctaagcttaaggatcagaccgcaaaagataaggctctgcaacatatggcagcgatgtcaagcgcacagatcgtgagtgccacagcgatccataataagttgggcctgcctgggattcccagacccaccttcccaggagccccaggtttctggcctgggatgatccagaccgggcagccaggttcctctcaggacgtgaagccctttgtgcagcaggcatatcctatacagcccgctgtaacggccccaatacccggattcgaaccagcctccgcaccggctcccagtgtgcctgcttggcagggtcgctccattggtaccaccaaactccggctggtggagttctccgcttttcttgaacagcagcgcgatcccgattcttacaacaaacatctgttcgtgcatataggacatgccaaccactcttattccgacccccttctcgagtctgtggatattcggcaaatctatgataagtttcctgagaagaagggaggtttaaaggagttatttggaaaggggcctcagaacgcgttctttctggtaaagttttgggcagacctcaactgtaatatccaggatgacgcgggagcgttttatggcgtgacctcacagtacgagtcttccgagaacatgacagttacctgttcgaccaaggtgtgctcattcggcaagcaggtcgtcgaaaaggttgagactgaatatgccagattcgaaaacggacgtttcgtttatcgtattaatcggtctcccatgtgcgagtatatgatcaacttcatccataaactgaaacatctgccagaaaaatacatgatgaatagcgtgctcgagaacttcacaatactgctggtagtcacaaatcgagatactcaagagactttactgtgcatggcatgcgtatttgaagtttccaactccgaacatggagcccagcatcatatatacagattggtaaaagactag

SEQ ID NO: 210532 - DNA, 993 bp, Artificial Sequence
  derived and/or modified sequence
atgaggtatgtgctgtcctggtgcgtgacagtcactttcaaggatcagaccgccaaggataaagccttgcagcatatggcagcaatgagctctgcccagattgtgagtgctaccgcgattcataataaactcggcctgcctggaataccccgtcccacctttccaggggcacctggcttttggccaggcatgatccagacaggccagcctggctcttcgcaggatgttaaaccctttgttcaacaggcatatccgatacagcctgccgttaccgcccctatccccggattcgaaccggctagcgccccagcgccatcagtgcctgcttggcaggggcgttccatcgggaccactaagctgagattagttgagttttctgccttcctggagcagcagagagatccagatagttacaataaacatctgttcgtgcacattggccacgcgaatcattcctactccgaccctcttctggagtcagtggatattaggcagatctacgataagtttccagaaaagaaggggggattaaaggagctgttcgggaaagggcctcagaatgcctttttcctggttaaattttgggccgacttgaactgcaacattcaggacgatgctggcgctttttatggggtcacctcacagtatgaaagctctgagaatatgacagtaacctgcagtacaaaagtatgcagttttggcaagcaggtggtagaaaaagtggagactgaatatgccagatttgaaaacggccgattcgtttataggattaatagatccccgatgtgcgaatacatgatcaattttatacacaaactgaagcacctgcccgaaaaatatatgatgaatagcgtattggaaaattttaccatcttattagtggtcacaaatagagatacacaggaaacccttctctgtatggcctgcgtgttcgaagtatccaactccgagcacggcgcacaacaccatatctataggctggtgaaagactag

SEQ ID NO: 210533 - DNA, 207 bp, Artificial Sequence
  derived and/or modified sequence
atcgaacccagttcttggagcggatccgaaagccccgctgagaacatggagcgcatgagtgatagcgccgataaacctatagacaatgatgccgagggggtctggtcccctgacatcgagcagagcttccaagaggcacttgccatttatcctccctgtggccgacgcaaaatcatcctcagcgacgaaggtaagatgtatggctag

SEQ ID NO: 210534 - DNA, 1281 bp, Artificial Sequence
  derived and/or modified sequence
atagagcccagctcctggagtggcagcgagtctcccgcagaaaatatggaacggatgtcagattccgcagacaagcctatcgataacgacgccgaaggtgtatggagccctgacattgagcagtcttttcaggaggccctagccatttatcctccttgcgggagacggaaaataatcctttcagacgagggcaagatgtatggacggaatgaattgatcgctcgatatataaaactgaggaccggtaagactcggaccaggaaacaggtatctagccatatccaggtactggctagacgcaagagccgggacttccattctaaacttaaggatcaaactgcaaaagataaggcactgcagcatatggcggctatgagctccgcgcagattgtgtctgcgacagctattcataacaaactcggcttgcccggaatccctcgcccaacttttccgggagctccgggattttggccagggatgattcagactggtcagccgggtagctcacaagatgttaaaccattcgtgcagcaggcataccccatccagccagctgtgacagcccctattcccggtttcgagccagcttctgctcccgctccttccgtccccgcttggcaggggaggagtatcggaaccaccaaactcaggctcgttgagtttagcgcctttctggagcagcaacgagacccagatagttataacaaacatctctttgttcacatcggacatgctaaccatagttacagcgacccactgctggagagcgtggatatccgacagatttatgacaagttcccagaaaaaaagggtggactgaaggaactgttcgggaagggccctcaaaacgcgtttttcctagttaagttctgggcagacctcaactgcaatatacaggatgatgcaggagccttttacggtgtgacatcccagtacgagagttcggaaaacatgactgttacctgttcaacaaaggtttgttcattcggtaaacaggtggtagaaaaggtcgagaccgaatacgctagattcgaaaacgggaggtttgtgtaccggatcaatcgtagtcccatgtgcgagtacatgatcaattttatacacaagctcaagcatcttccagagaagtatatgatgaatagtgtgttggagaacttcaccattctgctggtggtgacaaatcgggacactcaggaaacattgctctgtatggcgtgtgttttcgaagtgtctaactcagagcacggtgcacagcatcacatttataggctcgttaaagattag

SEQ ID NO: 210535 - DNA, 3075 bp, Artificial Sequence
  derived and/or modified sequence
tcgcagttaccaccaaacccaggaggagactctccctggaaaacttcccttccctttcggtttattttcttgaaaaggctccaggcttcggcttggaaaatcccaccgccaaaattgagcccagcagctggagcggcagtgagagccctgccgaaaacatggaaaggatgagtgactctgcagataagccaattgacaatgatgcagaaggggtctggagccccgacatcgagcaaagctttcaggaggccctggctatctatccaccatgtgggaggaggaaaatcatcttatcagacgaaggcaaaatgtatggtaggaatgaattgatagccagatacatcaaactcaggacaggcaagacgaggaccagaaaacaggtgtctagtcacattcaggttcttgccagaaggaaatctcgtgattttcattccaagctaaaggtaacaagcatggatcagactgcaaaggataaggccctgcagcacatggcggccatgtcctcagcccagatcgtctcggccactgccattcataacaagctggggctgcctgggattccacgcccgaccttcccaggggcgccggggttctggccgggaatgattcaaacagggcagccaggatcctcacaagacgtcaagccttttgtgcagcaggcctaccccatccagccagcggtcacagcccccattccagggtttgagcctgcatcggccccagctccctcagtccctgcctggcaaggtcgctccattggcacaaccaagcttcgcctggtggaattttcagcttttctcgagcagcagcgagacccagactcggctgatttaaactgcaatattcaagatgatgctggggctttttatggtgtaaccagtcagtacgagagttctgaaaatatgacagtcacctgttccaccaaagtttgctcctttgggaagcaagtagtagaaaaagtagagacggagtatgcaaggtttgagaatggccgatttgtataccgaataaaccgctccccaatgtgtgaatatatgatcaacttcatccacaagctcaaacacttaccagagaaatatatgatgaacagtgttttggaaaacttcacaattttattggtggtaacaaacagggatacacaagaaactctactctgcatggcctgtgtgtttgaagtttcaaatagtgaacacggagcacaacatcatatttacaggcttgtaaaggactgaacatggttatttatatatatagatatctgtatatacacacacacatatgtgcacacacacactctctctccattatcgaacgactgactgtaaacctcaccacacagggtggtgccctggccccgaggtcaccccgacttttctaaatcttgtttgagtgaagtcattttttcatgtgttcatactatcattgtagctgtgaagttctggtacagttgtaaaaagagaaattgagttgtttctctatgttcttcagatgtgcagcccacaattcctcgggaaaggtgaacctgaacaacccaagtctctctctgcagagccctgtttctaattgtggtagaaaatattgagacagagcatttgccatgggacatttacagcctttatacaaatgtatttagttctcttttttccaacataaaattcttgttttaagatacaagtaaaattaatctttaaatataaatgtaaattagtacacaaaactaagaatctttagacttatctttgtaactaattagggtggaagttatgaaagaatgtaattcactaaattattttttaaatgaaacctttttttttctttttgaaaccaaatgttaaactatagccttaagaaatgcttggtagaagtgtcctaatgagacaaatttgtacttttatcctcaaggttaacactaatctcctaatccattaaactcttgaacaggtattacaaaggaagaaaacttcaccccttatccttaacatatatagtatatttaaaaaatataaaattgtattgtactaatgtgatgatggattatttaatgaaaaagaaaaaatggctctttttgcaataagtagatacatactgaaaaaatctaaacttacaatgtttatagtcttgtgtgtgcagttatattttatatggacgaccaaattttttattaagatgagtaaatatttgaaccactgaattttaataacaaaattttaaaattggcatgaatacggaatactgcactgtgagatgcaaagtatacagaatctgtggctgggagaaaatttcatcaaatagacaagtaaaaggctcatcagttttagcatctctgctccccagaaaattgtaagcatcctcaccagcctgtggatacattctttatttctagtgacccaatatgcatattaacctgctataactagggctatatgtgtaggtatgtgtatacatatacacaaatgcacatatagagttaacacatttagtgaacacttgtttagtgtcactcagtttgctaggtgctgatatgtacgtatatctcaatgtgtctgtagacttagatacatcctcttgaagcacatccatttctttagcgtctctcagtaagttacagtacttgtttgacttaggtttaagaggcccagctacctatctctgaccttttcaaataggctcatttgggagattcttttgccaggagagattcaactttccaatctaagtattccagagcattgcccaggcagagttggtttgatgtggccagatgttttgagttatttcccttaagtgtttcactggggagagaacagggagtgctcctccagcttcccaaagaaatatgtttttgtaagtggtaggaacatgtgcacacaatagaacatgaaataagttttttaacttgtaaaacatgtcaagatttttccaccaagctagaaaataaaaaacttagttctaccacatccaattaacttacacacccccttccctgtctcaacacctgctttgaccctgcttttctattattacatcagtcagcatcttgtggtccctaacatgaggatgtggctggctcgtggg

SEQ ID NO: 210536 - DNA, 9430 bp, Artificial Sequence
  derived and/or modified sequence
ttccgaacattcttagcatcgctcgcgccgcgccgcgccgcctgagccgagccgagcctctgctgccgccgccgcggccccgccgcccgccgcgggcgcccaccaagcactttgcagactcgcttccaccctgcgggccattccgcgcggcggggcccgggcccggggcggccgcgtccaggcacaggccatgcagtgacgcccccccacccctccacctttgcccggagcgcgggcagcagcccagcgcgccagccggccccggggcaggagcggtgctaggcaggggtggggtggccgggcccagggaccgggagccggggagggagccgggcaccgagcagagggcgggggaagcggcgccgaagtttgcctcggactcgccgggcgctgcggtggctccctgggccgaggactgttgctgccgctgccgccgccgcttcattgcacattcaagtggaaaattttcaggagtcagcagaaacattgtgtccaaaaaagactgagtcgcagttaccaccaaacccaggaggagactctccctggaaaacttcccttccctttcggtttattttcttgaaaaggctccaggcttcggcttggaaaatcccaccgccaaaattgagcccagcagctggagcggcagtgagagccctgccgaaaacatggaaaggatgagtgactctgcagataagccaattgacaatgatgcagaaggggtctggagccccgacatcgagcaaagctttcaggaggccctggctatctatccaccatgtgggaggaggaaaatcatcttatcagacgaaggcaaaatgtatggtaggaatgaattgatagccagatacatcaaactcaggacaggcaagacgaggaccagaaaacaggtgtctagtcacattcaggttcttgccagaaggaaatctcgtgattttcattccaagctaaaggatcagactgcaaaggataaggccctgcagcacatggcggccatgtcctcagcccagatcgtctcggccactgccattcataacaagctggggctgcctgggattccacgcccgaccttcccaggggcgccggggttctggccgggaatgattcaaacagggcagccaggatcctcacaagacgtcaagccttttgtgcagcaggcctaccccatccagccagcggtcacagcccccattccagggtttgagcctgcatcggccccagctccctcagtccctgcctggcaaggtcgctccattggcacaaccaagcttcgcctggtggaattttcagcttttctcgagcagcagcgagacccagactcgtacaacaaacacctcttcgtgcacattgggcatgccaaccattcttacagtgacccattgcttgaatcagtggacattcgtcagatttatgacaaatttcctgaaaagaaaggtggcttaaaggaactgtttggaaagggccctcaaaatgccttcttcctcgtaaaattctgggctgatttaaactgcaatattcaagatgatgctggggctttttatggtgtaaccagtcagtacgagagttctgaaaatatgacagtcacctgttccaccaaagtttgctcctttgggaagcaagtagtagaaaaagtagagacggagtatgcaaggtttgagaatggccgatttgtataccgaataaaccgctccccaatgtgtgaatatatgatcaacttcatccacaagctcaaacacttaccagagaaatatatgatgaacagtgttttggaaaacttcacaattttattggtggtaacaaacagggatacacaagaaactctactctgcatggcctgtgtgtttgaagtttcaaatagtgaacacggagcacaacatcatatttacaggcttgtaaaggactgaacatggttatttatatatatagatatctgtatatacacacacacatatgtgcacacacacactctctctccattatcgaacgactgactgtaaacctcaccacacagggtggtgccctggccccgaggtcaccccgacttttctaaatcttgtttgagtgaagtcattttttcatgtgttcatactatcattgtagctgtgaagttctggtacagttgtaaaaagagaaattgagttgtttctctatgttcttcagatgtgcagcccacaattcctcgggaaaggtgaacctgaacaacccaagtctctctctgcagagccctgtttctaattgtggtagaaaatattgagacagagcatttgccatgggacatttacagcctttatacaaatgtatttagttctcttttttccaacataaaattcttgttttaagatacaagtaaaattaatctttaaatataaatgtaaattagtacacaaaactaagaatctttagacttatctttgtaactaattagggtggaagttatgaaagaatgtaattcactaaattattttttaaatgaaacctttttttttctttttgaaaccaaatgttaaactatagccttaagaaatgcttggtagaagtgtcctaatgagacaaatttgtacttttatcctcaaggttaacactaatctcctaatccattaaactcttgaacaggtattacaaaggaagaaaacttcaccccttatccttaacatatatagtatatttaaaaaatataaaattgtattgtactaatgtgatgatggattatttaatgaaaaagaaaaaatggctctttttgcaataagtagatacatactgaaaaaatctaaacttacaatgtttatagtcttgtgtgtgcagttatattttatatggacgaccaaattttttattaagatgagtaaatatttgaaccactgaattttaataacaaaattttaaaattggcatgaatacggaatactgcactgtgagatgcaaagtatacagaatctgtggctgggagaaaatttcatcaaatagacaagtaaaaggctcatcagttttagcatctctgctccccagaaaattgtaagcatcctcaccagcctgtggatacattctttatttctagtgacccaatatgcatattaacctgctataactagggctatatgtgtaggtatgtgtatacatatacacaaatgcacatatagagttaacacatttagtgaacacttgtttagtgtcactcagtttgctaggtgctgatatgtacgtatatctcaatgtgtctgtagacttagatacatcctcttgaagcacatccatttctttagcgtctctcagtaagttacagtacttgtttgacttaggtttaagaggcccagctacctatctctgaccttttcaaataggctcatttgggagattcttttgccaggagagattcaactttccaatctaagtattccagagcattgcccaggcagagttggtttgatgtggccagatgttttgagttatttcccttaagtgtttcactggggagagaacagggagtgctcctccagcttcccaaagaaatatgtttttgtaagtggtaggaacatgtgcacacaatagaacatgaaataagttttttaacttgtaaaacatgtcaagatttttccaccaagctagaaaataaaaaacttagttctaccacatccaattaacttacacacccccttccctgtctcaacacctgctttgaccctgcttttctattattacatcagtcagcatcttgtggtccctaacatgaggatgtggctggctcgtgggaaacagcaaaacactaagcctgacctctcccaaattgggaagaccagaggagaaagtgcaaaactgtccccatttggaatgcccattccttctagaaaccagttggacagtgctcctctgcccttcataaacagactactgttgggtccctgattccaggctggcctgtgaaggattgccccaggtgtcccctttcacggttgtcacatttacagtgacttctgttgaacacccctcttagggatgtttcttttgctcttatttcctgcatctttccttaagggaagccccatcctctcccaggaccaggagtttatgaccaggcgagcacaaatggctaaaagccaagctgtcctagaacttcagtgggagagctgtctggttcatattctacccaggaatggtacttttcagtgcagccaggagggctcttgggatttcctttccaaagcacaaaaatactgggacccaagaagaacagctagaggacaactctgttggcacagagacggggacagcccagtctgctgacctcacagggtcagctgggcccccctggtgcttcaccacctgcatcctcttgctcagaatgcctttgcagttgagttttctgggtttctatgattgaccttgaggtttactccttgctcttacaacatttctaaggatttttaaaagtttacttcttgtcttgttcttctaaagctttctccaggacagatattttccctgtcttaaccactggtccagtcatcccagtgggcttctctttgtctctcccagattagacctttgggtgagattggcatcacaacatctaatctgagtctgtcttttgtccttcattctgtatggcagtctccctttgttataaaagctttctaaagcatactaaagaagccttcccagagccccgtcttgcttctcttccaggtgctctatcccctcgagaccctctggtgccaggcttgcttcacggccatcttgtgttgtcactgcagagtttggaggccagttttccacagcctaaacagggaggagctgcagaatggggctctggtctctgggcattcatttccctcatagaggctgagaataaaacaaggacttattcacacatgttctagaaccccagaatggcccaagttacctgagaccagggtttctcaaccttgacaccattgacattttggactgggtaattctttgttctgcagagctgtcctttgcactgtaggagatttactaatatccctggcctctacccagtagtaccactagcacctattccccacccagcgtgtctccagatattgtcaaatatcccatcgggtgcaaaatgatccctggtcaagatctgttgcccaagatgttacaggtcacaatgaccacatttgaaattgttttccctttcattttaccctgtgaaagcatctctcctagagccttgcaagaggcaggtgacattgtgtccatatttcttcctgtttcagaacttctgtttcacaacaatttctctctcgctacaagtattctttcactcagcactggggaagttgggaacagctggtcaccatcatccctttaatcaactcacacctgtttaaagagtgtttctgatttgaccttcatcccttagtttactggcgttaaaaaaagtctcagcaattttcattatttctcgtgggtctcattatcaaacctttacttatttcggcatatttcctctgggcttcttctagtttctgccttacaagcaatgctgttctgtaaatttattgaaacctctggaacatttcacctttagagatggaggatggaaggattggtaccagaagagggctaagatacgttttctgtcttgagctgaaagcacagtctactctccttcgttttgtcgatgagaaagttgaggccagaggggaggtgacatgtttagagtcacccagctggttagtgacagaaaaagcgtgagagttgtctaggattcctgccactttggtccctggcctctcctgggggaggctgctgttcttaggtgctctaagcttaatccctcagaatgtgtggacaggtcagcttagaagagatggggagattcaggatccccctgtgccagagcacagcctcaccggatgctgcttcccacactgaagtgtcctgtccgaccattgctatctgaggcatccacaagcaggtaggaaagctggcgagccattttacttcctgaggacaattccccagccacaggctctgagtcaaatttctatttggtaagcatcctagcagcaaagtcctgcactcagaccagccaaaaaacagcccccattccaagtacttggtgtcaaaagtccccgaacgacttttaaacccaagtcttcttaaggtttcagtactgtggtggctttagcagttgtttttgtgcaactataaattatttaaatcatctgagatgacagtcaattttacaaaccaggtacatattaatttgtataattttgtatatgctctggtacactacctgaactaacgaagggtagaactaattctgtttgtcagtgttcacacctgtaacattaggaggatatgtctgcattgcttatttctttatgttggtgtttctgtggcaaagccctgcacatggcatttctgaaaagccttaaatctttaagatgttgcatgtagggtatgcagtgcaaaaggctgcctcagaactgtgagcccttttgtaagctggaagcatttctcttactactgttacttttgtaggaagttttcaattcagagctgccaaagtgttcccgtaagcagtgccttagtaataccttagtcatgccgccagccttttcttacaccaattcctaatgttcatttacgaattggcccaatattggaaacaaaacaagcaaaaattgtcttcatttttgttttgtaagcccattttttctccagttctataggaaactgactgcttggtgtaaaatccgaaactggacacaagtcagttctttcaccacactcaaatgtatataccaaaacaaaaggttgcaacttcatagtttactatgaaaagcaaattgtactttttaatgttgccttttaaattcatgaccaaatacttagctatttgtgaatcttctgcactctagcatgaaagtgcctttggtttgagattccagcttagaaaagtgctgccataataacgataatttgtagagagaccaaaaatattttgagatcaccgtaatgcctttggtttaccgggatgagtaaccaaccacaggcctctgttcacaagagcacgacgtggtccccgcctgctgctagtctgtctgccactgggggcctcccaacatccatagcacacttcagcggaaggaccccagaaactgttgtgtttgtgtgtgctgatgacctagtgtgtcatttcacctcgtcacccagccctgcgtccggatgaggggacttctgcacaaatgacagaatctcggctggtggacagatactacagctttctcctcctccttgtgttcgtgttcagtctctgtggagactttcttttccattcaaatgacagtgcgcacttatctggtttacacaatgataccattttgaaagttggaagcctcaaactgagacgacagtgcagaacaaaacaaaagtgagttagggtcgttaaaattgaagtgttcttcttagggcaaacatgttgactccgagtattgtgtatgaatgtgctacgagaaacttccaaagagcaccattcacaatttggcattttcaaagaatgttccagccctcaaaggggcaactctttaaagtccttgttggcttttatccaaaccttgtagaaattgggaaagctgatagaggtaaggaagacgagtgaaaaggacaagaaggccaaacaccagccaaaaagaaactaggaaaaaaagattttctttgctaatatagatgtaaaaataacatcagacatctttgaaaattagcctctaaactcttaatacatacgttctgtgtgtctctacctggcgtctttaagaatatcctctctgggctctgaaattttaggagtgattcttatccactccaagttgtaagtatttgtagaaatttgtgcaaacaaacaaaaactatcaaatgaaaagaaaatgtactcaacctaacttatagttagcagctggaattctcaactcttccctgccagcactataccacagtgtggaagaaattagtcaaatgcttgttttcctgcttctcttttcaactgttactgtgctttgtttgaaagtagttttctctctcaaagccgttgcttatatcgttaagaatgaaggtttgtgtttaaaatttattgcattgcaaagggtagtttcactgaagtcatgcaccattaaataagatgaaatatttgtatttattgtcctacttcctaagccgtaacttcttttcctctgtgaatttgcattgagtcactcatgctacactacatcgctttagtatttgagatggcatttatgtttcctctcgtttatcatgaaatggggtcagattccatcagattccacctctgtcaggtggactcttgtctgccttccatgatgagattttttttctccttcccctttctttaagagaggctgacagatctaggtgtcaatcaattggaaaccagtctctgattttttttcattagttattttctatcattagtttcactgtgtaaattagatatcaactgcacttctttaaaaaaaaatacatctccctattacctccttgaaagatttacttctgtaggcctttttcaataggctcatgactgcagacaaggaaaaaaaaagtaaaaacaaaaacagtatgtgcctgaaaatgacaaaaaaaaaatttgtaacatttaaaaaagaaacctgaatagcctttaattctttaataatacacttaaattttatgtaaatcggttttcgccacgtgtgtttgttcacattctaaatgacttaatgggattctcacggtctgtgtctttgtgtcacgtgtataaaatgggcttgtgatgtaagcgtttcatctggtcagtggttcctttgatattgtactgctgctgggagtgggctgtggaacctgccttcgggtaactgggttcctcttgggtagattggagagatgggggtgggcgtgggcaaattctcacacatgttttcttaacctatttgcagaaactttcaaaaggcatttgattaaacctcttggcagtacagtattcttgtatttgttaacgtctgtgtttaggtactggtacctttttgttttaaaatgttctaagtgttggctttaaagtgaatttatctttagtatgatagttatatgaaaattataggatttgtgtgcagagaatttttttataaagtgctttgtaaaaaaaaaaaaatgtattctagcttttgcggtacatatgtgtgataactttaatacccatgacagttaagtgcaattatttcatcactctaaaaatgctatttttgtgtcagttcctgcaggtgttttcatgtctttgcaaagtgacacattttgatgccttcttgataaagtggtagacattttgtagctttctagaaactttgtattcatacggtatcaatgaaaaataaagaaaatgaaagtgtgggtcaccttttttatctgc

SEQ ID NO: 210537 - DNA, 8156 bp, Artificial Sequence
  derived and/or modified sequence
agggagtgtggtggcattgctctgcagagacatgaacagctccctgggagacactgctggggaaagatgagtcgagtctacggttttttctcatcctcctgtttattttcttgaaaaggctccaggcttcggcttggaaaatcccaccgccaaaattgagcccagcagctggagcggcagtgagagccctgccgaaaacatggaaaggatgagtgactctgcagataagccaattgacaatgatgcagaaggggtctggagccccgacatcgagcaaagctttcaggaggccctggctatctatccaccatgtgggaggaggaaaatcatcttatcagacgaaggcaaaatgtatggtaggaatgaattgatagccagatacatcaaactcaggacaggcaagacgaggaccagaaaacaggtgtctagtcacattcaggttcttgccagaaggaaatctcgtgattttcattccaagctaaaggatcagactgcaaaggataaggccctgcagcacatggcggccatgtcctcagcccagatcgtctcggccactgccattcataacaagctggggctgcctgggattccacgcccgaccttcccaggggcgccggggttctggccgggaatgattcaaacagggcagccaggatcctcacaagacgtcaagccttttgtgcagcaggcctaccccatccagccagcggtcacagcccccattccagggtttgagcctgcatcggccccagctccctcagtccctgcctggcaaggtcgctccattggcacaaccaagcttcgcctggtggaattttcagcttttctcgagcagcagcgagacccagactcgtacaacaaacacctcttcgtgcacattgggcatgccaaccattcttacagtgacccattgcttgaatcagtggacattcgtcagatttatgacaaatttcctgaaaagaaaggtggcttaaaggaactgtttggaaagggccctcaaaatgccttcttcctcgtaaaattctgggctgatttaaactgcaatattcaagatgatgctggggctttttatggtgtaaccagtcagtacgagagttctgaaaatatgacagtcacctgttccaccaaagtttgctcctttgggaagcaagtagtagaaaaagtagagacggagtatgcaaggtttgagaatggccgatttgtataccgaataaaccgctccccaatgtgtgaatatatgatcaacttcatccacaagctcaaacacttaccagagaaatatatgatgaacagtgttttggaaaacttcacaattttattggtggtaacaaacagggatacacaagaaactctactctgcatggcctgtgtgtttgaagtttcaaatagtgaacacggagcacaacatcatatttacaggcttgtaaaggactgaacatggttatttatatatatagatatctgtatatacacacacacatatgtgcacacacacactctctctccattatcgaacgactgactgtaaacctcaccacacagggtggtgccctggccccgaggtcaccccgacttttctaaatcttgtttgagtgaagtcattttttcatgtgttcatactatcattgtagctgtgaagttctggtacagttgtaaaaagagaaattgagttgtttctctatgttcttcagatgtgcagcccacaattcctcgggaaaggtgaacctgaacaacccaagtctctctctgcagagccctgtttctaattgtggtagaaaatattgagacagagcatttgccatgggacatttacagcctttatacaaatgtatttagttctcttttttccaacataaaattcttgttttaagatacaagtaaaattaatctttaaatataaatgtaaattagtacacaaaactaagaatctttagacttatctttgtaactaattagggtggaagttatgaaagaatgtaattcactaaattattttttaaatgaaacctttttttttctttttgaaaccaaatgttaaactatagccttaagaaatgcttggtagaagtgtcctaatgagacaaatttgtacttttatcctcaaggttaacactaatctcctaatccattaaactcttgaacaggtattacaaaggaagaaaacttcaccccttatccttaacatatatagtatatttaaaaaatataaaattgtattgtactaatgtgatgatggattatttaatgaaaaagaaaaaatggctctttttgcaataagtagatacatactgaaaaaatctaaacttacaatgtttatagtcttgtgtgtgcagttatattttatatggacgaccaaattttttattaagatgagtaaatatttgaaccactgaattttaataacaaaattttaaaattggcatgaatacggaatactgcactgtgagatgcaaagtatacagaatctgtggctgggagaaaatttcatcaaatagacaagtaaaaggctcatcagttttagcatctctgctccccagaaaattgtaagcatcctcaccagcctgtggatacattctttatttctagtgacccaatatgcatattaacctgctataactagggctatatgtgtaggtatgtgtatacatatacacaaatgcacatatagagttaacacatttagtgaacacttgtttagtgtcactcagtttgctaggtgctgatatgtacgtatatctcaatgtgtctgtagacttagatacatcctcttgaagcacatccatttctttagcgtctctcagtaagttacagtacttgtttgacttaggtttaagaggcccagctacctatctctgaccttttcaaataggctcatttgggagattcttttgccaggagagattcaactttccaatctaagtattccagagcattgcccaggcagagttggtttgatgtggccagatgttttgagttatttcccttaagtgtttcactggggagagaacagggagtgctcctccagcttcccaaagaaatatgtttttgtaagtggtaggaacatgtgcacacaatagaacatgaaataagttttttaacttgtaaaacatgtcaagatttttccaccaagctagaaaataaaaaacttagttctaccacatccaattaacttacacacccccttccctgtctcaacacctgctttgaccctgcttttctattattacatcagtcagcatcttgtggtccctaacatgaggatgtggctggctcgtgggaaacagcaaaacactaagcctgacctctcccaaattgggaagaccagaggagaaagtgcaaaactgtccccatttggaatgcccattccttctagaaaccagttggacagtgctcctctgcccttcataaacagactactgttgggtccctgattccaggctggcctgtgaaggattgccccaggtgtcccctttcacggttgtcacatttacagtgacttctgttgaacacccctcttagggatgtttcttttgctcttatttcctgcatctttccttaagggaagccccatcctctcccaggaccaggagtttatgaccaggcgagcacaaatggctaaaagccaagctgtcctagaacttcagtgggagagctgtctggttcatattctacccaggaatggtacttttcagtgcagccaggagggctcttgggatttcctttccaaagcacaaaaatactgggacccaagaagaacagctagaggacaactctgttggcacagagacggggacagcccagtctgctgacctcacagggtcagctgggcccccctggtgcttcaccacctgcatcctcttgctcagaatgcctttgcagttgagttttctgggtttctatgattgaccttgaggtttactccttgctcttacaacatttctaaggatttttaaaagtttacttcttgtcttgttcttctaaagctttctccaggacagatattttccctgtcttaaccactggtccagtcatcccagtgggcttctctttgtctctcccagattagacctttgggtgagattggcatcacaacatctaatctgagtctgtcttttgtccttcattctgtatggcagtctccctttgttataaaagctttctaaagcatactaaagaagccttcccagagccccgtcttgcttctcttccaggtgctctatcccctcgagaccctctggtgccaggcttgcttcacggccatcttgtgttgtcactgcagagtttggaggccagttttccacagcctaaacagggaggagctgcagaatggggctctggtctctgggcattcatttccctcatagaggctgagaataaaacaaggacttattcacacatgttctagaaccccagaatggcccaagttacctgagaccagggtttctcaaccttgacaccattgacattttggactgggtaattctttgttctgcagagctgtcctttgcactgtaggagatttactaatatccctggcctctacccagtagtaccactagcacctattccccacccagcgtgtctccagatattgtcaaatatcccatcgggtgcaaaatgatccctggtcaagatctgttgcccaagatgttacaggtcacaatgaccacatttgaaattgttttccctttcattttaccctgtgaaagcatctctcctagagccttgcaagaggcaggtgacattgtgtccatatttcttcctgtttcagaacttctgtttcacaacaatttctctctcgctacaagtattctttcactcagcactggggaagttgggaacagctggtcaccatcatccctttaatcaactcacacctgtttaaagagtgtttctgatttgaccttcatcccttagtttactggcgttaaaaaaagtctcagcaattttcattatttctcgtgggtctcattatcaaacctttacttatttcggcatatttcctctgggcttcttctagtttctgccttacaagcaatgctgttctgtaaatttattgaaacctctggaacatttcacctttagagatggaggatggaaggattggtaccagaagagggctaagatacgttttctgtcttgagctgaaagcacagtctactctccttcgttttgtcgatgagaaagttgaggccagaggggaggtgacatgtttagagtcacccagctggttagtgacagaaaaagcgtgagagttgtctaggattcctgccactttggtccctggcctctcctgggggaggctgctgttcttaggtgctctaagcttaatccctcagaatgtgtggacaggtcagcttagaagagatggggagattcaggatccccctgtgccagagcacagcctcaccggatgctgcttcccacactgaagtgtcctgtccgaccattgctatctgaggcatccacaagcaggtaggaaagctggcgagccattttacttcctgaggacaattccccagccacaggctctgagtcaaatttctatttggtaagcatcctagcagcaaagtcctgcactcagaccagccaaaaaacagcccccattccaagtacttggtgtcaaaagtccccgaacgacttttaaacccaagtcttcttaaggtttcagtactgtggtggctttagcagttgtttttgtgcaactataaattatttaaatcatctgagatgacagtcaattttacaaaccaggtacatattaatttgtataattttgtatatgctctggtacactacctgaactaacgaagggtagaactaattctgtttgtcagtgttcacacctgtaacattaggaggatatgtctgcattgcttatttctttatgttggtgtttctgtggcaaagccctgcacatggcatttctgaaaagccttaaatctttaagatgttgcatgtagggtatgcagtgcaaaaggctgcctcagaactgtgagcccttttgtaagctggaagcatttctcttactactgttacttttgtaggaagttttcaattcagagctgccaaagtgttcccgtaagcagtgccttagtaataccttagtcatgccgccagccttttcttacaccaattcctaatgttcatttacgaattggcccaatattggaaacaaaacaagcaaaaattgtcttcatttttgttttgtaagcccattttttctccagttctataggaaactgactgcttggtgtaaaatccgaaactggacacaagtcagttctttcaccacactcaaatgtatataccaaaacaaaaggttgcaacttcatagtttactatgaaaagcaaattgtactttttaatgttgccttttaaattcatgaccaaatacttagctatttgtgaatcttctgcactctagcatgaaagtgcctttggtttgagattccagcttagaaaagtgctgccataataacgataatttgtagagagaccaaaaatattttgagatcaccgtaatgcctttggtttaccgggatgagtaaccaaccacaggcctctgttcacaagagcacgacgtggtccccgcctgctgctagtctgtctgccactgggggcctcccaacatccatagcacacttcagcggaaggaccccagaaactgttgtgtttgtgtgtgctgatgacctagtgtgtcatttcacctcgtcacccagccctgcgtccggatgaggggacttctgcacaaatgacagaatctcggctggtggacagatactacagctttctcctcctccttgtgttcgtgttcagtctctgtggagactttcttttccattcaaatgacagtgcgcacttatctggtttacacaatgataccattttgaaagttggaagcctcaaactgagacgacagtgcagaacaaaacaaaagtgagttagggtcgttaaaattgaagtgttcttcttagggcaaacatgttgactccgagtattgtgtatgaatgtgctacgagaaacttccaaagagcaccattcacaatttggcattttcaaagaatgttccagccctcaaaggggcaactctttaaagtccttgttggcttttatccaaaccttgtagaaattgggaaagctgatagaggtaaggaagacgagtgaaaaggacaagaaggccaaacaccagccaaaaagaaactaggaaaaaaagattttctttgctaatatagatgtaaaaataacatcagacatctttgaaaattagcctctaaactcttaatacatacgttctgtgtgtctctacctggcgtctttaagaatatcctctctgggctctgaaattttaggagtgattcttatccactccaagttgtaagtatttgtagaaatttgtgcaaacaaacaaaaactatcaaatgaaaagaaaatgtactcaacctaacttatagttagcagctggaattctcaactcttccctgccagcactataccacagtgtggaagaaattagtcaaatgcttgttttcctgcttctcttttcaactgttactgtgctttgtttgaaagtagttttctctctcaaagccgttgcttatatcgttaagaatgaaggtttgtgtttaaaatttattgcattgcaaagggtagtttcactgaagtcatgcaccattaaataagatgaaatatttgtatttattgtcctacttcctaagccgtaacttcttttcctctgtgaatttgcattgagtcactcatgctacactacatcgctttagtatttgagatggcatttatgtttcctctcgtttatcatgaaatggggtcagattccatcagattccacctctgtcaggtggactcttgtctgccttccatgatgagattttttttctccttcccctttctttaagagaggctgacagatctaggtgtcaatcaattggaaaccagtctctgattttttttcattagttattttctatcattagtttcactgtgtaaattagatatcaactgcacttctttaaaaaaaaatacatctccctattacctccttgaaagatttacttctgtaggcctttttcaataggctcatgactgcagacaaggaaaaaaaaagtaaaaacaaaaacagtatgtgcctgaaaatg

SEQ ID NO: 210538 - DNA, 8477 bp, Artificial Sequence
  derived and/or modified sequence
tgagaggcttcacattctgttggaaaatggatttaatccctaaaaaaagccttgccccattgggtcttcccagtaaatgttgagaggtacggtaggttgagtgtggtttagccttctggctgtgttatttatccatgcatgtttgctttttttggcctattttgtggctctgtattttagtccatgtgctcgtggctgtgcctgtgtaacctgcctggtagccatgcgttatgtattaagttggtgtgtcactgtcaccttcaaggatcagactgcaaaggataaggccctgcagcacatggcggccatgtcctcagcccagatcgtctcggccactgccattcataacaagctggggctgcctgggattccacgcccgaccttcccaggggcgccggggttctggccgggaatgattcaaacagggcagccaggatcctcacaagacgtcaagccttttgtgcagcaggcctaccccatccagccagcggtcacagcccccattccagggtttgagcctgcatcggccccagctccctcagtccctgcctggcaaggtcgctccattggcacaaccaagcttcgcctggtggaattttcagcttttctcgagcagcagcgagacccagactcgtacaacaaacacctcttcgtgcacattgggcatgccaaccattcttacagtgacccattgcttgaatcagtggacattcgtcagatttatgacaaatttcctgaaaagaaaggtggcttaaaggaactgtttggaaagggccctcaaaatgccttcttcctcgtaaaattctgggctgatttaaactgcaatattcaagatgatgctggggctttttatggtgtaaccagtcagtacgagagttctgaaaatatgacagtcacctgttccaccaaagtttgctcctttgggaagcaagtagtagaaaaagtagagacggagtatgcaaggtttgagaatggccgatttgtataccgaataaaccgctccccaatgtgtgaatatatgatcaacttcatccacaagctcaaacacttaccagagaaatatatgatgaacagtgttttggaaaacttcacaattttattggtggtaacaaacagggatacacaagaaactctactctgcatggcctgtgtgtttgaagtttcaaatagtgaacacggagcacaacatcatatttacaggcttgtaaaggactgaacatggttatttatatatatagatatctgtatatacacacacacatatgtgcacacacacactctctctccattatcgaacgactgactgtaaacctcaccacacagggtggtgccctggccccgaggtcaccccgacttttctaaatcttgtttgagtgaagtcattttttcatgtgttcatactatcattgtagctgtgaagttctggtacagttgtaaaaagagaaattgagttgtttctctatgttcttcagatgtgcagcccacaattcctcgggaaaggtgaacctgaacaacccaagtctctctctgcagagccctgtttctaattgtggtagaaaatattgagacagagcatttgccatgggacatttacagcctttatacaaatgtatttagttctcttttttccaacataaaattcttgttttaagatacaagtaaaattaatctttaaatataaatgtaaattagtacacaaaactaagaatctttagacttatctttgtaactaattagggtggaagttatgaaagaatgtaattcactaaattattttttaaatgaaacctttttttttctttttgaaaccaaatgttaaactatagccttaagaaatgcttggtagaagtgtcctaatgagacaaatttgtacttttatcctcaaggttaacactaatctcctaatccattaaactcttgaacaggtattacaaaggaagaaaacttcaccccttatccttaacatatatagtatatttaaaaaatataaaattgtattgtactaatgtgatgatggattatttaatgaaaaagaaaaaatggctctttttgcaataagtagatacatactgaaaaaatctaaacttacaatgtttatagtcttgtgtgtgcagttatattttatatggacgaccaaattttttattaagatgagtaaatatttgaaccactgaattttaataacaaaattttaaaattggcatgaatacggaatactgcactgtgagatgcaaagtatacagaatctgtggctgggagaaaatttcatcaaatagacaagtaaaaggctcatcagttttagcatctctgctccccagaaaattgtaagcatcctcaccagcctgtggatacattctttatttctagtgacccaatatgcatattaacctgctataactagggctatatgtgtaggtatgtgtatacatatacacaaatgcacatatagagttaacacatttagtgaacacttgtttagtgtcactcagtttgctaggtgctgatatgtacgtatatctcaatgtgtctgtagacttagatacatcctcttgaagcacatccatttctttagcgtctctcagtaagttacagtacttgtttgacttaggtttaagaggcccagctacctatctctgaccttttcaaataggctcatttgggagattcttttgccaggagagattcaactttccaatctaagtattccagagcattgcccaggcagagttggtttgatgtggccagatgttttgagttatttcccttaagtgtttcactggggagagaacagggagtgctcctccagcttcccaaagaaatatgtttttgtaagtggtaggaacatgtgcacacaatagaacatgaaataagttttttaacttgtaaaacatgtcaagatttttccaccaagctagaaaataaaaaacttagttctaccacatccaattaacttacacacccccttccctgtctcaacacctgctttgaccctgcttttctattattacatcagtcagcatcttgtggtccctaacatgaggatgtggctggctcgtgggaaacagcaaaacactaagcctgacctctcccaaattgggaagaccagaggagaaagtgcaaaactgtccccatttggaatgcccattccttctagaaaccagttggacagtgctcctctgcccttcataaacagactactgttgggtccctgattccaggctggcctgtgaaggattgccccaggtgtcccctttcacggttgtcacatttacagtgacttctgttgaacacccctcttagggatgtttcttttgctcttatttcctgcatctttccttaagggaagccccatcctctcccaggaccaggagtttatgaccaggcgagcacaaatggctaaaagccaagctgtcctagaacttcagtgggagagctgtctggttcatattctacccaggaatggtacttttcagtgcagccaggagggctcttgggatttcctttccaaagcacaaaaatactgggacccaagaagaacagctagaggacaactctgttggcacagagacggggacagcccagtctgctgacctcacagggtcagctgggcccccctggtgcttcaccacctgcatcctcttgctcagaatgcctttgcagttgagttttctgggtttctatgattgaccttgaggtttactccttgctcttacaacatttctaaggatttttaaaagtttacttcttgtcttgttcttctaaagctttctccaggacagatattttccctgtcttaaccactggtccagtcatcccagtgggcttctctttgtctctcccagattagacctttgggtgagattggcatcacaacatctaatctgagtctgtcttttgtccttcattctgtatggcagtctccctttgttataaaagctttctaaagcatactaaagaagccttcccagagccccgtcttgcttctcttccaggtgctctatcccctcgagaccctctggtgccaggcttgcttcacggccatcttgtgttgtcactgcagagtttggaggccagttttccacagcctaaacagggaggagctgcagaatggggctctggtctctgggcattcatttccctcatagaggctgagaataaaacaaggacttattcacacatgttctagaaccccagaatggcccaagttacctgagaccagggtttctcaaccttgacaccattgacattttggactgggtaattctttgttctgcagagctgtcctttgcactgtaggagatttactaatatccctggcctctacccagtagtaccactagcacctattccccacccagcgtgtctccagatattgtcaaatatcccatcgggtgcaaaatgatccctggtcaagatctgttgcccaagatgttacaggtcacaatgaccacatttgaaattgttttccctttcattttaccctgtgaaagcatctctcctagagccttgcaagaggcaggtgacattgtgtccatatttcttcctgtttcagaacttctgtttcacaacaatttctctctcgctacaagtattctttcactcagcactggggaagttgggaacagctggtcaccatcatccctttaatcaactcacacctgtttaaagagtgtttctgatttgaccttcatcccttagtttactggcgttaaaaaaagtctcagcaattttcattatttctcgtgggtctcattatcaaacctttacttatttcggcatatttcctctgggcttcttctagtttctgccttacaagcaatgctgttctgtaaatttattgaaacctctggaacatttcacctttagagatggaggatggaaggattggtaccagaagagggctaagatacgttttctgtcttgagctgaaagcacagtctactctccttcgttttgtcgatgagaaagttgaggccagaggggaggtgacatgtttagagtcacccagctggttagtgacagaaaaagcgtgagagttgtctaggattcctgccactttggtccctggcctctcctgggggaggctgctgttcttaggtgctctaagcttaatccctcagaatgtgtggacaggtcagcttagaagagatggggagattcaggatccccctgtgccagagcacagcctcaccggatgctgcttcccacactgaagtgtcctgtccgaccattgctatctgaggcatccacaagcaggtaggaaagctggcgagccattttacttcctgaggacaattccccagccacaggctctgagtcaaatttctatttggtaagcatcctagcagcaaagtcctgcactcagaccagccaaaaaacagcccccattccaagtacttggtgtcaaaagtccccgaacgacttttaaacccaagtcttcttaaggtttcagtactgtggtggctttagcagttgtttttgtgcaactataaattatttaaatcatctgagatgacagtcaattttacaaaccaggtacatattaatttgtataattttgtatatgctctggtacactacctgaactaacgaagggtagaactaattctgtttgtcagtgttcacacctgtaacattaggaggatatgtctgcattgcttatttctttatgttggtgtttctgtggcaaagccctgcacatggcatttctgaaaagccttaaatctttaagatgttgcatgtagggtatgcagtgcaaaaggctgcctcagaactgtgagcccttttgtaagctggaagcatttctcttactactgttacttttgtaggaagttttcaattcagagctgccaaagtgttcccgtaagcagtgccttagtaataccttagtcatgccgccagccttttcttacaccaattcctaatgttcatttacgaattggcccaatattggaaacaaaacaagcaaaaattgtcttcatttttgttttgtaagcccattttttctccagttctataggaaactgactgcttggtgtaaaatccgaaactggacacaagtcagttctttcaccacactcaaatgtatataccaaaacaaaaggttgcaacttcatagtttactatgaaaagcaaattgtactttttaatgttgccttttaaattcatgaccaaatacttagctatttgtgaatcttctgcactctagcatgaaagtgcctttggtttgagattccagcttagaaaagtgctgccataataacgataatttgtagagagaccaaaaatattttgagatcaccgtaatgcctttggtttaccgggatgagtaaccaaccacaggcctctgttcacaagagcacgacgtggtccccgcctgctgctagtctgtctgccactgggggcctcccaacatccatagcacacttcagcggaaggaccccagaaactgttgtgtttgtgtgtgctgatgacctagtgtgtcatttcacctcgtcacccagccctgcgtccggatgaggggacttctgcacaaatgacagaatctcggctggtggacagatactacagctttctcctcctccttgtgttcgtgttcagtctctgtggagactttcttttccattcaaatgacagtgcgcacttatctggtttacacaatgataccattttgaaagttggaagcctcaaactgagacgacagtgcagaacaaaacaaaagtgagttagggtcgttaaaattgaagtgttcttcttagggcaaacatgttgactccgagtattgtgtatgaatgtgctacgagaaacttccaaagagcaccattcacaatttggcattttcaaagaatgttccagccctcaaaggggcaactctttaaagtccttgttggcttttatccaaaccttgtagaaattgggaaagctgatagaggtaaggaagacgagtgaaaaggacaagaaggccaaacaccagccaaaaagaaactaggaaaaaaagattttctttgctaatatagatgtaaaaataacatcagacatctttgaaaattagcctctaaactcttaatacatacgttctgtgtgtctctacctggcgtctttaagaatatcctctctgggctctgaaattttaggagtgattcttatccactccaagttgtaagtatttgtagaaatttgtgcaaacaaacaaaaactatcaaatgaaaagaaaatgtactcaacctaacttatagttagcagctggaattctcaactcttccctgccagcactataccacagtgtggaagaaattagtcaaatgcttgttttcctgcttctcttttcaactgttactgtgctttgtttgaaagtagttttctctctcaaagccgttgcttatatcgttaagaatgaaggtttgtgtttaaaatttattgcattgcaaagggtagtttcactgaagtcatgcaccattaaataagatgaaatatttgtatttattgtcctacttcctaagccgtaacttcttttcctctgtgaatttgcattgagtcactcatgctacactacatcgctttagtatttgagatggcatttatgtttcctctcgtttatcatgaaatggggtcagattccatcagattccacctctgtcaggtggactcttgtctgccttccatgatgagattttttttctccttcccctttctttaagagaggctgacagatctaggtgtcaatcaattggaaaccagtctctgattttttttcattagttattttctatcattagtttcactgtgtaaattagatatcaactgcacttctttaaaaaaaaatacatctccctattacctccttgaaagatttacttctgtaggcctttttcaataggctcatgactgcagacaaggaaaaaaaaagtaaaaacaaaaacagtatgtgcctgaaaatgacaaaaaaaaaatttgtaacatttaaaaaagaaacctgaatagcctttaattctttaataatacacttaaattttatgtaaatcggttttcgccacgtgtgtttgttcacattctaaatgacttaatgggattctcacggtctgtgtctttgtgtcacgtgtataaaatgggcttgtgatgtaagcgtttcatctggtcagtggttcctttgatattgtactgctgctgggagtgggctgtggaacctgccttcgggtaactgggttcctcttgggtagattggagagatgggggtgggcgtgggcaaattctcacacatgttttcttaacctatttgcagaaactttcaaaaggcatttgattaaacctcttggcagtacagtattcttgtatttgttaacgtctgtgtttaggtactggtacctttttgttttaaaatgttctaagtgttggctttaaagtgaatttatctttagtatgatagttatatgaaaattataggatttgtgtgcagagaatttttttataaagtgctttgt

SEQ ID NO: 210539 - DNA, 477 bp, Artificial Sequence
  derived and/or modified sequence
gtgacgcccccccacccctccacctttgcccggagcgcgggcagcagcccagcgcgccagccggccccggggcaggagcggtgctaggcaggggtggggtggccgggcccagggaccgggagccggggagggagccgggcaccgagcagagggcgggggaagcggcgccgaagtttgcctcggactcgccgggcgctgcggtggctccctgggccgaggtttattttcttgaaaaggctccaggcttcggcttggaaaatcccaccgccaaaattgagcccagcagctggagcggcagtgagagccctgccgaaaacatggaaaggatgagtgactctgcagataagccaattgacaatgatgcagaaggggtctggagccccgacatcgagcaaagctttcaggaggccctggctatctatccaccatgtgggaggaggaaaatcatcttatcagacgaaggcaaaatgtatggta

SEQ ID NO: 210540 - DNA, 2544 bp, Artificial Sequence
  derived and/or modified sequence
ggccgcgtccaggcacaggccatgcagtgacgcccccccacccctccacctttgcccggagcgcgggcagcagcccagcgcgccagccggccccggggcaggagcggtgctaggcaggggtggggtggccgggcccagggaccgggagccggggagggagccgggcaccgagcagagggcgggggaagcggcgccgaagtttgcctcggactcgccgggcgctgcggtggctccctgggccgaggactgttgctgccgctgccgccgccgcttcattgcacattcaagtggaaaattttcaggagtcagcagaaacattgtgtccaaaaaagactgagtcgcagttaccaccaaacccaggaggagactctccctggaaaacttcccttccctttcggtttattttcttgaaaaggctccaggcttcggcttggaaaatcccaccgccaaaattgagcccagcagctggagcggcagtgagagccctgccgaaaacatggaaaggatgagtgactctgcagataagccaattgacaatgatgcagaaggggtctggagccccgacatcgagcaaagctttcaggaggccctggctatctatccaccatgtgggaggaggaaaatcatcttatcagacgaaggcaaaatgtatggtaggaatgaattgatagccagatacatcaaactcaggacaggcaagacgaggaccagaaaacaggtgtctagtcacattcaggttcttgccagaaggaaatctcgtgattttcattccaagctaaaggatcagactgcaaaggataaggccctgcagcacatggcggccatgtcctcagcccagatcgtctcggccactgccattcataacaagctggggctgcctgggattccacgcccgaccttcccaggggcgccggggttctggccgggaatgattcaaacagggcagccaggatcctcacaagacgtcaagccttttgtgcagcaggcctaccccatccagccagcggtcacagcccccattccagggtttgagcctgcatcggccccagctccctcagtccctgcctggcaaggtcgctccattggcacaaccaagcttcgcctggtggaattttcagcttttctcgagcagcagcgagacccagactcgtacaacaaacacctcttcgtgcacattgggcatgccaaccattcttacagtgacccattgcttgaatcagtggacattcgtcagatttatgacaaatttcctgaaaagaaaggtggcttaaaggaactgtttggaaagggccctcaaaatgccttcttcctcgtaaaattctgggctgatttaaactgcaatattcaagatgatgctggggctttttatggtgtaaccagtcagtacgagagttctgaaaatatgacagtcacctgttccaccaaagtttgctcctttgggaagcaagtagtagaaaaagtagagacggagtatgcaaggtttgagaatggccgatttgtataccgaataaaccgctccccaatgtgtgaatatatgatcaacttcatccacaagctcaaacacttaccagagaaatatatgatgaacagtgttttggaaaacttcacaattttattggtggtaacaaacagggatacacaagaaactctactctgcatggcctgtgtgtttgaagtttcaaatagtgaacacggagcacaacatcatatttacaggcttgtaaaggactgaacatggttatttatatatatagatatctgtatatacacacacacatatgtgcacacacacactctctctccattatcgaacgactgactgtaaacctcaccacacagggtggtgccctggccccgaggtcaccccgacttttctaaatcttgtttgagtgaagtcattttttcatgtgttcatactatcattgtagctgtgaagttctggtacagttgtaaaaagagaaattgagttgtttctctatgttcttcagatgtgcagcccacaattcctcgggaaaggtgaacctgaacaacccaagtctctctctgcagagccctgtttctaattgtggtagaaaatattgagacagagcatttgccatgggacatttacagcctttatacaaatgtatttagttctcttttttccaacataaaattcttgttttaagatacaagtaaaattaatctttaaatataaatgtaaattagtacacaaaactaagaatctttagacttatctttgtaactaattagggtggaagttatgaaagaatgtaattcactaaattattttttaaatgaaacctttttttttctttttgaaaccaaatgttaaactatagccttaagaaatgcttggtagaagtgtcctaatgagacaaatttgtacttttatcctcaaggttaacactaatctcctaatccattaaactcttgaacaggtattacaaaggaagaaaacttcaccccttatccttaacatatatagtatatttaaaaaatataaaattgtattgtactaatgtgatgatggattatttaatg

SEQ ID NO: 210541 - protein, 859 aa, Artificial Sequence
  derived and/or modified sequence
MEPLSHRGLPRLSWIDTLYSNFSYGTDEYDGEGNEEQKGPPEGSETMPYIDESPTMSPQLSARSQGGGDGVSPTPPEGLAPGVEAGKGLEMRKLVLSGFLASEEIYINQLEALLLPMKPLKATATTSQPVLTIQQIETIFYKIQDIYEIHKEFYDNLCPKVQQWDSQVTMGHLFQKLASQLGVYKAFVDNYKVALETAEKCSQSNNQFQKISEELKVKGPKDSKDSHTSVTMEALLYKPIDRVTRSTLVLHDLLKHTPVDHPDYPLLQDALRISQNFLSSINEDIDPRRTAVTTPKGETRQLVKDGFLVEVSESSRKLRHVFLFTDVLLCAKLKKTSAGKHQQYDCKWYIPLADLVFPSPEESEASPQVHPFPDHELEDMKMKISALKSEIQKEKANKGQSRAIERLKKKMFENEFLLLLNSPTIPFRIHNRNGKSYLFLLSSDYERSEWREAIQKLQKKDLQAFVLSSVELQVLTGSCFKLRTVHNIPVTSNKDDDESPGLYGFLHVIVHSAKGFKQSANLYCTLEVDSFGYFVSKAKTRVFRDTAEPKWDEEFEIELEGSQSLRILCYEKCYDKTKVNKDNNEIVDKIMGKGQIQLDPQTVETKNWHTDVIEMNGIKVEFSMKFTSRDMSLKRTPSKKQTGVFGVKISVVTKRERSKVPYIVRQCVEEVEKRGIEEVGIYRISGVATDIQALKAVFDANNKDILLMLSDMDINAIAGTLKLYFRELPEPLLTDRLYPAFMEGIALSDPAAKENCMMHLLRSLPDPNLITFLFLLEHLKRVAEKEPINKMSLHNLATVFGPTLLRPSEVESKAHLTSAADIWSHDVMAQVQVLLYYLQHPPISFAELKRNTLYFSTDV

SEQ ID NO: 210542 - DNA, 2580 bp, Artificial Sequence
  derived and/or modified sequence
atggaacctctctctcacaggggccttcccaggctgagctggattgacacgctctacagcaactttagctacggcacagacgagtacgatggagaagggaacgaggaacagaaagggccacctgaaggatcagagacaatgccatacattgacgaaagccccacaatgtcccctcagctcagtgcccggtctcagggggggggggatggggtcagtcccacaccgccagagggactggccccgggtgtggaggccggtaagggactcgagatgcgcaaacttgtactgtcaggcttcctagcttccgaggagatttacattaatcagctggaggcgttgctgctccccatgaagcctttaaaggctaccgccacaacttctcaaccagttcttactattcagcagatcgagaccatcttctataagatccaggatatctatgagatccacaaggagttctatgacaacctgtgcccaaaggttcagcagtgggactcacaggtgactatgggccacctctttcaaaaacttgctagtcagctgggggtgtataaggcctttgtggacaattacaaggtcgccctggaaacagctgagaaatgtagccagtcaaataatcagtttcagaaaatttctgaagagctgaaggtaaaaggccctaaggattctaaagactctcatactagcgtgaccatggaagctttgctgtataagcccatagatagggtgacccggtccacccttgtcttgcatgatctgcttaagcataccccggtggatcacccggattaccccctactgcaggatgcgcttcggatcagtcagaatttcctttccagcattaacgaagacatagaccctagacgtaccgccgtaactacgcctaagggggagacccgtcagctcgttaaggacggatttctggtcgaagtgagcgagagctcacgaaagctcaggcacgtcttcttattcacagacgtgttactgtgtgccaagctgaagaaaacatcagccggcaaacatcaacaatatgattgcaaatggtacataccccttgcagacctggtctttccctcacccgaggagagcgaagcaagtccgcaagtccacccgttccctgaccatgagctcgaggacatgaagatgaaaattagcgccctgaagagcgaaatccaaaaagagaaggctaacaaaggtcaaagtcgtgccattgagcggctgaagaagaagatgttcgagaacgaattcttgctgctcctcaacagcccaacgatccccttccgtatccacaacagaaatggcaagagctacctgttcctgcttagctccgactacgagcggtcagagtggcgcgaagctatccaaaaattacagaagaaggatctccaggcattcgtgttgtcatcagttgaattgcaggtgctgactgggtcttgttttaaactaaggaccgtacacaatatacctgttactagcaacaaggatgacgacgaaagtcctggactgtacgggtttctgcatgtgattgtgcatagcgctaagggctttaagcagtccgcgaacctgtattgtacgctggaagtggattcctttggatatttcgtgtcaaaggctaagactcgggtttttcgcgatacagccgaaccaaagtgggatgaagagtttgagatcgagctcgagggtagccagagtcttaggatcctctgctacgagaaatgctatgataaaactaaagtaaataaggataataatgagattgtcgacaagattatggggaagggccagatacaactggacccccagacagtagagaccaaaaattggcacactgacgttatcgagatgaatggaattaaggtggaatttagcatgaaattcacaagccgggacatgtcattaaaaaggactcctagtaagaagcagaccggggtgtttggggtcaaaatctccgtcgttacaaagagagaacggtccaaggttccctatatcgtgaggcagtgtgtggaagaggtcgaaaagcgagggattgaggaagtaggtatttatagaatctctggggttgctaccgacatccaagcgttaaaggccgtctttgatgccaataataaagatatattactgatgttatctgatatggatatcaacgctatcgccggaacattaaagttatatttcagggagctgccagagccactcttgaccgataggttatatcctgcctttatggaaggcatcgccttgtctgacccggctgcaaaagaaaattgcatgatgcatttactgcggtctctgccagatcccaatctcatcacattcctattcctcctggaacacctgaagcgagtggctgaaaaagaacctattaacaagatgtccctgcataatctagccactgtcttcggacctactctgctccggccttctgaagtggagagcaaggctcaccttacaagcgccgctgatatctggagccacgatgttatggcgcaggtgcaggtcctcctttactacttacagcacccaccaataagcttcgccgagctgaaacgcaacaccctgtacttcagcacagacgtgtag

SEQ ID NO: 210543 - DNA, 2442 bp, Artificial Sequence
  derived and/or modified sequence
atgccgtacatcgacgaaagcccgaccatgtccccccagctgagtgcgagatcacaaggcggcggtgacggagtctcccctacacctcctgagggtctggcacctggcgttgaggctggaaagggactggaaatgagaaagctggtgctaagcgggttcctcgcttccgaggagatatacattaaccagctggaggctctgctccttcctatgaaaccattgaaggctactgcgacaactagtcagcccgtgctgacaattcaacaaatcgaaacaatcttctacaaaattcaggatatttatgaaatccacaaggaattctacgataacctgtgccctaaggtccagcagtgggacagccaagtgactatgggtcacctttttcagaagcttgcatcccagctgggagtgtataaagccttcgtggataattataaggtggcactggaaaccgccgagaaatgtagtcagtctaacaaccagttccagaaaatctccgaggaactgaaggtcaaaggcccaaaagatagcaaggattcacatacgagtgtaaccatggaggcacttctgtataaaccgatcgatagggttacaagatccaccctcgtcctgcatgatttgctgaagcacacccctgtggaccatcccgactacccactgctccaagacgccctgagaattagtcagaatttcttgagctcaataaacgaggacatagatcctcgccgcaccgctgtgaccactcccaaaggagaaaccagacagctcgttaaggacggttttctggtggaggtcagtgaatcatcccgtaagctacggcatgtgtttctcttcaccgacgtgctactgtgtgcgaagctaaagaagacctccgccgggaagcatcaacagtatgattgtaagtggtatatccccctggcagacctagtctttccttcccccgaggagagcgaagcttcgccccaggtgcatccctttcccgaccatgaactcgaagatatgaagatgaagatctcagcgctgaagtctgagatccagaaagaaaaagcaaacaaaggccagagccgggccatcgaaagactgaagaagaagatgttcgagaatgaatttctcctgctacttaactctccgacaattccattcaggatccataatcgtaatggaaaatcttacctgttcctgctctcttccgattacgagcgctctgagtggcgggaggccattcagaaactacagaagaaggaccttcaggcctttgtgctctcctcggtggagctccaagtcctgacaggatcttgttttaaactgcgcacagtgcacaacattcctgtaaccagcaacaaagacgatgatgagtctcctggcctctacggctttctacatgtcattgtccacagcgcaaaggggtttaaacagtcggctaacctgtactgcacactcgaggtagattctttcggctatttcgtgtctaaggcgaagacccgagtcttccgcgataccgcagaacccaaatgggatgaggagtttgagatcgagcttgagggttctcaatccctgcgcattctttgttatgaaaaatgctatgacaagactaaggtgaacaaggacaataatgaaatagtggacaagatcatgggcaagggacagatacagcttgacccccagacagtggagactaagaactggcataccgacgtcatagaaatgaacgggatcaaggtggaattttccatgaagttcaccagtagggacatgagcctgaaacggactcccagtaaaaaacagactggcgtttttggggtgaagataagcgtggttacgaagcgggagaggagtaaagtcccatacatagtgagacagtgcgtcgaggaagtggagaagagggggatcgaggaggtcggaatatatagaattagtggcgtagctacagacatacaggccctgaaggccgtgtttgatgcgaataacaaggatattctcttgatgctgagtgacatggatattaatgccattgccggcacactgaagctgtattttcgagaactacccgaaccattattaacggaccgattgtaccctgcctttatggaaggaattgccctgagcgacccagcagctaaagagaactgcatgatgcatctcttgcgttctcttccggatcctaacctgatcacattcctgttccttctcgaacatctgaaacgagttgctgagaaagaaccaatcaataaaatgtcacttcataacctggccaccgtctttggacctactcttcttaggccgagcgaggtggaatcaaaagcccacttgacttccgcggctgatatctggtcacacgatgtcatggctcaggtccaggtactgctttattatctgcaacatcctccgatctcctttgccgagctgaagcgaaacacactctacttcagcactgatgtgtag

SEQ ID NO: 210544 - DNA, 2580 bp, Artificial Sequence
  derived and/or modified sequence
atggagcccctgagccaccggggcctgccccggctgtcctggattgacaccctgtacagcaacttctcctatggaacagatgaatatgatggagagggcaatgaggagcagaagggccccccagagggcagcgagaccatgccctacattgatgagagccccaccatgagcccccagctgagcgcccggagccagggcggcggagatggagtgagccccaccccacctgagggcctggcccctggggtggaggccggcaagggcctggagatgaggaagctggtgctgagcggcttcctggccagcgaggagatctacatcaaccagctggaggccctgctgctgcccatgaagcccctgaaggccacagccaccaccagccagcctgtgctgaccatccagcagatcgagaccatcttctacaagatccaggacatctatgagatccacaaggagttctatgacaacctgtgccccaaggtgcagcagtgggacagccaggtgaccatgggccacctgttccagaagctggccagccagctgggcgtgtacaaggcctttgtggacaactacaaggtggccctggagacagctgagaagtgcagccagagcaacaaccagttccagaagatcagcgaggagctgaaggtgaagggccccaaggacagcaaggacagccacacctctgtgaccatggaggccctgctgtacaagcccatcgacagagtgaccaggagcaccctggtgctgcatgacctgctgaagcacacccctgtggaccacccagactaccccctgctgcaggatgccctgcgcatcagccagaacttcctgagcagcatcaatgaagatattgaccccaggagaacagctgtgaccacccccaagggggagacccggcagctggtgaaggatggcttcctggtggaggtgtctgagagcagcaggaagctgcggcacgtgttcctgttcacagatgtgctgctgtgtgccaagctgaagaagaccagcgctgggaagcaccagcagtatgactgcaagtggtacatccccctggccgacctggtgttccccagccctgaggagagcgaggccagcccccaggtgcaccccttcccagaccacgagctggaggacatgaagatgaagatcagcgccctgaagtctgagatccagaaggagaaggccaacaagggccagagccgggccatcgagcggctgaagaagaagatgtttgaaaatgagttcctgctgctgctgaacagccccaccatccccttccgcatccacaacagaaatggcaagagctacctgttcctgctgagcagtgactatgaaagaagtgagtggagggaggccatccagaagctgcagaagaaggacctgcaggcctttgtgctgagctctgtggagctgcaggtgctgaccggcagctgcttcaagctgaggacagtgcacaacatccctgtgaccagcaacaaggatgatgatgagagccctggcctgtatggcttcctgcacgtgattgtgcacagcgccaagggcttcaagcagagcgccaacctgtactgcaccctggaggtggacagctttggctactttgtgtccaaggccaagaccagggtcttccgggacacagctgagcccaagtgggatgaggagtttgaaattgagctggagggcagccagagcctgcgcatcctgtgctatgagaagtgctatgacaagaccaaggtgaacaaggacaacaatgagatcgtggacaagatcatgggcaagggccagatccagctggacccccagacagtggagaccaagaactggcacacagatgtgattgagatgaatggcatcaaggtggagttctccatgaagttcaccagccgggacatgagcctgaagaggacccccagcaagaagcagacaggagtgtttggagtgaagatctctgtggtgaccaagcgggagaggagcaaggtgccctacatcgtgcggcagtgtgtggaggaggtggagaagaggggcatcgaggaggtgggcatctaccgcatctctggagtggccacagacatccaggccctgaaggctgtgtttgatgccaacaacaaggacatcctgctgatgctgagtgacatggacatcaatgccatcgccggcaccctgaagctgtacttccgggagctgcctgagcccctgctgacagaccggctgtacccagccttcatggagggcatcgccctgagtgaccctgctgccaaggagaactgcatgatgcacctgctgcggagcctgcctgaccccaacctgatcaccttcctgttcctgctggagcacctgaagagggtggccgagaaggagcccatcaacaagatgagcctgcacaacctggccaccgtgtttggccccaccctgctgcggcccagcgaggtggagagcaaggcccacctgaccagcgctgctgacatctggagccatgatgtgatggcccaggtgcaggtgctgctgtactacctgcagcacccccccatcagctttgctgagctgaagaggaacaccctgtacttcagcacagatgtgtag

SEQ ID NO: 210545 - DNA, 2442 bp, Artificial Sequence
  derived and/or modified sequence
atgccctacattgatgagagccccaccatgagcccccagctgagcgcccggagccagggcggcggagatggagtgagccccaccccacctgagggcctggcccctggggtggaggccggcaagggcctggagatgaggaagctggtgctgagcggcttcctggccagcgaggagatctacatcaaccagctggaggccctgctgctgcccatgaagcccctgaaggccacagccaccaccagccagcctgtgctgaccatccagcagatcgagaccatcttctacaagatccaggacatctatgagatccacaaggagttctatgacaacctgtgccccaaggtgcagcagtgggacagccaggtgaccatgggccacctgttccagaagctggccagccagctgggcgtgtacaaggcctttgtggacaactacaaggtggccctggagacagctgagaagtgcagccagagcaacaaccagttccagaagatcagcgaggagctgaaggtgaagggccccaaggacagcaaggacagccacacctctgtgaccatggaggccctgctgtacaagcccatcgacagagtgaccaggagcaccctggtgctgcatgacctgctgaagcacacccctgtggaccacccagactaccccctgctgcaggatgccctgcgcatcagccagaacttcctgagcagcatcaatgaagatattgaccccaggagaacagctgtgaccacccccaagggggagacccggcagctggtgaaggatggcttcctggtggaggtgtctgagagcagcaggaagctgcggcacgtgttcctgttcacagatgtgctgctgtgtgccaagctgaagaagaccagcgctgggaagcaccagcagtatgactgcaagtggtacatccccctggccgacctggtgttccccagccctgaggagagcgaggccagcccccaggtgcaccccttcccagaccacgagctggaggacatgaagatgaagatcagcgccctgaagtctgagatccagaaggagaaggccaacaagggccagagccgggccatcgagcggctgaagaagaagatgtttgaaaatgagttcctgctgctgctgaacagccccaccatccccttccgcatccacaacagaaatggcaagagctacctgttcctgctgagcagtgactatgaaagaagtgagtggagggaggccatccagaagctgcagaagaaggacctgcaggcctttgtgctgagctctgtggagctgcaggtgctgaccggcagctgcttcaagctgaggacagtgcacaacatccctgtgaccagcaacaaggatgatgatgagagccctggcctgtatggcttcctgcacgtgattgtgcacagcgccaagggcttcaagcagagcgccaacctgtactgcaccctggaggtggacagctttggctactttgtgtccaaggccaagaccagggtcttccgggacacagctgagcccaagtgggatgaggagtttgaaattgagctggagggcagccagagcctgcgcatcctgtgctatgagaagtgctatgacaagaccaaggtgaacaaggacaacaatgagatcgtggacaagatcatgggcaagggccagatccagctggacccccagacagtggagaccaagaactggcacacagatgtgattgagatgaatggcatcaaggtggagttctccatgaagttcaccagccgggacatgagcctgaagaggacccccagcaagaagcagacaggagtgtttggagtgaagatctctgtggtgaccaagcgggagaggagcaaggtgccctacatcgtgcggcagtgtgtggaggaggtggagaagaggggcatcgaggaggtgggcatctaccgcatctctggagtggccacagacatccaggccctgaaggctgtgtttgatgccaacaacaaggacatcctgctgatgctgagtgacatggacatcaatgccatcgccggcaccctgaagctgtacttccgggagctgcctgagcccctgctgacagaccggctgtacccagccttcatggagggcatcgccctgagtgaccctgctgccaaggagaactgcatgatgcacctgctgcggagcctgcctgaccccaacctgatcaccttcctgttcctgctggagcacctgaagagggtggccgagaaggagcccatcaacaagatgagcctgcacaacctggccaccgtgtttggccccaccctgctgcggcccagcgaggtggagagcaaggcccacctgaccagcgctgctgacatctggagccatgatgtgatggcccaggtgcaggtgctgctgtactacctgcagcacccccccatcagctttgctgagctgaagaggaacaccctgtacttcagcacagatgtgtag

SEQ ID NO: 210546 - DNA, 2580 bp, Artificial Sequence
  derived and/or modified sequence
atggagcccctgagccaccggggcctgccccggctgagctggatcgacactctttattcaaatttctcatatggtaccgatgagtatgatggtgaagggaatgaggagcagaagggtcctccagagggtagtgagaccatgccgtatattgacgagtctccaacaatgtccccgcaactgagtgcccggagccaggggggtggagatggcgtgtcgcccactcctcccgaaggtctggctcctggggtggaagctggcaagggactggagatgagaaaactggttctgagtgggttcctggcttccgaggaaatatacattaatcaactggaggctctcctgctgcctatgaagcccctcaaagctacagccactacatcgcagccagtactgaccatccagcagattgaaaccatcttctacaagatccaggacatctacgagatccataaagaattttacgacaacctctgcccaaaggttcagcagtgggactcgcaggttaccatgggccacctgtttcagaaactcgcatcccagctaggtgtgtataaagccttcgtggacaattataaggtagccctcgagactgccgaaaaatgctcccaaagcaataaccagttccagaaaatctcagaagaacttaaagttaaaggtccgaaagatagcaaggattcgcacactagcgtgaccatggaggccctgttatacaagccaatagaccgggtgactcgcagtaccttggtgctccacgatctccttaagcatacaccagtggatcatcccgattatccccttttgcaagatgccctgaggatttctcaaaactttttaagttcaatcaacgaagacattgacccaagaaggaccgcagtcactactcccaagggagagacacgtcagctagttaaagacggatttctcgtagaagtgtccgaatcttcaagaaagttgagacacgtcttcctgtttactgatgtgttgctatgcgctaagctgaagaagacgagcgccggcaagcatcagcagtacgattgtaagtggtatatccctctagcagacctcgtgtttccatcccctgaggaatcagaggcctcaccccaggttcatccctttcctgaccacgaattagaggatatgaagatgaagattagtgccctgaaatcagagatacaaaaagaaaaagccaataaagggcagtcacgggctattgagcggctgaagaaaaagatgtttgagaacgaattcttgctgctactcaattcgcccaccatcccatttaggatccacaataggaatggcaagtcatatctatttttgctttcatctgattatgagagaagtgagtggcgcgaggccattcagaaactgcaaaagaaggatttgcaagcattcgtcttgtcctcagtggagttgcaggtgctgacagggagttgtttcaaattgcgtactgtacataacatacctgttacaagcaacaaggacgacgacgagtcgcccggtctgtatggattcttgcacgttatagttcattcagctaagggctttaaacagagtgcaaacctatattgcactctcgaagtcgattcattcggatattttgtttctaaagctaagacacgagtgtttcgggatacagccgagcctaagtgggacgaggagttcgagatcgaacttgaggggtcgcagtctctgcggatcttatgttacgaaaaatgttatgacaaaactaaggtaaacaaagacaacaacgagatcgtggacaagattatgggcaaagggcagattcagttggatccccagaccgttgagaccaagaactggcatacagacgtgatcgaaatgaatggaatcaaagtggagttttcaatgaagttcacgtcccgcgacatgtctctcaagaggacgcctagtaagaagcagaccggtgttttcggggtcaaaatttccgttgttaccaaacgagaacgtagcaaagttccgtacatcgtaagacagtgcgtcgaggaggtggagaaaaggggcatcgaagaggtaggaatttaccgcatatccggcgtagccactgatattcaagcgctgaaagctgttttcgacgccaacaacaaagacattctcctcatgctgtcagatatggatataaatgcaattgccggcaccctcaagttgtactttcgggagttgccagaacctctgttgactgaccggctctaccctgcattcatggaaggcatcgcactcagcgaccccgccgccaaggaaaactgtatgatgcatctgttgcgatccttgcctgatccgaatctgattactttccttttcttgctcgaacacttgaagagggttgccgaaaaggagccgatcaataaaatgtcactccacaatctagctaccgtgttcgggccaacgttgctcagacccagcgaagtagaaagtaaagcgcatctcacctcggctgcagacatctggagccacgacgtcatggcgcaggtgcaggttttactgtactacttgcaacacccccctattagttttgccgagttaaaacggaataccctgtatttttccactgacgtgtag

SEQ ID NO: 210547 - DNA, 2442 bp, Artificial Sequence
  derived and/or modified sequence
atgccctacatcgacgagagccccaccatgagcccccagctgagcgcacgatcccagggtgggggtgacggtgtatcccctacccccccagagggtctggcccccggagtcgaagctggcaaggggcttgagatgcggaagttggttctgtccggttttttagcatccgaggagatctatattaatcagctggaagctctactgttacctatgaaaccactgaaagcaactgcgacgacgagtcagccggtgttaactattcaacaaattgagaccatcttttataagattcaagacatctacgaaattcataaggaattttacgacaacctttgcccaaaggtacagcagtgggactcccaggtgacaatgggccatttattccagaagcttgcgtcacagctgggggtgtacaaagcttttgttgataattataaggtggcccttgaaacagcagagaagtgtagccagtccaacaaccagtttcagaagataagtgaggaactgaaagttaaagggccaaaggattctaaagattctcacaccagcgtgactatggaggccctactgtacaagccaattgatagagtgacccgatccaccctggttctccacgacttactcaagcatactccagttgaccacccagattatcccctactccaagatgctctgagaatctctcagaacttcctgtccagtattaacgaagacatcgatccacgccgcaccgctgtcacaactccgaaaggcgagacccggcaattggtgaaggatggcttcctcgtagaggtgagcgagagcagccggaagctgcgacatgtcttcttatttacagatgttctcctctgcgccaaactaaaaaaaacctcagccggtaagcatcaacagtatgattgtaagtggtatatccctctcgctgacttagtttttccgtctcccgaggaatctgaggcgtccccacaggtgcatccctttccagaccacgagctggaggatatgaagatgaagattagcgccttgaagtcagagattcagaaggagaaggccaacaaagggcagtctcgagccattgagcgccttaagaaaaagatgtttgaaaacgaattcctgttattgctcaattcccccaccatcccatttagaatccacaacagaaatggaaagtcatatctcttcctcctctcctccgactatgaacgcagcgaatggagagaagccatccagaaactccagaagaaggacctacaagctttcgttctatccagcgtcgagctccaggtgcttactggtagctgttttaaattgcgtacagtgcacaacataccggttacttccaataaggacgacgacgagagtcccgggctgtatggatttctgcacgtcatcgtgcacagtgccaagggcttcaagcagtccgctaacctgtattgcacactcgaagtggattcattcggctattttgtcagtaaagctaagacaagagtgtttagagacaccgcagaacctaagtgggacgaagaattcgagatcgagctggaaggttcacagagcctgcggattctgtgttacgagaaatgctacgataagacaaaagtgaataaggacaacaacgagatagtcgacaaaatcatggggaaggggcagattcagctggacccccagaccgtcgagactaaaaattggcacaccgatgtgatcgagatgaatggcattaaagttgaattctccatgaaattcacttctagggatatgtctctcaagcggacgcccagcaaaaagcaaaccggggtcttcggcgtaaagatctctgtggtcaccaagcgtgaacggtcgaaggtgccctacatcgtcagacagtgtgtggaggaggtagaaaagcgtggcatagaggaggtgggcatctaccggatttctggagttgccaccgacatacaagctctcaaagccgtgttcgacgccaataacaaagacatcctgctgatgctctctgatatggatatcaacgctatagccggaacactaaaactctatttccgagagctgcctgagccgcttttgaccgacaggttgtaccctgcgtttatggagggaatagcattaagcgatccagctgccaaagagaactgcatgatgcatcttctgcgcagcctacccgatcctaacctcattacattcctctttttactggagcatctcaaacgggttgccgagaaagagcccatcaacaaaatgtccctccataatctggctacagtgttcggccctaccctcctgcgtcccagtgaagtggagagtaaggctcatttgaccagcgccgcggacatttggtcccacgatgtcatggcgcaggtgcaggtcctcttatactatctgcagcacccacctattagtttcgcggaactgaaaaggaataccctgtacttcagtaccgatgtgtag

SEQ ID NO: 210548 - DNA, 2580 bp, Artificial Sequence
  derived and/or modified sequence
atggagccgcttagccacagaggtctgccgagattgagttggattgatacactctactccaactttagctacggcactgatgagtatgacggggagggcaacgaggaacagaagggcccacctgaggggtcggagactatgccatacattgatgagagtcctacaatgtcccctcagttaagtgcaagatctcagggcggtggggacggggttagccccaccccaccagagggacttgcccctggcgtagaagcaggcaagggactcgagatgcgcaagctggttctgtccggatttttagcctccgaagagatctatatcaaccaactggaggctctgctcttacctatgaagcctctgaaggctactgccaccacgtcacagccggttctaactatccaacagattgaaacaatcttttacaaaatccaggatatttacgaaatccataaggaattttatgataacctgtgtccaaaggtgcagcagtgggatagccaggtgactatgggtcacctattccagaaactggcttcacagctgggggtgtataaagcattcgttgataactataaggttgcgcttgagactgcggaaaaatgtagtcagtcaaataaccagtttcagaagatttcagaagaactcaaggtgaaaggcccaaaggattcaaaagactctcacacgtcagtaaccatggaggctctgttgtataagcctatcgatcgggtaacaaggagcactctggtcctacacgacctgctgaagcacactccagttgatcaccctgattaccccctgctccaggatgccctgcgcatatctcaaaacttcctgtcttccatcaatgaggatatagatccacgtcgcaccgcagtgactaccccgaaaggtgaaactagacaactggtcaaagacgggttcctggtcgaggtcagcgagagcagcaggaagctgcgccatgttttcctgttcactgatgtattactctgtgccaagttaaaaaaaacctccgccggtaaacaccagcagtacgattgcaaatggtacattcccctggctgatctggtgttcccctctcccgaggagtcggaggcatctccccaggtgcaccccttccctgaccacgagctggaagacatgaagatgaagatctctgccctgaagtcagaaatccaaaaagagaaggccaataagggccaatctagggctatagaaagactgaagaagaagatgttcgaaaatgaattcctgctgctgctgaacagcccgactataccgtttcggattcataatagaaatggcaagtcttacctatttctcctttcttccgattatgagaggagcgaatggagagaagcaatccagaaacttcagaaaaaggacttacaggcctttgtgctgtcaagtgtggagctgcaggtgctgactggctcatgctttaagctgaggacagtgcacaatataccggttaccagcaacaaggatgacgatgagtcccctggactctatggcttcttgcacgtgattgtgcatagcgcaaaggggttcaagcagtcagcaaatctgtactgtaccctggaggtcgacagcttcggatactttgtgtcaaaggctaaaaccagagtattcagggatactgctgaaccgaagtgggatgaagagttcgaaatcgaactggagggatcccaatcactaagaatcttgtgttatgagaaatgctacgataagacaaaagtcaacaaggacaataacgagatagttgataagataatgggaaaaggtcaaatccagctggatccacagaccgtcgagacgaagaattggcatacagacgtcatcgaaatgaatggaattaaggtcgagttctccatgaagttcacatcccgcgacatgagtttgaaaagaactccttccaagaagcagaccggcgtgttcggcgtcaagatctcagtagtcacaaagagagagaggagcaaagtaccttatatagtccggcagtgtgtcgaggaggtggagaaacgcggaatcgaggaggtggggatataccggatctccggcgtcgctaccgacatccaagctctaaaagctgtttttgacgctaataataaggacatactgcttatgttgtctgatatggacatcaacgccatcgctggcaccctcaaactatactttagggagctccccgagccgctcctcacggaccgcttgtaccctgcctttatggaaggaatcgccctctccgatccagcggctaaagagaattgcatgatgcacctacttaggtcactgcccgacccgaacctgatcacctttctgttcctgttggagcatctcaaacgggtagctgagaaagagccaattaacaaaatgagtcttcacaatttagcaaccgtgttcgggcctacactgttgagacctagtgaggttgaatccaaagcacatctcacctcagctgctgacatctggagccatgacgttatggcccaggtccaggtgctgctgtattacttgcagcacccaccgattagctttgcagagctaaagaggaatactctttatttttccaccgacgtgtag

SEQ ID NO: 210549 - DNA, 2442 bp, Artificial Sequence
  derived and/or modified sequence
atgccctacatagatgagtcacccactatgtccccacagctgtccgccaggtctcagggaggcggtgatggcgtaagtcccactcccccagagggtctggcccctggtgtcgaggctggaaagggtctggaaatgcgaaagttagtcctgtctggatttcttgcaagtgaggagatatacattaatcagctcgaagctctgcttctccctatgaagcccttgaaggcaactgcaaccacgtctcagccagtattgacaatccagcagatcgagaccattttctacaagatccaggacatctacgaaatacacaaagagttttatgataatctatgtcccaaggttcagcagtgggactctcaagtgacaatgggccatcttttccaaaagttggcttcacagcttggcgtttataaggcctttgtggataactacaaagttgctcttgaaactgctgagaaatgctctcagtctaataaccagtttcagaagatcagcgaggagctcaaagtgaaggggccaaaagattctaaagattctcacactagtgttacaatggaggcattgctatacaagcctatagacagggtgactcgctcaactctcgtcctgcacgatcttttaaaacatacccccgtggatcaccccgattatcctctcctgcaggacgctctgcgaatttcacagaactttctgtcctcaattaacgaagacattgaccctagacgaacggcggtgacgacgcctaagggggaaactagacagctggtaaaagatggttttctggttgaagtctccgaaagttccaggaagctgagacatgtgtttctcttcaccgatgttctgctgtgcgccaagctcaaaaagacaagcgcagggaaacaccaacagtacgactgcaagtggtatatacccttagccgacctggtctttcccagcccggaggagtctgaggcttctccccaggtccatccctttcctgatcacgagctggaggacatgaaaatgaaaatttctgcactcaagtcagaaatccagaaagagaaggcaaacaagggacaatcgcgggctattgagagattgaagaagaaaatgtttgaaaacgaattcctgctgctgctgaacagtccaacgatccccttccggattcataatcggaacggcaagagctacctattccttttgtcctctgactatgagagatctgagtggcgggaagcgatccaaaagctgcaaaagaaggatctgcaggcctttgtgctttcctccgttgagctgcaagtccttactggctcttgtttcaagctgaggacagtccacaacatccccgtcacctccaacaaagacgacgatgaatctccaggactctacgggtttttacacgtgatcgtgcactcagctaagggctttaaacaaagcgccaacctgtactgcacgctggaagtcgatagcttcggttacttcgtaagcaaggccaaaacaagagtgtttagagacactgctgaaccgaagtgggacgaggaattcgaaatcgaacttgagggttcccagagccttcgcatcttatgttatgagaagtgttacgacaagaccaaggtgaataaagataacaatgaaatagtggacaaaattatgggtaagggacaaatccagctcgatccgcaaacagtggagacaaagaattggcataccgacgtgattgaaatgaacggcatcaaggtcgagtttagtatgaagtttactagccgcgacatgagccttaaacgcacaccatctaagaagcaaactggtgtgttcggcgtcaagatatcggtcgtgactaaacgagaaagatccaaagtcccctacattgtgagacagtgcgtcgaagaggtcgagaaaaggggcatcgaagaggtgggcatttaccggatttcaggagtcgctaccgacattcaggccttgaaagccgtttttgacgccaacaataaggatatactgttaatgctatctgacatggatattaatgccatcgctggaacgttgaagctgtattttcgcgaactcccagagccattgctcacagatagactctatcccgctttcatggaagggatcgcactatccgaccctgccgcaaaggaaaactgtatgatgcacctgctcagatccctaccagatcctaatcttattacatttctatttctgctggaacacctgaaacgagtggcggagaaggagcccattaacaaaatgtcactgcataatctcgcaaccgtgttcggcccaacactcctgcggccaagcgaagtggagtccaaggcccacttgacctccgctgcggatatctggtctcatgacgttatggctcaggtccaggtgttgttatattatctgcagcaccccccaatatcttttgcggaactaaagcgcaacacattgtatttttccacggatgtgtag

SEQ ID NO: 210550 - DNA, 2580 bp, Artificial Sequence
  derived and/or modified sequence
atggagcccctgagccacagaggcctgcccagactgagctggatcgacaccctgtacagcaacttcagctacggcaccgacgagtacgacggcgagggcaacgaggagcagaagggcccccccgagggcagcgagaccatgccctacatcgacgagagccccaccatgagcccccagctgagcgccagaagccagggcggcggcgacggcgtgagccccaccccccccgagggcctggcccccggcgtggaggccggcaagggcctggagatgagaaagctggtgctgagcggcttcctggccagcgaggagatctacatcaaccagctggaggccctgctgctgcccatgaagcccctgaaggccaccgccaccaccagccagcccgtgctgaccatccagcagatcgagaccatcttctacaagatccaggacatctacgagatccacaaggagttctacgacaacctgtgccccaaggtgcagcagtgggacagccaggtgaccatgggccacctgttccagaagctggccagccagctgggcgtgtacaaggccttcgtggacaactacaaggtggccctggagaccgccgagaagtgcagccagagcaacaaccagttccagaagatcagcgaggagctgaaggtgaagggccccaaggacagcaaggacagccacaccagcgtgaccatggaggccctgctgtacaagcccatcgacagagtgaccagaagcaccctggtgctgcacgacctgctgaagcacacccccgtggaccaccccgactaccccctgctgcaggacgccctgagaatcagccagaacttcctgagcagcatcaacgaggacatcgaccccagaagaaccgccgtgaccacccccaagggcgagaccagacagctggtgaaggacggcttcctggtggaggtgagcgagagcagcagaaagctgagacacgtgttcctgttcaccgacgtgctgctgtgcgccaagctgaagaagaccagcgccggcaagcaccagcagtacgactgcaagtggtacatccccctggccgacctggtgttccccagccccgaggagagcgaggccagcccccaggtgcaccccttccccgaccacgagctggaggacatgaagatgaagatcagcgccctgaagagcgagatccagaaggagaaggccaacaagggccagagcagagccatcgagagactgaagaagaagatgttcgagaacgagttcctgctgctgctgaacagccccaccatccccttcagaatccacaacagaaacggcaagagctacctgttcctgctgagcagcgactacgagagaagcgagtggagagaggccatccagaagctgcagaagaaggacctgcaggccttcgtgctgagcagcgtggagctgcaggtgctgaccggcagctgcttcaagctgagaaccgtgcacaacatccccgtgaccagcaacaaggacgacgacgagagccccggcctgtacggcttcctgcacgtgatcgtgcacagcgccaagggcttcaagcagagcgccaacctgtactgcaccctggaggtggacagcttcggctacttcgtgagcaaggccaagaccagagtgttcagagacaccgccgagcccaagtgggacgaggagttcgagatcgagctggagggcagccagagcctgagaatcctgtgctacgagaagtgctacgacaagaccaaggtgaacaaggacaacaacgagatcgtggacaagatcatgggcaagggccagatccagctggacccccagaccgtggagaccaagaactggcacaccgacgtgatcgagatgaacggcatcaaggtggagttcagcatgaagttcaccagcagagacatgagcctgaagagaacccccagcaagaagcagaccggcgtgttcggcgtgaagatcagcgtggtgaccaagagagagagaagcaaggtgccctacatcgtgagacagtgcgtggaggaggtggagaagagaggcatcgaggaggtgggcatctacagaatcagcggcgtggccaccgacatccaggccctgaaggccgtgttcgacgccaacaacaaggacatcctgctgatgctgagcgacatggacatcaacgccatcgccggcaccctgaagctgtacttcagagagctgcccgagcccctgctgaccgacagactgtaccccgccttcatggagggcatcgccctgagcgaccccgccgccaaggagaactgcatgatgcacctgctgagaagcctgcccgaccccaacctgatcaccttcctgttcctgctggagcacctgaagagagtggccgagaaggagcccatcaacaagatgagcctgcacaacctggccaccgtgttcggccccaccctgctgagacccagcgaggtggagagcaaggcccacctgaccagcgccgccgacatctggagccacgacgtgatggcccaggtgcaggtgctgctgtactacctgcagcacccccccatcagcttcgccgagctgaagagaaacaccctgtacttcagcaccgacgtgtag

SEQ ID NO: 210551 - DNA, 2442 bp, Artificial Sequence
  derived and/or modified sequence
atgccctacatcgacgagagccccaccatgagcccccagctgagcgccagaagccagggcggcggcgacggcgtgagccccaccccccccgagggcctggcccccggcgtggaggccggcaagggcctggagatgagaaagctggtgctgagcggcttcctggccagcgaggagatctacatcaaccagctggaggccctgctgctgcccatgaagcccctgaaggccaccgccaccaccagccagcccgtgctgaccatccagcagatcgagaccatcttctacaagatccaggacatctacgagatccacaaggagttctacgacaacctgtgccccaaggtgcagcagtgggacagccaggtgaccatgggccacctgttccagaagctggccagccagctgggcgtgtacaaggccttcgtggacaactacaaggtggccctggagaccgccgagaagtgcagccagagcaacaaccagttccagaagatcagcgaggagctgaaggtgaagggccccaaggacagcaaggacagccacaccagcgtgaccatggaggccctgctgtacaagcccatcgacagagtgaccagaagcaccctggtgctgcacgacctgctgaagcacacccccgtggaccaccccgactaccccctgctgcaggacgccctgagaatcagccagaacttcctgagcagcatcaacgaggacatcgaccccagaagaaccgccgtgaccacccccaagggcgagaccagacagctggtgaaggacggcttcctggtggaggtgagcgagagcagcagaaagctgagacacgtgttcctgttcaccgacgtgctgctgtgcgccaagctgaagaagaccagcgccggcaagcaccagcagtacgactgcaagtggtacatccccctggccgacctggtgttccccagccccgaggagagcgaggccagcccccaggtgcaccccttccccgaccacgagctggaggacatgaagatgaagatcagcgccctgaagagcgagatccagaaggagaaggccaacaagggccagagcagagccatcgagagactgaagaagaagatgttcgagaacgagttcctgctgctgctgaacagccccaccatccccttcagaatccacaacagaaacggcaagagctacctgttcctgctgagcagcgactacgagagaagcgagtggagagaggccatccagaagctgcagaagaaggacctgcaggccttcgtgctgagcagcgtggagctgcaggtgctgaccggcagctgcttcaagctgagaaccgtgcacaacatccccgtgaccagcaacaaggacgacgacgagagccccggcctgtacggcttcctgcacgtgatcgtgcacagcgccaagggcttcaagcagagcgccaacctgtactgcaccctggaggtggacagcttcggctacttcgtgagcaaggccaagaccagagtgttcagagacaccgccgagcccaagtgggacgaggagttcgagatcgagctggagggcagccagagcctgagaatcctgtgctacgagaagtgctacgacaagaccaaggtgaacaaggacaacaacgagatcgtggacaagatcatgggcaagggccagatccagctggacccccagaccgtggagaccaagaactggcacaccgacgtgatcgagatgaacggcatcaaggtggagttcagcatgaagttcaccagcagagacatgagcctgaagagaacccccagcaagaagcagaccggcgtgttcggcgtgaagatcagcgtggtgaccaagagagagagaagcaaggtgccctacatcgtgagacagtgcgtggaggaggtggagaagagaggcatcgaggaggtgggcatctacagaatcagcggcgtggccaccgacatccaggccctgaaggccgtgttcgacgccaacaacaaggacatcctgctgatgctgagcgacatggacatcaacgccatcgccggcaccctgaagctgtacttcagagagctgcccgagcccctgctgaccgacagactgtaccccgccttcatggagggcatcgccctgagcgaccccgccgccaaggagaactgcatgatgcacctgctgagaagcctgcccgaccccaacctgatcaccttcctgttcctgctggagcacctgaagagagtggccgagaaggagcccatcaacaagatgagcctgcacaacctggccaccgtgttcggccccaccctgctgagacccagcgaggtggagagcaaggcccacctgaccagcgccgccgacatctggagccacgacgtgatggcccaggtgcaggtgctgctgtactacctgcagcacccccccatcagcttcgccgagctgaagagaaacaccctgtacttcagcaccgacgtgtag

SEQ ID NO: 210552 - DNA, 5252 bp, Artificial Sequence
  derived and/or modified sequence
ctcgcccctccgcgctcgcaacttcggcctcccccggctcccgcccgctctccctcctttgttgcgcgatgagggtcgggtttcggatctgaccgagccgccgccgcgggatggagccgctcagccaccggggcctgccgcgcctgtcctggatcgacaccctctacagcaacttcagctacgggacggacgagtacgacggagaggggaatgaggagcagaaggggcccccggagggctcagagaccatgccgtacatcgatgagtcgcccaccatgtccccgcagctcagcgcccgcagccagggcgggggggatggcgtctccccgactccacctgagggactggctcctggggtggaagcagggaaaggcctggagatgaggaagctggttctctcggggttcttggccagcgaagagatctacattaaccagctggaagccctgttgctgcccatgaaacccctgaaggccaccgccaccacctcccagcccgtgctcaccatccagcagatcgagaccatcttctacaagatccaggacatctatgagatccacaaggagttctatgacaacctgtgccccaaggtgcaacagtgggacagccaggtcaccatgggccacctcttccagaagctggccagccagctcggtgtgtacaaagcgtttgtcgataactataaagtcgctctggagacagctgagaagtgcagccagtccaacaaccagttccagaagatctcagaggaactcaaagtgaaaggtcccaaggactccaaggacagccacacgtctgtcaccatggaagctctgctctacaagcccattgaccgggtcactcggagcaccctagtcctacacgacctgctgaagcacacacctgtggaccaccccgactacccgctgctgcaggatgccctccgcatctcccagaacttcctgtccagcatcaacgaggacatcgacccccgccggactgcagtgacaacgcccaagggggagacgcgacagctggtgaaggacggcttcctggtggaagtgtcagagagctcccggaagctgcggcacgtcttcctctttacagatgtcctactgtgtgccaagctgaagaagacctctgcagggaagcaccagcagtatgactgtaagtggtacatccccctggccgacctggtgtttccatcccccgaggagtctgaggccagcccccaggtgcaccccttcccagaccatgagctggaggacatgaagatgaagatctctgccctcaagagtgaaatccagaaggagaaagccaacaaaggccagagccgggccatcgagcgcctgaagaagaagatgtttgagaatgagttcctgctgctgctcaactcccccacaatcccgttcaggatccacaatcggaatggaaagagttacctgttcctactgtcctcggactacgagaggtcagagtggagagaagcaattcagaaactacagaagaaggatctccaggcctttgtcctgagctcagtggagctccaggtgctcacaggatcctgtttcaagcttaggactgtacacaacattcctgtcaccagcaataaagacgacgatgagtctccaggactctatggcttccttcatgtcatcgtccactctgccaagggatttaagcaatcagccaacctgtactgtaccctggaggtggattccttcggctattttgtcagcaaagccaaaaccagggtgttccgggacacagcggagcccaagtgggatgaggagtttgagatcgagctggagggctcccagtccctgaggatcctgtgctatgagaagtgctatgacaagaccaaggtcaacaaggacaacaatgagatcgtggacaagatcatgggcaaaggacagatccagctggacccacaaaccgtggagaccaagaactggcacacggacgtgattgagatgaacgggatcaaagtggaattttccatgaaattcaccagccgagatatgagcctgaagaggaccccgtccaaaaagcagaccggcgtcttcggtgtgaagatcagcgtggtgacgaagcgggagcgctccaaggtgccctacatcgtccggcagtgtgtggaggaggtggagaagaggggtatcgaggaggttggcatctacaggatatcgggcgtggccacggacatccaggcgctcaaggccgtcttcgatgccaataacaaggacatcctgctgatgctgagtgacatggacatcaacgccatcgccgggacgctcaagctgtacttccgggaactgcccgagccgctcctcacggaccgactctacccagccttcatggagggcatcgccctgtcagaccctgctgccaaggaaaactgcatgatgcacctgctccgctccctgcccgaccccaacctcatcaccttcctcttcctgctggaacacttgaaaagggttgccgagaaggagcccatcaacaaaatgtcacttcacaacctggctaccgtgtttggacccacgttactgagaccctcagaagtggagagcaaagcacacctcacctcggctgcggacatctggtcccatgacgtcatggcgcaggtccaggtcctcctctactacctgcagcacccccccatttccttcgcagaactcaagcggaacacactgtacttctccaccgacgtgtagcccgaggcagggtggctgcgggcgggtggtggaaccagcccctccagcctggggtccaactcagacttgaaagactgcaatagaaaactcccaaacccagcactccagactcgagggaagccagcttccaagaactggaatgcgtacgtcttttgtgccaccttgtacaaagccggctgcccagccccagcctcaccaccgcatcccacctcctgccctccatacctctagttgtgtctgatgctccgtgctgttcgggaattgttttatgtacacttgtcaggcagaaaaggtagtgaccggcccggcgtgggcacacagacagcccgctttgttctttcatttcctccagcactttctttccgcctgagtccagcccaaggccttttattttgcgctgtgtaactgctgccagcttctctcttggccctgctcccagatggcggtctcctggcagcctcccctcagtcttcctccacccgctcttccttcccagcctgcctgcatgcatgtgcacccttggtcttcgctccatcgccttgaaagctctgaagaggccctgggttgccgcggcagcagtggtctgtttgatgctgccgtttgccgctgccggcccctcctcagactccgcctttgggagcacacctgctttgccttgctgcctgtgcaaatgttggacaagcagacacactcacactcgtccccagcttagcacagagctggagcgcccatttctggaattttccgtttgggaatctccacttctggggtttacctgttcggcctcctgtctatcagtgaggcatctctgactgtttcttctactgcttttcagttcccttccctgctgttctatttcctttgagtgtaaagactcacaggtgacctgctatcgagatagccagagggtcaggagagaatgggggaggaggcggtcaggctgctgaggaaacaccacaggctgaacgggggaggaatgcacatgccacgctgggtgtcccgggtcgcggggaggcagctcagctcttaggagcaagttgtgggggcttttcaagaggggccaggcttcctggagggtgactgatgtggccgaagcaggtgtccaggcaggtaggctgcagccaggagctccctggcaccgcaggacctcgtggtactcttgccttagattttacacacactccacagccaagcactgccacggtcctccaggacctgggaagcaaaggcacaggcccacggtggccagccattgtggtgccgccccagcttctggatacagccttttgggtaaacactgggaactccagaagttgtggggagagtggggaatcagacagccgcctctaggggctgggttctgctggggcctccttgttggtgctgtaggcacccgccagggagcagggacccgacttgcagacgcattgcccggtactaggaaggagtgaggtgtgttcccaccgtacacttcccacacgagctgcggctgccagcctcgggccatcagcctaggagagcagatgcagctccaggggctcgacttatagccagttacagctccccggctcttctgtgtggcagagcgtcgtttccgggccctcagggctggggagctcagttcccattgcttgtgctcagggctgagtcttaaagaagggtttgccggccctaacgctgcagcgcgtgcgcggtgagaggccctttttgagcctgtttactcctgtggccttgggcagaacagtaaatactctgtgcacggaggaaagacatgcccaagaggaaggaagtactgaccatcggctgcctgtgagcagcttagcaaggagcccttgctccctgggaaaggcggtgaacttgagtctaaagatgcagtgcctggcccttcctaaggtccctgcctggcatccgagtgtcggtgtgtggcacagaaggctcctgcttgcttccaaagtgatggacaggaaggggcagagtgagtcacggcccagactgggcaccttcgcgtctcagcctcagggagccccacagccccaagctcgctgaggcaacgtgagaacaggctatgggaaggctgcaaaggctgagaaatgcaaaggctcatatttataaatcccacccccagagtggggagggtcaggtgccagacctggactaaactgcaccaaggaaacacccagcagggtctcctgtgagccggggaccatgcagcccgaaacctccagtcactgcgcccggcaggagtcaggagccagggactgtgcagcctggaacctccagtcactgtgcccagcagggtgggctgtgcccagcaggagtcaggctaagaaacgccaggtctgcctgttcttgctgggcaatggctgatggctgccagtttctgctgatacacaggtaggatgggacccttcatgaatatctgactttaataagttggtaaggatatatttttttgtctatgttctgtttcaacttatgtagattattataaattgatgtaaaccacgtgagaggaaaatgttaataaaaaatgcaaagccccatcatttgcacaaaactcag

SEQ ID NO: 210553 - DNA, 1550 bp, Artificial Sequence
  derived and/or modified sequence
ctcgcccctccgcgctcgcaacttcggcctcccccggctcccgcccgctctccctcctttgttgcgcgatgagggtcgggtttcggatctgaccgagccgccgccgcgggatggagccgctcagccaccggggcctgccgcgcctgtcctggatcgacaccctctacagcaacttcagctacgggacggacgagtacgacggagaggggaatgaggagcagaaggggcccccggagggctcagagaccatgccgtacatcgatgagtcgcccaccatgtccccgcagctcagcgcccgcagccagggcgggggggatggcgtctccccgactccacctgagggactggctcctggggtggaagcagggaaaggcctggagatgaggaagctggttctctcggggttcttggccagcgaagagatctacattaaccagctggaagccctgttgctgcccatgaaacccctgaaggccaccgccaccacctcccagcccgtgctcaccatccagcagatcgagaccatcttctacaagatccaggacatctatgagatccacaaggagttctatgacaacctgtgccccaaggtgcaacagtgggacagccaggtcaccatgggccacctcttccagaagctggccagccagctcggtgtgtacaaagcgtttgtcgataactataaagtcgctctggagacagctgagaagtgcagccagtccaacaaccagttccagaagatctcagaggaactcaaagtgaaaggtcccaaggactccaaggacagccacacgtctgtcaccatggaagctctgctctacaagcccattgaccgggtcactcggagcaccctagtcctacacgacctgctgaagcacacacctgtggaccaccccgactacccgctgctgcaggatgccctccgcatctcccagaacttcctgtccagcatcaacgaggacatcgacccccgccggactgcagtgacaacgcccaagggggagacgcgacagctggtgaaggacggcttcctggtggaagtgtcagagagctcccggaagctgcggcacgtcttcctctttacagatgtcctactgtgtgccaagctgaagaagacctctgcagggaagcaccagcagtatgactgtaagtggtacatccccctggccgacctggtgtttccatcccccgaggagtctgaggccagcccccaggtgcaccccttcccagaccatgagctggaggacatgaagatgaagatctctgccctcaagagtgaaatccagaaggaggaggtggagaagaggggtatcgaggaggttggcatctacaggatatcgggcgtggccacggacatccaggcgctcaaggccgtcttcgatgccaataacaaggacatcctgctgatgctgagtgacatggacatcaacgccatcgccgggacgctcaagctgtacttccgggaactgcccgagccgctcctcacggaccgactctctccctgcccgaccccaacctcatcaccttcctcttcctgctggaacacttga

SEQ ID NO: 210554 - DNA, 5603 bp, Artificial Sequence
  derived and/or modified sequence
ggactgcagagggaacttgccttgaagaggcctggtccttaaagagacacagcacacacggcccgaccggcagccccagagcagaggctccactgatggcaggcgcccctggctaggctctgaggttcctttgccctcgccttgctgaatggtgagccgctgcctctcggagcccgtctccttgacagcctgccctcggctcctgcagccactcctgggcctgatggggacagggccagcctggtgggtggtgtcagaggtcctggcagagcagcgtaggcctgggatgcgtctgcagaattctggctgaacgagcgaggagcacggccagcttcggggccgtcgtgaccacaggagggcagagggccagcccgtgagctctgaccccagctggacgtgctcttgtttcccttggggctaaggagattggagccactgaactgaatctctgggttttggagacttagagaatccattggactcttctgctggcgtctttctgaatgctgatggggacttggtgacttcagctacgggacggacgagtacgacggagaggggaatgaggagcagaaggggcccccggagggctcagagaccatgccgtacatcgatgagtcgcccaccatgtccccgcagctcagcgcccgcagccagggcgggggggatggcgtctccccgactccacctgagggactggctcctggggtggaagcagggaaaggcctggagatgaggaagctggttctctcggggttcttggccagcgaagagatctacattaaccagctggaagccctgttgctgcccatgaaacccctgaaggccaccgccaccacctcccagcccgtgctcaccatccagcagatcgagaccatcttctacaagatccaggacatctatgagatccacaaggagttctatgacaacctgtgccccaaggtgcaacagtgggacagccaggtcaccatgggccacctcttccagaagctggccagccagctcggtgtgtacaaagcgtttgtcgataactataaagtcgctctggagacagctgagaagtgcagccagtccaacaaccagttccagaagatctcagaggaactcaaagtgaaaggtcccaaggactccaaggacagccacacgtctgtcaccatggaagctctgctctacaagcccattgaccgggtcactcggagcaccctagtcctacacgacctgctgaagcacacacctgtggaccaccccgactacccgctgctgcaggatgccctccgcatctcccagaacttcctgtccagcatcaacgaggacatcgacccccgccggactgcagtgacaacgcccaagggggagacgcgacagctggtgaaggacggcttcctggtggaagtgtcagagagctcccggaagctgcggcacgtcttcctctttacagatgtcctactgtgtgccaagctgaagaagacctctgcagggaagcaccagcagtatgactgtaagtggtacatccccctggccgacctggtgtttccatcccccgaggagtctgaggccagcccccaggtgcaccccttcccagaccatgagctggaggacatgaagatgaagatctctgccctcaagagtgaaatccagaaggagaaagccaacaaaggccagagccgggccatcgagcgcctgaagaagaagatgtttgagaatgagttcctgctgctgctcaactcccccacaatcccgttcaggatccacaatcggaatggaaagagttacctgttcctactgtcctcggactacgagaggtcagagtggagagaagcaattcagaaactacagaagaaggatctccaggcctttgtcctgagctcagtggagctccaggtgctcacaggatcctgtttcaagcttaggactgtacacaacattcctgtcaccagcaataaagacgacgatgagtctccaggactctatggcttccttcatgtcatcgtccactctgccaagggatttaagcaatcagccaacctgtactgtaccctggaggtggattccttcggctattttgtcagcaaagccaaaaccagggtgttccgggacacagcggagcccaagtgggatgaggagtttgagatcgagctggagggctcccagtccctgaggatcctgtgctatgagaagtgctatgacaagaccaaggtcaacaaggacaacaatgagatcgtggacaagatcatgggcaaaggacagatccagctggacccacaaaccgtggagaccaagaactggcacacggacgtgattgagatgaacgggatcaaagtggaattttccatgaaattcaccagccgagatatgagcctgaagaggaccccgtccaaaaagcagaccggcgtcttcggtgtgaagatcagcgtggtgacgaagcgggagcgctccaaggtgccctacatcgtccggcagtgtgtggaggaggtggagaagaggggtatcgaggaggttggcatctacaggatatcgggcgtggccacggacatccaggcgctcaaggccgtcttcgatgccaataacaaggacatcctgctgatgctgagtgacatggacatcaacgccatcgccgggacgctcaagctgtacttccgggaactgcccgagccgctcctcacggaccgactctacccagccttcatggagggcatcgccctgtcagaccctgctgccaaggaaaactgcatgatgcacctgctccgctccctgcccgaccccaacctcatcaccttcctcttcctgctggaacacttgaaaagggttgccgagaaggagcccatcaacaaaatgtcacttcacaacctggctaccgtgtttggacccacgttactgagaccctcagaagtggagagcaaagcacacctcacctcggctgcggacatctggtcccatgacgtcatggcgcaggtccaggtcctcctctactacctgcagcacccccccatttccttcgcagaactcaagcggaacacactgtacttctccaccgacgtgtagcccgaggcagggtggctgcgggcgggtggtggaaccagcccctccagcctggggtccaactcagacttgaaagactgcaatagaaaactcccaaacccagcactccagactcgagggaagccagcttccaagaactggaatgcgtacgtcttttgtgccaccttgtacaaagccggctgcccagccccagcctcaccaccgcatcccacctcctgccctccatacctctagttgtgtctgatgctccgtgctgttcgggaattgttttatgtacacttgtcaggcagaaaaggtagtgaccggcccggcgtgggcacacagacagcccgctttgttctttcatttcctccagcactttctttccgcctgagtccagcccaaggccttttattttgcgctgtgtaactgctgccagcttctctcttggccctgctcccagatggcggtctcctggcagcctcccctcagtcttcctccacccgctcttccttcccagcctgcctgcatgcatgtgcacccttggtcttcgctccatcgccttgaaagctctgaagaggccctgggttgccgcggcagcagtggtctgtttgatgctgccgtttgccgctgccggcccctcctcagactccgcctttgggagcacacctgctttgccttgctgcctgtgcaaatgttggacaagcagacacactcacactcgtccccagcttagcacagagctggagcgcccatttctggaattttccgtttgggaatctccacttctggggtttacctgttcggcctcctgtctatcagtgaggcatctctgactgtttcttctactgcttttcagttcccttccctgctgttctatttcctttgagtgtaaagactcacaggtgacctgctatcgagatagccagagggtcaggagagaatgggggaggaggcggtcaggctgctgaggaaacaccacaggctgaacgggggaggaatgcacatgccacgctgggtgtcccgggtcgcggggaggcagctcagctcttaggagcaagttgtgggggcttttcaagaggggccaggcttcctggagggtgactgatgtggccgaagcaggtgtccaggcaggtaggctgcagccaggagctccctggcaccgcaggacctcgtggtactcttgccttagattttacacacactccacagccaagcactgccacggtcctccaggacctgggaagcaaaggcacaggcccacggtggccagccattgtggtgccgccccagcttctggatacagccttttgggtaaacactgggaactccagaagttgtggggagagtggggaatcagacagccgcctctaggggctgggttctgctggggcctccttgttggtgctgtaggcacccgccagggagcagggacccgacttgcagacgcattgcccggtactaggaaggagtgaggtgtgttcccaccgtacacttcccacacgagctgcggctgccagcctcgggccatcagcctaggagagcagatgcagctccaggggctcgacttatagccagttacagctccccggctcttctgtgtggcagagcgtcgtttccgggccctcagggctggggagctcagttcccattgcttgtgctcagggctgagtcttaaagaagggtttgccggccctaacgctgcagcgcgtgcgcggtgagaggccctttttgagcctgtttactcctgtggccttgggcagaacagtaaatactctgtgcacggaggaaagacatgcccaagaggaaggaagtactgaccatcggctgcctgtgagcagcttagcaaggagcccttgctccctgggaaaggcggtgaacttgagtctaaagatgcagtgcctggcccttcctaaggtccctgcctggcatccgagtgtcggtgtgtggcacagaaggctcctgcttgcttccaaagtgatggacaggaaggggcagagtgagtcacggcccagactgggcaccttcgcgtctcagcctcagggagccccacagccccaagctcgctgaggcaacgtgagaacaggctatgggaaggctgcaaaggctgagaaatgcaaaggctcatatttataaatcccacccccagagtggggagggtcaggtgccagacctggactaaactgcaccaaggaaacacccagcagggtctcctgtgagccggggaccatgcagcccgaaacctccagtcactgcgcccggcaggagtcaggagccagggactgtgcagcctggaacctccagtcactgtgcccagcagggtgggctgtgcccagcaggagtcaggctaagaaacgccaggtctgcctgttcttgctgggcaatggctgatggctgccagtttctgctgatacacaggtaggatgggacccttcatgaatatctgactttaataagttggtaaggatatatttttttgtctatgttctgtttcaacttatgtagattattataaattgatgtaaaccacgtgagaggaaaatgttaataaaaaatgcaaagccccatcatttgcacaaaactca

SEQ ID NO: 210555 - protein, 794 aa, Artificial Sequence
  derived and/or modified sequence
MNIDDKLEGLFLKCGGIDEMQSSRTMVVMGGVSGQSTVSGELQDSVLQDRSMPHQEILAADEVLQESEMRQQDMISHDELMVHEETVKNDEEQMETHERLPQGLQYALNVPISVKQEITFTDVSEQLMRDKKQIREPVDLQKKKKRKQRSPAKILTINEDGSLGLKTPKSHVCEHCNAAFRTNYHLQRHVFIHTGEKPFQCSQCDMRFIQKYLLQRHEKIHTGEKPFRCDECGMRFIQKYHMERHKRTHSGEKPYQCEYCLQYFSRTDRVLKHKRMCHENHDKKLNRCAIKGGLLTSEEDSGFSTSPKDNSLPKKKRQKTEKKSSGMDKESALDKSDLKKDKNDYLPLYSSSTKVKDEYMVAEYAVEMPHSSVGGSHLEDASGEIHPPKLVLKKINSKRSLKQPLEQNQTISPLSTYEESKVSKYAFELVDKQALLDSEGNADIDQVDNLQEGPSKPVHSSTNYDDAMQFLKKKRYLQAASNNSREYALNVGTIASQPSVTQAAVASVIDESTTASILESQALNVEIKSNHDKNVIPDEVLQTLLDHYSHKANGQHEISFSVADTEVTSSISINSSEVPEVTPSENVGSSSQASSSDKANMLQEYSKFLQQALDRTSQNDAYLNSPSLNFVTDNQTLPNQPAFSSIDKQVYATMPINSFRSGMNSPLRTTPDKSHFGLIVGDSQHSFPFSGDETNHASATSTQDFLDQVTSQKKAEAQPVHQAYQMSSFEQPFRAPYHGSRAGIATQFSTANGQVNLRGPGTSAEFSEFPLVNVNDNRAGMTSSPDATTGQTFG

SEQ ID NO: 210556 - protein, 83 aa, Artificial Sequence
  derived and/or modified sequence
MNIDDKLEGLFLKCGGIDEMQSSRTMVVMGGVSGQSTVSGELQDSVLQDRSMPHQEILAADEVLQESEMRQQDMISHDELMVH

SEQ ID NO: 210557 - protein, 144 aa, Artificial Sequence
  derived and/or modified sequence
MKGEKPFQCSQCDMRFIQKYLLQRHEKIHTGEKPFRCDECGDETNHASATSTQDFLDQVTSQKKAEAQPVHQAYQMSSFEQPFRAPYHGSRAGIATQFSTANGQVNLRGPGTSAEFSEFPLVNVNDNRAGMTSSPDATTGQTFG

SEQ ID NO: 210558 - protein, 25 aa, Artificial Sequence
  derived and/or modified sequence
MNIDDKLEGLFLKCGGIDEMQSSRT

SEQ ID NO: 210559 - protein, 75 aa, Artificial Sequence
  derived and/or modified sequence
MNIDDKLEGLFLKCGGIDEMQSSRTMVVMGGVSGQSTVSGELQDSVLQDRSMPHQEILAADEVLQESEMRQQDMI

SEQ ID NO: 210560 - protein, 454 aa, Artificial Sequence
  derived and/or modified sequence
MNIDDKLEGLFLKCGGIDEMQSSRTMVVMGGVSGQSTVSGELQDSVLQDRSMPHQEILAADEVLQESEMRQQDMISHDELMVHEETVKNDEEQMETHERLPQGLQYALNVPISVKQEITFTDVSEQLMRDKKQIREPVDLQKKKKRKQRSPAKILTINEDGSLGLKTPKSHVCEHCNAAFRTNYHLQRHVFIHTGEKPFQCSQCDMRFIQKYLLQRHEKIHTGEKPFRCDECGMRFIQKYHMERHKRTHSGEKPYQCEYCLQYFSRTDRVLKHKRMCHENHDKKLNRCAIKGGLLTSEEDSGFSTSPKDNSLPKKKRQKTEKKSSGMDKESALDKSDLKKDKNDYLPLYSSSTKVKDEYMVAEYAVEMPHSSVGGSHLEDASGEIHPPKLVLKKINSKRSLKQPLEQNQTISPLSTYEESKFQSMLLNLWINRLYWTQKAMLTLIRLIICRRAQ

SEQ ID NO: 210561 - protein, 131 aa, Artificial Sequence
  derived and/or modified sequence
MRFIQKYLLQRHEKIHTGEKPFRCDECGDETNHASATSTQDFLDQVTSQKKAEAQPVHQAYQMSSFEQPFRAPYHGSRAGIATQFSTANGQVNLRGPGTSAEFSEFPLVNVNDNRAGMTSSPDATTGQTFG

SEQ ID NO: 210562 - DNA, 9573 bp, Artificial Sequence
  derived and/or modified sequence
ggcgaccgcggcggcgctctagctgcggcatgtctgcgtctctactgctctgggaggaggaagagaaggaggaagaggaggaggaggaggagggggaggaagaggagaaaggcgcaggggtgggagctgttgccgaagctgccacagcaaaagttctcccccctccccccttcccctcctctcaaggcccctagaaaggttggagctgccgccgcctgcagtcggtgaccgcgcgactcggcgcccgcccgcggatagagggaggaatcagcagcttggaaattcaagcacgtgatctggcgggatgggcgtttgcctaacgtatttaatggaggaatcggatggcataagtgattaaggtggtattgaggatttctgaagcctatgaaaggtagaaactcaaccatgatttctttttcaactctacagcattcctttccttgaagtcttcgtttttaccttagtctcgggcagttatacttaagcatgaacattgacgacaaactggaaggattgtttcttaaatgtggcggcatagacgaaatgcagtcttccaggacaatggttgtaatgggtggagtgtctggccagtctactgtgtctggagagctacaggattcagtacttcaagatcgaagtatgcctcaccaggagatccttgctgcagatgaagtgttacaagaaagtgaaatgagacaacaggatatgatatcacatgatgaactcatggtccatgaggagacagtgaaaaatgatgaagagcagatggaaacacatgaaagacttcctcaaggactacagtatgcacttaatgtccctataagcgtaaagcaggaaattacttttactgatgtatctgagcaactgatgagagacaaaaaacaaatcagagagccagtagacttacagaaaaagaagaagcggaaacaacgttctcccgcaaaaatccttacaataaatgaggatggatcacttggtttgaaaacccctaaatctcacgtttgtgagcactgcaatgctgcctttagaacgaactatcacttacagagacatgtcttcattcatacaggtgaaaaaccatttcaatgtagtcaatgtgacatgcgtttcatacagaagtacctgcttcagagacatgagaagattcatactggtgaaaaaccatttcgctgtgatgaatgtggtatgagattcatacaaaaatatcatatggaaaggcataagagaactcatagtggagaaaaaccttaccagtgtgaatactgtttacagtatttttccagaacagatcgtgtattgaaacataaacgtatgtgccatgaaaatcatgacaaaaaactaaatagatgtgccatcaaaggtggccttctgacatctgaggaagattctggcttttctacatcaccaaaagacaactcactgccaaaaaagaaaaggcagaaaacggagaaaaaatcatctggaatggacaaagagagtgctttggacaaatctgacctgaaaaaagacaaaaatgattacttgcctctttattcttcaagtactaaagtaaaagatgagtatatggttgcagaatatgctgttgaaatgccacattcgtcagttgggggctcgcatttagaagatgcgtcaggagaaatacacccacctaagttagttctcaaaaaaattaatagtaagagaagtctgaaacagccactggagcaaaatcaaacaatttcacctttatccacatatgaagagagcaaagtttcaaagtatgcttttgaacttgtggataaacaggctttactggactcagaaggcaatgctgacattgatcaggttgataatttgcaggaggggcccagtaaacctgtgcatagtagtactaattatgatgatgccatgcagtttttgaagaagaagcggtatcttcaagcagcaagtaacaacagcagggaatatgcgctgaatgtgggtaccatagcttctcagccttctgtaacacaagcagctgtggcaagtgtcattgatgaaagtaccacggcatccatattagagtcacaggcactgaatgtggagattaagagtaatcatgacaaaaatgttattccagatgaggtactgcagactctgttggatcattattcccacaaagctaatggacagcatgagatatccttcagtgttgcagatactgaagtgacttctagcatatcaataaattcttcagaagtaccagaggtcaccccgtcagagaatgttggatcaagctcccaagcatcctcatcagataaagccaacatgttgcaggaatactccaagtttctgcagcaggctttggacagaactagccaaaatgatgcctatttgaatagcccgagccttaactttgtgactgataaccagaccctcccaaatcagccagcattctcttccatagacaagcaggtctatgccaccatgcccatcaatagctttcgatcaggaatgaattctccactaagaacaactccagataagtcccactttggactaatagttggtgattcacagcactcatttcccttttcaggtgatgagacaaaccatgcttctgccacatcaacacaggactttctggatcaagtgacttctcagaagaaagctgaggcccagcctgtccaccaagcttaccaaatgagctcctttgaacagcccttccgtgctccctatcatggatcaagagctggaatagctactcaatttagcactgccaatggacaggtgaaccttcggggaccagggacaagtgctgaattttcagaatttcccttggtgaatgtaaatgataatagagctgggatgacatcttcacctgatgccacaactggccagacttttggctaaaaaaaaaaaaaaagtgtaaataatactggcactttagaacagattaatcaagagtggggttactctgtgtaaatggagtgctgtacagatttaagagcaatgcgtaataacaagttaagctgatatgaatagcaagataatccaataactgcatttcgtttggttagtcagcattctttgaactgccttacatgttgtcacctttatagaagcaatgcattacttgttttagatcagaaacttgctattccacccacaccaagttaaaaaggaaaaaaaaaagactttcgcacaattgtttcctaactgataacattgtacattcttaggagattagtaattgtgtgaaatttactcatactgtttctaagtttttcagcatagtcattgcacttcagcagggaatctgagtatactttacagacagagtgaacttaaaagtttaatgtcaagagattatggcttaaataaattagtgtgtcctatagggggaaaaaaaccaagaaaccaccttttaaaaagaatgatatgccatatacccttgattttcattttgcattatattgacgtgtttttttgaaggaaaaaaagtaataaaaatctgatagtctaagactccactatttaaaagcctaattactttaaaaatatgcatactttcagaacttttaccaaaacacacaactgttgaagcagtcacttctctatggaagtatgcatattggtgtcagtttctttgtacagttgtacttagatattttttatgatttttcatgtgcaggtatcaaggttttgaagttttagtaaaagaaattctgtagattacattcccaagaacataatgcttacacaaaatgtatattccacgttttaaagcttaattgtattttactttacatatacacttcagttaacatagagcacttagaatctatttggtatttttgatttctcaaagtaaaaaaaaaattagatttttaggtttgatatggttgtgtcataatcatctcgtaattgacaattttaacttttggcaataaaaggaaattgggatatctttggaactgtaaaacctggtttaatctttttctttctagactcttgatagattggataattaaacagtatccagagaaactaaagaaatgggcattttaattgcatattttatcttgagttactttttaatgaacactgctcattacaactttacaaaccaaaagtgtttactaattccagtaactaccatttctttttcagctagatgagtgatcggaaaatttttgttgcatttcaaaatctaaataaactacagactttatccttataccatgaatgtttttttttaatactctgtcttaaaataatacagcatggtacaataaatagtgcttttatgtatatatacacacacacacttttctgaagaatgatggtttgagttatgcgttgggcagttttgatttttggaagttatattagttattgactctttgttacaactttttcatttttacattttaaattttctgccatcgttgtcacaatgcacatcctgatatagcaccagtgaaaatctaaaattaatacccttggaaaatgaaaatattcttaatttccattttgactcttatactggccctatagctctgcagtctttgtttcaatatagaatatgttatccatttaaattattttttcttttatttaatgttatcccaagactgttctcataaagaaagggaagaaataactatccacccttaacatccttcatttattttgaatatattggtgtttttatgataaggaatataaattatatttaatgtggtttcctgtatactttggttattaagttttgcttgaaatagtagttttcccgtttgacagctttctttgctgccaaagttttcaagaatttaagacttctttgaagtaaatatttaagttctgccattattgactcttaagattgtgtgtgttgtgttgtgcattacataattacaaaaaggcttcattcaggtgatacgttaaaaatggaactgtgctcaccctaaataggcattggtatttttctcttttggtgagagtaggcatttatttcttgagttgttttggagcctgatcaaaaattttgttcatggagaacttgatgcaattttgatacagtggagaggtttttttcggttgttttaacatcaccagcatagtttttagaatgtgactcttgctgagcatttagggtgagcttgggaaggaaggcctttgaaaatggtagttatgcaagcagactttcaggtgttgcattcctgttttcaacacatttctttaaatctacataatggcagacttttctaccaggttataagcagtttttagataagtgatactcagccagcataacttattgacttaccatttacgtatagtcatcactctcttactgtgaaattccaaatgcctaccagagttaccttgttctatcataatatgacaaacatctcaacagttttggatttccccactttggttcagaaggttatttaatttctatctgggcattaatggagaaaataagtagccttgtgtgctgcttcagattgaaacatggaggatatgagatattcttctgcaattcatgtttctcatttctcaaagtgagcacattgttctataaaaacatgctggtacacccttaaacttttgatcaatctgagtgaggtgtgcttttcctcttgggacctactcacgtttgaagattggaaacatcacgttaggcgaggcagtatctcttgaacatcttctaaagggttttttaaaaccttattctcacatatttcatttgtcttgaatatttaagtggctcttaaacgttttgggtctacatgcaaatgtggtacttaacaaggtaggaatccatcttcttagctctggctgagggtgccagccatcggtcaggtcatttttatctcaagaggcagaaggcagttatgtcaagaattgtgctcagggcaggatttcgtttccacagaggagagacacttgcagagtgccagctaggttagatcttttgccgcttctttcatttgattaatttgggtttttaaagggctgtttaaaaaaaaaaaaaaaaggccgggaaactttaaaagtaggcattactgtagtactgcatttcttagaacattttaaactagaactcatttttttttcacagtatatttacttgaagaagcactataataatcattgagaagtattttgagtctgaaatttaatttaattttccgtttcaaattgctttatttcagggaaataattttccagttgttttgctatattctgcaaataaaaaccgtgtttccttttttcacttaaactttggtaggaaacaaactaaagcagacaaacatttcttgttatgtttgttgctttctttaatccaatggataaaaaagtaaaaccctgtaaacattattttatttttttatgcaataccatgctgtaaatatggttcatcaaataaggatgtacctatgattgaatctttaattctgcacagttagagtttatatataaacgtgtcttgacaatcaaggacttttatgtgagtcttcctttatgatgtttattaatgttatgcattccatttgttttgaagtgagtaccaatgtgctaatttgtattgtctgaaagtatgtaatgtttttacagcttgtttttaagaatctgtaaatatgtacaaacaaatcacagtactgctttatgttagaaggcatatgatgttgtactgtatgtaagcaataatacatagcagtgctaactttacaagtagcatcaggaaagttctaaaaacatttcagagttattaattatccttatttcatttaataatgattatctttaatcagtttttataagcaaattccattgttcctcctattggaacgtaacactgtttacacagcataattgaagttgcaggggagacaggctaaatctgacttcatctgtactcactttcactaagcattgaatggccttaccactcttctgcaagatggaggaagaccgcaaaacttagtgcccatcacactgaaggaagggatgtggttttttttcctgcttctgtactgctacctaactttgtgatttgctttggattttaatatttgtttctgttttagattcaagcccgtaagttttgaggtgacttcagctccattgtgaaatagatagttctcttcatatttcataactacatttcaataattctaaactttctacattgatttttagatacttatttttcaagcttggtttctcagctgatcagatgaatttattcaacttcaatacaaagaaagacaaacctattatagtttcaagtgagtagatattatactgtacaggacagctatttgaacacacacatcactgctttagaaataaaaccgccaatttataaatgtatatgacctacattttataggaaaaaatgtttttaaatgctagtcatttatataatgtgctttgaaggatttgctagtccacttctgtcactttttagtacactggtatcttttatatgtaatgtatgctttttattattgtagcaaagcatttcagtagaaagaattttgcaacaatatgggggaaatttttcattgttggatttgaattatactggattttatctgtgtagtcttacttgtctttattttaatgctgtctgaagggaacttggtatccaaataaagcaggtaacctcattttacttcaagggcatactgtgtagtgctgaatttaatctgaaaatctgatgattttgaaaagaaaaacaagtttataaacattgtacagaagaaattaaatgtgtgtgatggaaatcctgatggtggagcacgttgaattttctgatatatagtgttattttcctgggatcccctatgccttctttgtatttcaactaataaaggaaaaaccctgtcattaaaactggtaagataataggatattctgattatacagtattactattcctatcccattttctgaccttttctcaatcactgtaaatttttattttctatttcctattgataattaaatatgtacataatatagacactgttgtatagaactaaatgaattgggttgctatgcttgagtgggtagtgaaatggaaatatttgatgaatactgagagttcctaaaatgctagagcaaatttccgagggaaaggggggcatcgtgtgtcttgggaaggttgcagcaggttgtttcttcaactccctaagaaatcattgggaaggactcaactgcaaactcgggatcagatacaaaatgggtctttccttcccctctcccccaaaaaataggagcactaaattttaaaatctactcaggtgacagttgctttgcaatgaaacttatcacattgaaattttcagtgttaaataaaaagagatttgtgatatttttaaatataaacttttacatcagtagtcagcagcctgacaattgaaatttggtaagtcgatatattttaaaatattttgctctccaaatagaattgtttttaaacaattgggaggttttttgtttctttaaatatgttttaattgtcattgtaaaaacaaaatcttgcttgaccctatattatgccatgaatgaattgctgagcctttataatacagtgacagcttgtttcatgcatagtcatggaacatagagatgttctttaaactgacctattgataagaggtttaatgagtttcacggctttcaacactattgtcatatagttatctttgccatttggagtttataaaaccattttatgtattgtgatactaaaggaagttgttttgctttactttaaattgaattattagactaatatttgcaaattctgcattttaaatgtggacactggctgtttgaaaaataaaatatagaatacagttttatggataattttcgagctgaatttttcacaatattctgaaccaaataacgaatggtaaatatgcaaaaatcatggtgcatagatataaccgtaaagagaaaagaatttctgtgtggaattaacagttacacaaattgggtaacaattatcagggcctttattatagctttatgtggaatgttattctaaaatgcaagagtcaaatgttactgtcattgaatattttagacttgaaacgtgtttatcatagagcgaagaaaatatgtgttcttttctttacagataagactctgttaacccactgtcagcatacgtgggatttcttttcttttttctttcattagtggagatttgttttcatccatctaccaccttgccagtaccctagcttgtgaccagcgggatgcattgtaagaaagttgtctgtggttaggagtgcagtctgggtccatggaacaaatttaaactaattggccctcgcaatgatcagtcctaggaccctggccttattattagcatggtgctttaaccaattgtacataataataccactgatagtctactaatgcatttcctagatcccagtttttcttgaatgattaggaatggtggggagaggggaggggagatattctacatgatacttctccaatcttctaaagattataagaaaaaataaaaaattgaagtcacttgaaaaaaaaaaaaaaaaaaaaaaaaaaaaaaaa

SEQ ID NO: 210563 - DNA, 2385 bp, Artificial Sequence
  derived and/or modified sequence
atgaacatcgacgacaagctggagggcctgttcctgaagtgcggcggcatcgacgagatgcagagcagcagaaccatggtggtgatgggcggcgtgagcggccagagcaccgtgagcggcgagctgcaggacagcgtgctgcaggacagaagcatgccccaccaggagatcctggccgccgacgaggtgctgcaggagagcgagatgagacagcaggacatgatcagccacgacgagctgatggtgcacgaggagaccgtgaagaacgacgaggagcagatggagacccacgagagactgccccagggcctgcagtacgccctgaacgtgcccatcagcgtgaagcaggagatcaccttcaccgacgtgagcgagcagctgatgagagacaagaagcagatcagagagcccgtggacctgcagaagaagaagaagagaaagcagagaagccccgccaagatcctgaccatcaacgaggacggcagcctgggcctgaagacccccaagagccacgtgtgcgagcactgcaacgccgccttcagaaccaactaccacctgcagagacacgtgttcatccacaccggcgagaagcccttccagtgcagccagtgcgacatgagattcatccagaagtacctgctgcagagacacgagaagatccacaccggcgagaagcccttcagatgcgacgagtgcggcatgagattcatccagaagtaccacatggagagacacaagagaacccacagcggcgagaagccctaccagtgcgagtactgcctgcagtacttcagcagaaccgacagagtgctgaagcacaagagaatgtgccacgagaaccacgacaagaagctgaacagatgcgccatcaagggcggcctgctgaccagcgaggaggacagcggcttcagcaccagccccaaggacaacagcctgcccaagaagaagagacagaagaccgagaagaagagcagcggcatggacaaggagagcgccctggacaagagcgacctgaagaaggacaagaacgactacctgcccctgtacagcagcagcaccaaggtgaaggacgagtacatggtggccgagtacgccgtggagatgccccacagcagcgtgggcggcagccacctggaggacgccagcggcgagatccacccccccaagctggtgctgaagaagatcaacagcaagagaagcctgaagcagcccctggagcagaaccagaccatcagccccctgagcacctacgaggagagcaaggtgagcaagtacgccttcgagctggtggacaagcaggccctgctggacagcgagggcaacgccgacatcgaccaggtggacaacctgcaggagggccccagcaagcccgtgcacagcagcaccaactacgacgacgccatgcagttcctgaagaagaagagatacctgcaggccgccagcaacaacagcagagagtacgccctgaacgtgggcaccatcgccagccagcccagcgtgacccaggccgccgtggccagcgtgatcgacgagagcaccaccgccagcatcctggagagccaggccctgaacgtggagatcaagagcaaccacgacaagaacgtgatccccgacgaggtgctgcagaccctgctggaccactacagccacaaggccaacggccagcacgagatcagcttcagcgtggccgacaccgaggtgaccagcagcatcagcatcaacagcagcgaggtgcccgaggtgacccccagcgagaacgtgggcagcagcagccaggccagcagcagcgacaaggccaacatgctgcaggagtacagcaagttcctgcagcaggccctggacagaaccagccagaacgacgcctacctgaacagccccagcctgaacttcgtgaccgacaaccagaccctgcccaaccagcccgccttcagcagcatcgacaagcaggtgtacgccaccatgcccatcaacagcttcagaagcggcatgaacagccccctgagaaccacccccgacaagagccacttcggcctgatcgtgggcgacagccagcacagcttccccttcagcggcgacgagaccaaccacgccagcgccaccagcacccaggacttcctggaccaggtgaccagccagaagaaggccgaggcccagcccgtgcaccaggcctaccagatgagcagcttcgagcagcccttcagagccccctaccacggcagcagagccggcatcgccacccagttcagcaccgccaacggccaggtgaacctgagaggccccggcaccagcgccgagttcagcgagttccccctggtgaacgtgaacgacaacagagccggcatgaccagcagccccgacgccaccaccggccagaccttcggctag

SEQ ID NO: 210564 - DNA, 252 bp, Artificial Sequence
  derived and/or modified sequence
atgaacatcgacgacaagctggagggcctgttcctgaagtgcggcggcatcgacgagatgcagagcagcagaaccatggtggtgatgggcggcgtgagcggccagagcaccgtgagcggcgagctgcaggacagcgtgctgcaggacagaagcatgccccaccaggagatcctggccgccgacgaggtgctgcaggagagcgagatgagacagcaggacatgatcagccacgacgagctgatggtgcactag

SEQ ID NO: 210565 - DNA, 435 bp, Artificial Sequence
  derived and/or modified sequence
atgaagggcgagaagcccttccagtgcagccagtgcgacatgagattcatccagaagtacctgctgcagagacacgagaagatccacaccggcgagaagcccttcagatgcgacgagtgcggcgacgagaccaaccacgccagcgccaccagcacccaggacttcctggaccaggtgaccagccagaagaaggccgaggcccagcccgtgcaccaggcctaccagatgagcagcttcgagcagcccttcagagccccctaccacggcagcagagccggcatcgccacccagttcagcaccgccaacggccaggtgaacctgagaggccccggcaccagcgccgagttcagcgagttccccctggtgaacgtgaacgacaacagagccggcatgaccagcagccccgacgccaccaccggccagaccttcggctag

SEQ ID NO: 210566 - DNA, 78 bp, Artificial Sequence
  derived and/or modified sequence
atgaacatcgacgacaagctggagggcctgttcctgaagtgcggcggcatcgacgagatgcagagcagcagaacctag

SEQ ID NO: 210567 - DNA, 228 bp, Artificial Sequence
  derived and/or modified sequence
atgaacatcgacgacaagctggagggcctgttcctgaagtgcggcggcatcgacgagatgcagagcagcagaaccatggtggtgatgggcggcgtgagcggccagagcaccgtgagcggcgagctgcaggacagcgtgctgcaggacagaagcatgccccaccaggagatcctggccgccgacgaggtgctgcaggagagcgagatgagacagcaggacatgatctag

SEQ ID NO: 210568 - DNA, 1365 bp, Artificial Sequence
  derived and/or modified sequence
atgaacatcgacgacaagctggagggcctgttcctgaagtgcggcggcatcgacgagatgcagagcagcagaaccatggtggtgatgggcggcgtgagcggccagagcaccgtgagcggcgagctgcaggacagcgtgctgcaggacagaagcatgccccaccaggagatcctggccgccgacgaggtgctgcaggagagcgagatgagacagcaggacatgatcagccacgacgagctgatggtgcacgaggagaccgtgaagaacgacgaggagcagatggagacccacgagagactgccccagggcctgcagtacgccctgaacgtgcccatcagcgtgaagcaggagatcaccttcaccgacgtgagcgagcagctgatgagagacaagaagcagatcagagagcccgtggacctgcagaagaagaagaagagaaagcagagaagccccgccaagatcctgaccatcaacgaggacggcagcctgggcctgaagacccccaagagccacgtgtgcgagcactgcaacgccgccttcagaaccaactaccacctgcagagacacgtgttcatccacaccggcgagaagcccttccagtgcagccagtgcgacatgagattcatccagaagtacctgctgcagagacacgagaagatccacaccggcgagaagcccttcagatgcgacgagtgcggcatgagattcatccagaagtaccacatggagagacacaagagaacccacagcggcgagaagccctaccagtgcgagtactgcctgcagtacttcagcagaaccgacagagtgctgaagcacaagagaatgtgccacgagaaccacgacaagaagctgaacagatgcgccatcaagggcggcctgctgaccagcgaggaggacagcggcttcagcaccagccccaaggacaacagcctgcccaagaagaagagacagaagaccgagaagaagagcagcggcatggacaaggagagcgccctggacaagagcgacctgaagaaggacaagaacgactacctgcccctgtacagcagcagcaccaaggtgaaggacgagtacatggtggccgagtacgccgtggagatgccccacagcagcgtgggcggcagccacctggaggacgccagcggcgagatccacccccccaagctggtgctgaagaagatcaacagcaagagaagcctgaagcagcccctggagcagaaccagaccatcagccccctgagcacctacgaggagagcaagttccagagcatgctgctgaacctgtggatcaacagactgtactggacccagaaggccatgctgaccctgatcagactgatcatctgcagaagagcccagtag

SEQ ID NO: 210569 - DNA, 396 bp, Artificial Sequence
  derived and/or modified sequence
atgagattcatccagaagtacctgctgcagagacacgagaagatccacaccggcgagaagcccttcagatgcgacgagtgcggcgacgagaccaaccacgccagcgccaccagcacccaggacttcctggaccaggtgaccagccagaagaaggccgaggcccagcccgtgcaccaggcctaccagatgagcagcttcgagcagcccttcagagccccctaccacggcagcagagccggcatcgccacccagttcagcaccgccaacggccaggtgaacctgagaggccccggcaccagcgccgagttcagcgagttccccctggtgaacgtgaacgacaacagagccggcatgaccagcagccccgacgccaccaccggccagaccttcggctag

SEQ ID NO: 210570 - DNA, 2385 bp, Artificial Sequence
  derived and/or modified sequence
atgaatattgatgataagctggaaggcttgttcttgaagtgtggcggaattgacgaaatgcaatcatcccgcacaatggtcgtcatgggcggagtcagtggacagagcacagttagcggagaactacaggacagcgtgttgcaggataggagtatgccgcaccaggaaatcctcgccgctgatgaagtgctccaggaatccgagatgcgccagcaggatatgatctcacatgacgaactgatggtgcacgaggaaacggtcaaaaacgatgaagaacagatggaaacccacgaaaggctcccacagggattgcagtatgccttaaatgtccctattagtgtgaagcaagagatcacatttactgacgtgtcagaacagctcatgagggacaaaaaacaaatccgagaacccgtggacctccaaaaaaaaaaaaaaagaaaacaacgatctccagccaagatcttaactattaacgaggatggtagtctggggctgaaaactcccaagtctcatgtgtgcgaacactgtaatgctgcctttcgaacaaactatcaccttcagcgccacgtctttatccataccggcgagaaaccttttcagtgtagtcagtgcgatatgcgttttattcagaaatacctgcttcagaggcacgagaaaatacataccggcgagaagccattcagatgtgacgagtgcggtatgcggttcattcagaagtatcacatggaaagacataagcgcactcattcaggagagaaaccataccagtgcgaatattgtctccagtatttttccaggactgatagagtcctgaagcataaaagaatgtgccacgagaatcatgacaaaaagttgaacaggtgcgccatcaaaggaggcctgctgaccagcgaggaagatagtggcttcagcacatccccaaaggataatagtctccccaagaaaaagagacagaagacagagaagaaatcttccgggatggataaagagagcgctctggataaaagcgatctgaaaaaggataagaatgattacctgcccctctattcttcatcaacaaaagtcaaggacgaatacatggttgcggagtacgccgttgaaatgccccactcgagtgtgggaggctcacaccttgaagatgctagcggcgagatccaccctcccaagctcgtcctgaaaaaaatcaattctaaacggtcactgaaacagccgttagaacagaaccagaccatttcgcctctgagtacatacgaggaatccaaggtgtcaaaatatgcctttgagttagtcgataagcaggccttgctagacagcgaaggcaatgcagatattgaccaagtggataacttgcaggagggaccttccaaacccgttcactcctcaacaaactatgatgacgcaatgcagttccttaagaagaagcgctacctccaggctgcttctaataacagccgggagtacgccctcaatgtgggaactatcgcatctcagccctccgtcactcaagcagccgttgccagcgtcatagatgagagtactaccgcctctatccttgagtcacaggccctcaacgttgagatcaaatcgaaccatgacaaaaatgttatcccagatgaagttttgcaaacattgctggaccattattcgcacaaggcaaacggacagcatgaaatatccttttctgtggctgatactgaagtgacgtcatccatatctataaactcctcagaggttcccgaggttactccctctgagaatgttggctcctctagtcaagcctcttcatccgataaagctaatatgttgcaggagtactctaaattcctgcagcaagcccttgatcgaacttctcagaacgatgcctacctcaattccccatctttgaattttgtgacagacaatcagaccctacccaatcagcctgcattttcttctatcgataagcaggtttacgccacgatgcctattaattcctttcggagcggcatgaattcgcccctgcgcacgactcccgacaaaagccacttcgggctcattgttggagattctcaacatagcttccccttctccggtgacgagactaaccatgcttctgccacctccacccaagattttctggatcaggtgacctctcaaaaaaaggctgaagctcaacctgtgcatcaggcgtaccagatgtcatcattcgagcagccatttagggctccatatcatgggtcccgggcgggtatcgccacacaattctccactgcgaatggccaggtgaacctgagaggccccgggacaagcgcggagttctccgagttccctctcgttaacgtgaatgacaatagagccggaatgacatccagcccagacgccactacaggccagactttcggctag

SEQ ID NO: 210571 - DNA, 252 bp, Artificial Sequence
  derived and/or modified sequence
atgaacatagatgacaagctggaggggctctttctgaagtgcggaggcatcgacgagatgcagtccagcaggacaatggtcgtaatggggggcgtgtcaggccagtctaccgtcagcggtgaactgcaagactcggtgcttcaagatcgttctatgccgcaccaggaaatcttagccgccgacgaggttctgcaggagtccgagatgaggcagcaagatatgatttcgcacgatgaactgatggtgcactag

SEQ ID NO: 210572 - DNA, 435 bp, Artificial Sequence
  derived and/or modified sequence
atgaagggcgaaaagccgtttcagtgcagtcagtgcgacatgcggtttatccagaagtacctgctgcaacgacacgaaaaaatccatacaggggaaaagcccttcagatgcgatgaatgcggcgacgagaccaatcacgccagcgccacatctacacaagatttcctagatcaggtgacttctcaaaaaaaggctgaggcacaaccggttcatcaggcataccagatgtcaagtttcgagcagccctttcgggctccctaccatgggtcccgcgcagggatcgctactcaatttagcaccgctaatggacaggtcaatctgcgaggtccaggcacctctgccgagttttcagagttccctcttgtcaacgtgaacgacaatagggcaggcatgacatcaagccccgatgcaaccactggccagacttttgggtag

SEQ ID NO: 210573 - DNA, 78 bp, Artificial Sequence
  derived and/or modified sequence
atgaacatcgacgataagctcgagggtctgttcctcaagtgtggcggaattgacgagatgcagtcaagccgcacttag

SEQ ID NO: 210574 - DNA, 2385 bp, Artificial Sequence
  derived and/or modified sequence
atgaatattgacgacaagttggagggtttgtttctcaagtgcggcgggatcgacgaaatgcagtcgtccagaactatggtcgttatgggcggtgtgtcaggccaatcaacagtttcgggagaattgcaagatagtgtcctgcaggaccgctcgatgcctcatcaggagatactggcagccgacgaggtcttgcaggaaagcgaaatgagacaacaggacatgatctcccacgatgaactgatggtccacgaggagaccgtgaagaatgacgaagagcagatggagacccatgagcggctcccacaaggactgcagtacgctttaaatgtgccaatctccgtcaaacaagaaatcaccttcactgacgtgtctgagcagctgatgcgcgataagaagcagatcagggaacctgtcgacctgcagaaaaaaaagaaacgaaagcagcgtagccctgctaagatcttgactataaacgaagacggatctctgggactcaagaccccaaaatctcatgtatgcgaacactgtaatgctgcttttcggacaaattaccatctgcagcgccacgttttcattcatactggtgaaaagcccttccagtgcagccagtgcgacatgcgtttcattcagaagtatctgctccagcgccatgagaaaattcacaccggagagaagcctttcaggtgtgacgagtgtggaatgcggttcatccagaaatatcacatggagagacacaaaagaacccactccggggagaaaccatatcagtgcgagtactgcctgcagtatttcagcaggacagacagggttctaaaacacaaacggatgtgccacgaaaaccacgacaagaaactgaatagatgcgcaattaaaggcgggctgcttaccagtgaagaggattccgggtttagtactagccccaaggataactcattgcctaagaagaagcgccagaaaaccgagaaaaagagctctggcatggataaggagagcgcactcgataagagtgacctaaaaaaggacaagaacgattacctaccattatattcgtcaagcactaaggtgaaagacgaatatatggttgcagagtacgctgtggaaatgccacactcgagtgtgggcggctcgcatcttgaggacgcatcaggcgagattcaccccccaaaactggtccttaagaaaatcaacagtaagcgatcgctaaaacagcccctcgagcagaaccagaccatttcaccgctgtctacctacgaggaaagcaaggtgagcaaatacgccttcgagctggtggataagcaagccctgttagacagtgagggaaacgctgacatcgaccaggtcgacaatctccaggagggtccatccaagccggttcacagttcgaccaactacgacgacgccatgcagttcctgaagaaaaaaaggtacctgcaagctgccagcaacaattcccgggagtacgccctgaatgtggggaccattgctagccagccctccgtgacccaggctgctgtcgcttccgttatcgacgaatcaacaactgcctctatcctggaaagtcaggctctgaatgtggagataaagagcaatcacgacaagaacgtgatacccgatgaagtgttgcagactctgctggatcattactctcacaaggcgaatggacagcatgagatctcattcagtgtggcagacactgaagtcacctcatctataagtattaactcttccgaggtgcctgaggtgacccccagtgaaaacgtgggaagctcttcccaggccagctcctccgataaggccaacatgttgcaagagtatagcaaattcttgcagcaggctctggaccgcacaagccagaacgatgcctatctcaacagcccttctctgaactttgtaacagacaatcagactctcccaaatcagccagcattttcatccatcgataagcaagtctacgccacaatgcccatcaatagctttagatccggtatgaactcgcccttgagaaccacccccgataaatctcacttcggtttaatcgtgggcgattcacagcacagtttccccttttccggcgatgagacaaaccacgccagtgccacctcaactcaggatttcctggaccaagtcacaagccagaagaaggccgaagcccaacctgttcaccaggcatatcaaatgtcaagtttcgagcaaccctttcgagcaccataccatgggtccagagctgggattgctacacagtttagcactgccaatgggcaggtcaatttgcgcgggcccggcacctccgccgaattcagcgagttccccctcgtaaatgtaaacgacaatcgggccgggatgacgtcctcccccgacgccactacagggcagacttttggatag

SEQ ID NO: 210575 - DNA, 2385 bp, Artificial Sequence
  derived and/or modified sequence
atgaatatcgacgataaactggaagggttatttttgaagtgcggaggaattgacgaaatgcaatccagccggactatggtggttatgggtggagtcagcggccagtcgacagtgtccggtgagttgcaggatagcgtccttcaggatcgctctatgccccatcaggaaattctggctgcagacgaagttctgcaggagagtgagatgcgccagcaggatatgatttcccatgatgaacttatggtccacgaggagactgtgaagaatgacgaggaacagatggagacacacgaacggctcccccaaggcttacaatatgcattgaatgttcccatctcagtcaaacaggaaattaccttcactgacgtttcagagcagctgatgcgcgacaagaagcagatccgcgaacccgttgacctccagaaaaagaaaaaacgtaagcagcggtcccccgccaagatactcacaatcaacgaagatggcagcctgggcctgaagacaccaaaatcacatgtctgtgagcattgtaatgctgccttccgcaccaattatcatttgcagcgccacgtctttatccacacaggagagaagcccttccagtgcagtcagtgcgacatgagatttatccagaagtatctgttgcagcgtcacgaaaaaatccataccggggaaaaaccgttcagatgtgacgagtgtggcatgcgtttcatacagaaatatcacatggaacgccataaaaggacacacagtggcgagaaaccttaccagtgtgagtactgcctgcagtatttttcccgcacagacagagttctgaagcacaagcgtatgtgtcacgaaaaccacgacaagaagctgaaccgctgcgccattaaagggggccttctcactagcgaagaagatagcggctttagtacgtccccaaaggataattccttgcccaaaaaaaaaagacagaagactgagaaaaaatctagtggcatggacaaagaatctgcgttggacaagagtgacttgaagaaagataaaaacgactacctccccttatactcgagctcgaccaaagtaaaagacgaatacatggtggctgagtatgctgtggagatgcctcattccagtgtgggggggtcccatctggaagacgcctctggcgagatccatccacctaaattggtcctgaaaaaaattaatagtaagcgttctctcaaacagccgctcgaacagaatcagacaattagtcctttgtcgacctatgaagaaagtaaagtgtccaaatacgcattcgaactggtggacaagcaggccctgttagactccgagggcaacgccgacattgaccaggttgacaacttgcaggaaggaccaagtaagcctgtgcactcatcaaccaactatgacgatgcaatgcagtttctcaagaagaaacgctatcttcaagctgcgagcaacaatagtcgggaatatgctttgaacgtgggcactattgcatcacagccttccgtcactcaggccgccgtagcctcagtgatcgatgaatccacaaccgcttcaattctggagagccaagccctaaacgtggagatcaagagcaatcatgacaagaacgtcattcccgacgaagttctacagaccttgctggatcattacagtcataaagccaatggccagcacgagatatccttctctgtggcagacacagaggtgacgtcaagcatttccatcaatagctctgaggtgcctgaagtgacacctagcgaaaatgtgggatcgtccagccaggcctccagcagcgacaaggcgaatatgctccaagagtactcgaaatttttacagcaggcccttgaccggacttcgcaaaacgacgcgtaccttaattcccctagtttaaacttcgtgacagacaatcaaactctccccaatcagccagccttttctagcattgacaaacaggtctacgcaactatgcctattaattctttcagatcaggaatgaacagccccctgcggacaacacctgacaaaagccactttggactgatagtcggcgacagccagcactcttttcccttcagtggagatgaaacgaaccacgctagcgcaacttccactcaggactttttggaccaggtgacttcccagaagaaagctgaagctcagcctgtccatcaggcatatcagatgtcgagctttgagcagcctttcagagccccttaccatggttcaagagcaggtatcgccacccaattctctactgctaatggacaggttaacctgcgcgggccaggtacgagcgccgagttctccgagtttcccctagtcaatgtgaacgataacagagccggaatgacctcctcacccgacgccacaactggacaaacgtttgggtag

SEQ ID NO: 210576 - DNA, 2385 bp, Artificial Sequence
  derived and/or modified sequence
atgaacatcgatgacaagctagaagggctgttcctgaagtgtggtggcatcgacgaaatgcagtcctccagaacaatggtagtgatgggcggagtgagcggacagagcacggtgtctggagaactccaggacagcgtgctgcaagatagaagtatgcctcaccaggaaatcctcgcagccgatgaggtactgcaggagagtgagatgcggcagcaggacatgatttcccacgatgagctgatggtgcacgaggaaaccgtaaaaaacgacgaggaacagatggaaacccacgaacgtctgccacagggacttcagtacgctctcaatgtgcctatttcagtcaagcaggagatcaccttcacagatgtgtccgaacaactcatgcgtgataagaaacagatccgggaaccagtcgatctgcaaaagaaaaagaagcggaagcaaagaagccctgctaaaatcctgacaatcaacgaagacggatcgctcggcctgaaaactcctaagtcgcatgtctgtgagcactgcaacgccgcgtttcgcacaaattatcacttacaaagacatgtcttcatccacactggggagaaaccattccagtgttcccagtgtgacatgcgtttcattcagaaatatttattacagcggcacgaaaaaattcacacgggggagaaaccttttagatgtgacgaatgtgggatgagattcatccagaaataccacatggagagacacaagagaacacactctggagaaaagccttatcaatgtgagtactgtttgcagtacttctctaggactgacagggtcttgaagcataagagaatgtgtcatgaaaatcatgataaaaagctgaaccggtgcgccatcaagggaggtctactgacgtcagaagaggactccggtttttccacttccccgaaagataacagtcttcctaagaagaagaggcagaagactgagaaaaaatcctctggcatggacaaggaaagtgcattggataaatcagacctgaagaaggataaaaatgattatctacctctgtactctagcagcaccaaggtaaaggacgaatacatggtggctgaatacgcagttgaaatgccacattcaagcgtgggcggctcccacttggaagatgcctcaggtgaaattcaccctcctaagttagtgctgaaaaaaataaactccaagcgatctcttaagcagccactggagcaaaaccaaactatatcccccctttccacttatgaggagtcaaaagtgtcaaagtacgcgttcgagttagtggacaagcaagcattactggattcagaagggaatgcagatatcgatcaagtggacaacctgcaggagggaccatcgaaaccagtgcatagctctacaaactacgacgacgccatgcagtttcttaagaagaaaaggtatctccaggccgcctcaaacaattcacgcgaatacgcactcaatgttggaaccattgcaagtcagccatcagtcacccaagctgccgttgcatccgtgattgacgaatcgactacagcaagtatcctggagagtcaggctctgaacgtggagatcaaaagcaaccacgacaagaacgtgattcccgatgaagttctccagacattgctcgatcactactcccataaagcaaatggacaacacgagatttcattctccgtcgccgataccgaagtcacttccagcatctctatcaattcctcagaagtccccgaggttactccatctgagaatgtgggctctagctcccaagcatccagctccgacaaagctaacatgcttcaggaatatagtaaatttctgcagcaggccctggatcggacctcacagaatgacgcctacttaaattcaccttcgctcaatttcgttaccgacaaccagactctgcccaaccaacccgcgttctcctctattgacaaacaggtgtatgctacaatgccaattaactcctttaggtccggtatgaatagccccctacgaacaactccagataaaagtcatttcgggctgatcgttggcgacagtcagcactcttttcccttcagcggagacgaaactaatcatgcgtcagcaacgtcaactcaagactttctggatcaggtgacaagccagaaaaaagctgaggcccaacccgtccaccaggcctaccagatgtcttccttcgagcagcctttccgggctccctatcatggcagcagggctgggatcgccacacagttctcgactgcaaacggccaagttaatctgcgcggcccagggacatcagcagagttctctgagtttcctctggttaacgtgaatgacaatcgggccggcatgacatcatctcccgacgcaacaactggccagacatttggttag

SEQ ID NO: 210577 - DNA, 228 bp, Artificial Sequence
  derived and/or modified sequence
atgaacattgacgataaactggaagggctcttcttgaagtgcggcggtatcgatgaaatgcagtcttctcggacgatggtggtgatggggggagtcagcggacagtcaacagttagcggcgaactgcaggattcagtgcttcaggatcgtagtatgccacatcaggagatcctggccgcggatgaagtcctgcaagagagcgagatgagacagcaagacatgatttag

SEQ ID NO: 210578 - DNA, 1365 bp, Artificial Sequence
  derived and/or modified sequence
atgaacattgacgataagctagaaggcctgtttctcaagtgcggaggcatcgatgaaatgcagtctagtcgcaccatggttgtgatggggggggtcagtggtcagagcaccgtatccggggaactccaggactcagtcctgcaagatcggagcatgcctcatcaggaaattctggctgccgatgaggtactgcaggaatctgagatgcggcagcaagatatgatttctcacgacgagctgatggtacatgaggaaaccgtgaagaacgacgaagaacagatggagacccatgaacgactgccccaggggttgcagtatgctttgaacgttccgatttcagtgaaacaagaaatcactttcacagatgtctcagaacagcttatgagagataagaagcagatccgcgagccagtggatcttcaaaagaagaaaaaacgcaagcagagatcacctgcaaaaattctgactatcaacgaggacggctccctcggtctcaagacaccgaagagccatgtctgcgagcattgcaacgccgcctttcggacgaactaccacctccagcgtcacgtcttcattcatacaggggagaagcctttccaatgtagccagtgcgacatgcgtttcattcaaaaatacttgctccagaggcatgaaaaaatccacactggtgagaaaccctttcgatgcgacgaatgtggtatgcgctttatacagaaataccacatggaacggcacaagcgcacccactccggcgaaaaaccctaccagtgcgaatattgcctccaatactttagcagaaccgatcgtgtactaaaacataagcgcatgtgtcatgaaaatcacgataagaaattaaaccgatgtgccattaaggggggtcttctgacgtctgaggaagacagtgggttctcaactagccccaaagataactctttgcccaagaaaaaaaggcaaaagacagagaaaaaaagcagcggcatggacaaagaaagcgcacttgataagtcggatcttaagaaggataagaacgattatcttcccttgtattcctcatctaccaaagtgaaggatgaatacatggtggcagaatatgccgttgagatgccacatagcagtgtcggtggatcccacctcgaggacgccagcggagaaatccaccctccaaaactcgtgcttaagaaaattaactctaagaggtccctgaaacagccactcgaacagaaccaaacgatctccccactgtcaacatatgaggaatccaagttccagtcaatgcttctgaatctgtggattaacagactctactggacacagaaggctatgttgactctgattaggctgataatttgtcgcagggcacagtag

SEQ ID NO: 210579 - DNA, 396 bp, Artificial Sequence
  derived and/or modified sequence
atgcgattcattcagaaatacctgttgcagcgccacgagaagatccataccggggaaaagccatttaggtgtgatgagtgcggcgacgagacaaaccatgcctcagccacatcaactcaagattttttagatcaggtcacctcccagaaaaaggccgaggcacagcctgtgcatcaggcttaccagatgtcgtcatttgaacaaccctttagagctccttaccatggctctcgggccgggattgcgacccagttctctaccgctaatgggcaggtcaatctgagaggccccggaacctcagccgagttctctgagtttccactcgtgaacgtcaacgataatcgtgcggggatgacatcatcaccagatgctactactggacaaacctttggatag

SEQ ID NO: 210580 - DNA, 2385 bp, Artificial Sequence
  derived and/or modified sequence
atgaacattgatgacaagctggagggcctcttcctgaagtgtggcggcattgatgagatgcagagcagcaggaccatggtggtgatgggcggcgtgtctggccagagcacagtgtctggagagctgcaggacagcgtgctgcaggaccgctccatgccccaccaggagatcctggccgcagatgaggtgctgcaggagagcgagatgaggcagcaggacatgatcagccatgatgagctgatggtgcatgaggagaccgtgaagaatgatgaggagcagatggagacccatgagcggctgccccagggcctgcagtatgccctgaatgtgcccatctctgtgaagcaggagatcaccttcacagatgtgtctgagcagctgatgagggacaagaagcagatccgggagcctgtggacctgcagaagaagaagaagaggaagcagaggagccctgccaagatcctgaccatcaatgaagatggcagcctgggcctgaagacccccaagagccacgtgtgtgagcactgcaatgctgccttccgcaccaactaccacctgcagagacatgtgttcatccacactggagagaagcccttccagtgcagccagtgtgacatgaggttcatccagaagtacctgctgcagagacatgagaagatccacactggagagaagcccttccgctgtgatgaatgtggcatgaggttcatccagaagtaccacatggagcggcacaagaggacccacagcggggagaagccctaccagtgtgagtactgcctgcagtacttcagcaggacagacagagtgctgaagcacaagaggatgtgccatgaaaatcatgacaagaagctgaacagatgtgccatcaagggcggcctgctgaccagtgaagaagattctggcttcagcaccagccccaaggacaacagcctgcccaagaagaagaggcagaagacagagaagaagagcagcggcatggacaaggagagcgccctggacaagagtgacctgaagaaggacaagaatgactacctgcccctgtacagcagcagcaccaaggtgaaggatgagtacatggtggccgagtatgctgtggagatgccccacagctctgtgggcggcagccacctggaggatgccagcggggagatccacccccccaagctggtgctgaagaagatcaacagcaagaggagcctgaagcagcccctggagcagaaccagaccatcagccccctgagcacctatgaggagagcaaggtgtccaaatatgcctttgagctggtggacaagcaggccctgctggacagcgagggcaatgctgacatcgaccaggtggacaacctgcaggagggccccagcaagcctgtgcacagcagcaccaactatgatgatgccatgcagttcctgaagaagaagcgctacctgcaggccgccagcaacaacagccgggagtatgccctgaatgtgggcaccatcgccagccagcccagcgtgacccaggccgctgtggcctctgtgattgatgagagcaccacagccagcatcctggagagccaggccctgaatgtggagatcaagagcaaccacgacaagaatgtcatcccagatgaggtgctgcagaccctgctggaccactacagccacaaggccaacggccagcacgagatctccttctctgtggccgacacagaggtgaccagcagcatcagcatcaacagcagcgaggtgcctgaggtgacccccagtgaaaatgtgggcagcagcagccaggccagcagcagtgacaaggccaacatgctgcaggagtacagcaagttcctgcagcaggccctggacaggaccagccagaatgatgcctacctgaacagccccagcctgaactttgtgacagacaaccagaccctgcccaaccagcctgccttcagcagcattgacaagcaggtgtatgccaccatgcccatcaacagcttccgcagcggcatgaacagccccctgcggaccaccccagacaagagccacttcggcctgattgtgggggacagccagcacagcttccccttctctggagatgagaccaaccacgccagcgccaccagcacccaggacttcctggaccaggtgaccagccagaagaaggccgaggcccagcctgtgcaccaggcctaccagatgagcagctttgagcagcccttccgggccccctaccacggcagccgggccggcatcgccacccagttcagcacagccaacggccaggtgaacctgcggggccctggcaccagcgctgagttcagcgagttccccctggtgaatgtgaatgacaacagagctggcatgaccagcagcccagatgccaccaccggccagacctttggatag

SEQ ID NO: 210581 - DNA, 252 bp, Artificial Sequence
  derived and/or modified sequence
atgaacattgatgacaagctggagggcctcttcctgaagtgtggcggcattgatgagatgcagagcagcaggaccatggtggtgatgggcggcgtgtctggccagagcacagtgtctggagagctgcaggacagcgtgctgcaggaccgctccatgccccaccaggagatcctggccgcagatgaggtgctgcaggagagcgagatgaggcagcaggacatgatcagccatgatgagctgatggtgcactag

SEQ ID NO: 210582 - DNA, 435 bp, Artificial Sequence
  derived and/or modified sequence
atgaagggggagaagcccttccagtgcagccagtgtgacatgaggttcatccagaagtacctgctgcagagacatgagaagatccacactggagagaagcccttccgctgtgatgaatgtggagatgagaccaaccacgccagcgccaccagcacccaggacttcctggaccaggtgaccagccagaagaaggccgaggcccagcctgtgcaccaggcctaccagatgagcagctttgagcagcccttccgggccccctaccacggcagccgggccggcatcgccacccagttcagcacagccaacggccaggtgaacctgcggggccctggcaccagcgctgagttcagcgagttccccctggtgaatgtgaatgacaacagagctggcatgaccagcagcccagatgccaccaccggccagacctttggatag

SEQ ID NO: 210583 - DNA, 78 bp, Artificial Sequence
  derived and/or modified sequence
atgaacattgatgacaagctggagggcctcttcctgaagtgtggcggcattgatgagatgcagagcagcaggacatag

SEQ ID NO: 210584 - DNA, 228 bp, Artificial Sequence
  derived and/or modified sequence
atgaacattgatgacaagctggagggcctcttcctgaagtgtggcggcattgatgagatgcagagcagcaggaccatggtggtgatgggcggcgtgtctggccagagcacagtgtctggagagctgcaggacagcgtgctgcaggaccgctccatgccccaccaggagatcctggccgcagatgaggtgctgcaggagagcgagatgaggcagcaggacatgatctag

SEQ ID NO: 210585 - DNA, 1365 bp, Artificial Sequence
  derived and/or modified sequence
atgaacattgatgacaagctggagggcctcttcctgaagtgtggcggcattgatgagatgcagagcagcaggaccatggtggtgatgggcggcgtgtctggccagagcacagtgtctggagagctgcaggacagcgtgctgcaggaccgctccatgccccaccaggagatcctggccgcagatgaggtgctgcaggagagcgagatgaggcagcaggacatgatcagccatgatgagctgatggtgcatgaggagaccgtgaagaatgatgaggagcagatggagacccatgagcggctgccccagggcctgcagtatgccctgaatgtgcccatctctgtgaagcaggagatcaccttcacagatgtgtctgagcagctgatgagggacaagaagcagatccgggagcctgtggacctgcagaagaagaagaagaggaagcagaggagccctgccaagatcctgaccatcaatgaagatggcagcctgggcctgaagacccccaagagccacgtgtgtgagcactgcaatgctgccttccgcaccaactaccacctgcagagacatgtgttcatccacactggagagaagcccttccagtgcagccagtgtgacatgaggttcatccagaagtacctgctgcagagacatgagaagatccacactggagagaagcccttccgctgtgatgaatgtggcatgaggttcatccagaagtaccacatggagcggcacaagaggacccacagcggggagaagccctaccagtgtgagtactgcctgcagtacttcagcaggacagacagagtgctgaagcacaagaggatgtgccatgaaaatcatgacaagaagctgaacagatgtgccatcaagggcggcctgctgaccagtgaagaagattctggcttcagcaccagccccaaggacaacagcctgcccaagaagaagaggcagaagacagagaagaagagcagcggcatggacaaggagagcgccctggacaagagtgacctgaagaaggacaagaatgactacctgcccctgtacagcagcagcaccaaggtgaaggatgagtacatggtggccgagtatgctgtggagatgccccacagctctgtgggcggcagccacctggaggatgccagcggggagatccacccccccaagctggtgctgaagaagatcaacagcaagaggagcctgaagcagcccctggagcagaaccagaccatcagccccctgagcacctatgaggagagcaagttccagagcatgctgctgaacctgtggatcaaccggctgtactggacccagaaggccatgctgaccctcatccgcctcatcatctgcagaagagcccagtag

SEQ ID NO: 210586 - DNA, 396 bp, Artificial Sequence
  derived and/or modified sequence
atgaggttcatccagaagtacctgctgcagagacatgagaagatccacactggagagaagcccttccgctgtgatgaatgtggagatgagaccaaccacgccagcgccaccagcacccaggacttcctggaccaggtgaccagccagaagaaggccgaggcccagcctgtgcaccaggcctaccagatgagcagctttgagcagcccttccgggccccctaccacggcagcagagctggcatcgccacccagttcagcacagccaacggccaggtgaacctgcggggccctggcaccagcgctgagttcagcgagttccccctggtgaatgtgaatgacaacagagctggcatgaccagcagcccagatgccaccaccggccagaccttcggctag

SEQ ID NO: 210587 - DNA, 2385 bp, Artificial Sequence
  derived and/or modified sequence
atgaacatcgacgacaagctggagggcctgttcctgaagtgcggcggtattgatgaaatgcaaagctcccgaactatggtcgtgatgggcggcgtgtccggacagtctacagtcagtggggagctgcaagactccgtcctgcaagatcgctctatgcctcatcaggagatactggccgccgacgaagtgctccaggagagtgaaatgaggcagcaagacatgatttcccatgacgagctcatggttcacgaagagaccgtgaagaatgatgaggagcagatggaaacacacgaacggcttccccaagggttgcaatacgctctgaatgtcccgattagcgtgaagcaggagatcacttttacagatgtgtcagaacagctgatgcgcgataagaaacagatccgagagccggtcgaccttcagaaaaaaaaaaagcgcaagcagagatccccggcgaagattctgactattaacgaggatggctcactgggcctcaagacccctaagagtcacgtttgcgaacattgtaatgcggctttcaggaccaactaccacctgcagcggcatgtgtttattcacactggtgaaaagcctttccagtgctcccaatgtgacatgagatttattcagaagtacctgcttcaaaggcacgagaaaattcataccggcgaaaaaccttttcgatgcgatgaatgcggaatgcggtttatacaaaaataccatatggaacgccacaagcgcacccattccggggaaaagccttatcaatgtgagtactgcctccagtacttttcaaggacagatagagtgctgaagcacaagcgcatgtgccacgagaatcacgacaagaaactaaaccgctgcgcaataaagggtggccttttaacatccgaggaagactctggcttctccactagccctaaggacaatagcttacctaagaaaaaaagacaaaaaaccgagaagaagagcagtggcatggacaaggagagtgcgttagacaagagcgatctgaagaaagacaaaaatgactacttacctctctattcttcaagcactaaagtaaaggacgaatatatggtggctgaatatgccgttgagatgccccactcatctgttggtggaagtcacttggaggatgcgtcaggagagatacaccctcctaagctcgttctcaagaagatcaatagcaaaagatctttgaagcaacctctggaacagaaccagacaatctcacccctgtctacttatgaagaaagcaaggtgtcaaagtatgcatttgagttagttgataagcaggcacttctggactctgaaggaaatgctgatatcgatcaggttgacaatttgcaggagggcccttccaagccagtgcactccagcacaaattacgacgacgctatgcagttcctgaagaagaagcgctaccttcaagccgcgagcaacaactcaagagagtatgctctgaacgtcgggaccattgctagtcaaccttctgtcacccaggctgcagtggcctccgtaatagacgagtctaccacagcatcaatacttgagtcccaggcacttaatgtcgagataaaaagcaatcacgacaaaaacgtgatcccagacgaggtcctccaaaccctgctggaccactattcgcacaaagccaacggacagcacgagatcagctttagcgtggcagataccgaagttacctccagcatttcgattaatagtagcgaagtaccagaagtaacgccctctgaaaatgtggggtcctccagccaggccagctccagtgataaggcgaatatgttgcaagaatactcaaaattcctacagcaggctttagatcggacatctcagaatgacgcctatctgaacagtccatcgttaaactttgtgacagacaatcagactctcccgaaccagcctgccttcagttctattgataaacaagtctatgcgaccatgcctatcaacagcttccgctctggcatgaacagcccgcttcgcaccactcccgacaaaagccacttcgggcttatagtgggggacagtcaacactcgttcccgttctccggggatgagacgaatcacgcatccgcaacgtcaactcaggactttctggaccaggtgaccagccagaaaaaggctgaggctcaaccagttcaccaggcctaccaaatgtcttcgtttgagcagccttttcgcgctccatatcacggttcccgcgccggcatcgcgacccagttcagcaccgctaatggacaggttaacctaaggggccccggcacttctgccgagttcagtgagtttcctctggttaatgtgaacgataatagggccgggatgacatcctcacctgacgccacgaccggccagacatttggctag

SEQ ID NO: 210588 - DNA, 252 bp, Artificial Sequence
  derived and/or modified sequence
atgaacatcgacgacaagctggagggcctgttcctgaagtgcggcggcatagacgagatgcagtctagccggacgatggtggtgatgggcggggtgagtgggcagtccaccgtgtcaggagaactgcaagactcagtgcttcaagatagaagtatgccgcaccaggaaattctggcagcagacgaagtcctgcaggagtctgaaatgcgccaacaggacatgatttcccacgacgaactgatggtacactag

SEQ ID NO: 210589 - DNA, 435 bp, Artificial Sequence
  derived and/or modified sequence
atgaagggcgagaagcccttccagtgcagccagtgcgacatgcggttcatccagaaatacctgctgcagagacatgaaaagatccacaccggcgagaagccctttaggtgcgacgagtgtggggatgaaaccaaccatgcatccgctacaagtacccaggattttctcgaccaggtgaccagccagaaaaaggctgaagctcagcccgtgcaccaagcctaccagatgtcaagcttcgagcagccatttagggccccttatcacggatcccgggcgggcatcgctacccagttcagtaccgcaaatggccaggtaaatctgcgaggcccaggcaccagtgcagagttcagcgaatttcctcttgtgaacgtgaatgacaaccgggcaggaatgacgagctcaccggacgcaacaacgggtcaaactttcgggtag

SEQ ID NO: 210590 - DNA, 78 bp, Artificial Sequence
  derived and/or modified sequence
atgaacatcgacgacaagctggagggcctgttcctgaagtgcggcggtatcgatgagatgcagtcttctaggacgtag

SEQ ID NO: 210591 - DNA, 2385 bp, Artificial Sequence
  derived and/or modified sequence
atgaacatcgacgacaagctggagggcctgttcctgaagtgcggcgggatcgatgagatgcagtccagcaggacaatggtagtaatgggcggggtgtccggccagagtaccgtgagcggcgagctccaagactccgtgttacaggataggagcatgccacaccaagagatccttgctgctgacgaggttctgcaggaaagtgagatgcgccagcaggacatgatatcccatgatgaacttatggtgcatgaagaaaccgttaagaacgatgaagaacagatggagacccacgaaaggctgcctcagggattacagtatgccttgaatgtaccgatctcagtgaaacaggaaattacattcacagacgtctccgaacagctcatgcgggataaaaagcaaattcgcgagcccgtcgatctgcagaagaaaaaaaaaagaaagcagaggtcacctgcaaagattctgaccatcaacgaggacggcagcctcgggcttaaaactcccaagtcccatgtatgcgagcactgcaacgccgcctttcgcacaaactaccacctccagaggcacgtctttattcacaccggagagaaaccctttcaatgttcgcagtgcgatatgagattcattcaaaaatatctgctgcagcgacacgagaaaattcataccggggagaaaccgttccggtgcgatgagtgcggaatgagatttatccaaaagtatcacatggagcgacataagaggacccattccggcgagaaaccctatcaatgcgagtactgtctacagtatttctcaaggacagatcgcgtgcttaagcacaaacggatgtgtcacgagaatcacgacaaaaaactaaaccggtgtgccatcaaaggaggactgttaactagtgaagaggactccggcttttcaacatcacccaaagataactccttacccaaaaaaaaaagacagaaaacagagaaaaagtctagtgggatggacaaggagtcagccctggacaagtccgaccttaaaaaagacaagaatgattacttgccactatacagttcctctaccaaggtgaaagacgagtacatggtggccgaatatgctgttgagatgccccactcctccgtcgggggatctcatctagaggacgcttctggggaaatacacccaccaaaactggtattaaaaaagatcaattctaagcgctcactcaagcaaccgctcgagcaaaaccagacgataagtcctctcagtacatatgaagagagcaaagtaagtaagtacgcattcgaattggtggataaacaggctctcttggatagtgagggaaacgctgacattgatcaggtggacaatctccaggaagggccttcaaagcccgttcattcgtccacaaattacgacgacgccatgcaatttctcaaaaagaagagatacctgcaagccgccagcaataactcccgggagtacgcactaaacgtcgggacaatagcatcacagcccagtgttacgcaagctgctgtggcaagcgtgatcgacgagagtacaacagctagtatcctggaaagccaggcactcaacgtggagatcaaatccaatcacgacaagaatgtgatccccgatgaggtgctgcaaacattgctggaccactactcccataaagcaaacggccagcatgagatctctttttcagtggccgatactgaggtaacatcttctatctcgatcaacagcagtgaggtgcctgaagtcacaccgtccgaaaatgtaggatcctcttcacaggcatccagttccgacaaagctaacatgcttcaagaatattcaaaatttctgcagcaggccctcgaccgcactagtcagaacgacgcctatctgaatagccctagcctgaactttgtgaccgacaaccagacactacccaaccagcctgcctttagttccatcgacaaacaggtttatgccacaatgccaattaactctttcagatcaggaatgaacagtcccctccgcacaacaccggacaaaagtcatttcgggctgattgttggggactcacagcactcctttcctttcagcggcgatgagactaaccacgcctctgctacatctacacaggatttcttggatcaagtgacctcccaaaaaaaggcagaggcacaacccgtccatcaggcataccaaatgtctagctttgagcagcctttccgggccccctatcacggctcccgtgccggcatcgccacccagttctcaacagctaatgggcaagtgaatctgagggggcctggcacttccgctgaattcagcgaattcccattggtcaatgttaatgataaccgtgctgggatgacgtcatctcccgatgctacaacaggtcagacatttggctag

SEQ ID NO: 210592 - DNA, 2385 bp, Artificial Sequence
  derived and/or modified sequence
atgaacatcgacgacaagctggagggcctgttcctgaagtgcggcggcatcgacgagatgcagtcttcccggacaatggttgtgatggggggcgtatccgggcagtctacagtgtccggcgagctccaggactcggtgcttcaggaccggtcaatgccacaccaggagattttggccgccgacgaggtgttacaggagagcgagatgagacaacaggatatgatttcccacgacgaactgatggtgcatgaggaaaccgtaaagaatgacgaagaacaaatggagactcacgaacgcctcccccagggactgcagtatgctctgaatgtgcccatctccgttaagcaggagatcaccttcacagacgtgtccgaacagctcatgcgggataaaaagcagatacgggagcccgtggacttgcagaagaaaaaaaaaaggaaacagcggtctccagcaaaaatactgaccattaacgaggacggatcgctagggctgaaaacacccaagagccatgtgtgtgagcactgtaacgcggcttttagaactaactatcacttacaaagacacgtctttatccatactggcgagaagccattccaatgttcacagtgcgatatgcgtttcattcagaagtatctcctacagcggcacgagaagatccataccggtgagaagccctttcggtgcgatgagtgtggtatgcgcttcattcagaagtatcatatggaacggcacaaacgaacccacagcggagagaagccgtaccaatgcgagtattgtttacaatacttcagccgcactgatagagttcttaagcacaagcggatgtgccatgaaaaccacgacaagaaactcaatcgctgcgctatcaaaggggggctcctgaccagcgaagaggattccggtttctctacatcaccaaaagacaatagcctcccaaaaaaaaagcgccagaaaaccgagaaaaaatcaagcggaatggacaaggagagcgccctcgataagagcgatctcaaaaaagataagaacgattatcttcccttgtattcaagctcaacaaaggttaaggatgagtatatggtggccgaatatgcagtcgaaatgccccattcctcggtcggcggcagtcacctcgaggatgcctccggcgagatacaccctcctaaactcgtgctgaaaaaaatcaactctaagcgctccctcaagcagcctctggagcagaatcagacaatcagccctttatctacatacgaagaatctaaggttagtaagtacgcatttgaacttgttgacaaacaggcactactggactctgaagggaacgcagacatcgatcaagtagacaacttacaggagggcccctctaaacccgtccactcttctacaaattatgatgacgctatgcagtttttaaagaagaaacggtacctgcaggcagccagtaataattcgagggagtatgctctgaatgttggcacaattgcgagccagcccagtgtaactcaggcagcagtcgcctcagtcatcgacgaatcgaccaccgcctctattctggagtcacaggcccttaacgtggaaattaaaagtaaccatgataagaatgtcattcccgatgaagtattgcagaccctgctggaccactatagtcacaaagcaaacggtcaacatgagattagcttttccgtggcggacaccgaggtcacatctagcatcagtatcaattcttccgaggtgccggaggtcactcccagtgagaatgtaggctccagctcccaggcttcgtcctccgacaaagctaacatgcttcaggaatacagcaaattcttgcagcaagctttggataggaccagtcaaaatgacgcctacctcaacagtccgagcctgaattttgtcactgacaaccaaaccctgcctaaccagcctgccttttcgtctatagacaaacaggtgtacgctactatgcctataaattccttccgcagcggaatgaattctcctctgcgtaccacgccagataagagtcattttgggctgatcgttggtgactcacagcatagtttcccctttagcggcgacgaaacaaaccacgcatccgccacaagcacacaagatttcctggatcaggttaccagccagaagaaggcagaagctcagccggtgcaccaggcttaccaaatgtcgtccttcgaacaaccatttagggccccctatcacgggagccgggccggcatcgccacgcagttctccaccgccaacggccaggttaatctgcggggtcctggcacgagcgctgaattttcggagtttccattagttaatgtcaacgataatagggccggaatgacctctagcccagacgctactacaggacagaccttcgggtag

SEQ ID NO: 210593 - DNA, 2385 bp, Artificial Sequence
  derived and/or modified sequence
atgaacatcgacgacaagctggagggcctgttcctgaagtgcggcggcatagatgaaatgcagagctcaaggacgatggtggtgatgggtggtgtgagtggccaaagtaccgtgtctggagagttacaggacagcgtcctccaggaccgtagcatgccccatcaagagattctggcagctgacgaagtcttgcaggagtccgagatgcgccagcaggacatgatatcacacgacgagctcatggtacacgaagagacagtgaagaacgatgaagaacaaatggaaacccatgagagactgcctcagggtcttcaatatgctctgaacgtaccgatctctgtgaaacaggaaattacattcacggatgtaagcgagcagcttatgcgcgataagaaacagattcgcgaacctgtcgatcttcagaaaaaaaagaagaggaagcagaggagccctgctaagatactcacaattaatgaagatgggagcctgggactgaaaacccctaagtcacatgtatgcgagcactgcaatgccgccttccggacgaactatcacctgcagcgccacgtatttatacacaccggagagaagccttttcaatgttcccagtgcgatatgaggttcattcaaaagtacctgttgcagcgccatgagaaaattcacactggcgaaaagccctttcgatgcgacgagtgcggaatgcgattcatccagaaatatcacatggagagacacaagagaacccactccggggaaaaaccctatcagtgcgaatactgcttgcagtatttctcaagaacagatcgagtgctgaagcacaaacggatgtgtcatgagaaccatgacaaaaaactaaatagatgcgcaatcaagggggggctgctcacaagcgaagaggacagcggcttcagtacctctccgaaagataactccttgccaaaaaaaaagagacaaaagactgagaaaaagagcagtggaatggacaaagagagtgctctggataaaagtgatttgaagaaggacaaaaatgactatcttcctttatacagttcaagtacgaaagttaaagacgaatacatggtggccgaatacgcagtggagatgccacactcctccgtcggagggtcacaccttgaggatgccagcggcgaaattcacccaccgaagttggtgttgaagaagattaatagtaaacgctcgctgaagcagcccctggaacagaatcaaacaattagccctctatccacctacgaggagagcaaggtttcaaaatacgctttcgagctggtagataagcaggctcttctggattccgagggaaatgccgacattgaccaggtcgacaacctgcaggaggggccgagcaagccagtgcatagctcaacaaattacgacgatgcaatgcagttcctgaagaagaagagatatctccaggcagcctcaaacaactcgcgtgaatacgctctgaacgtgggtactattgctagtcaacctagtgtgacccaagcagccgttgccagcgtaattgacgaatctacaacagccagcatcctcgagagccaggctttaaacgtggaaattaagtcaaatcacgacaagaacgttatcccggacgaagttctacaaaccctgcttgatcactattcccataaggcaaatggtcagcacgagatcagcttttcagtcgcggacacagaggttacaagctctatttccatcaacagtagtgaggtacccgaggtaactccctccgagaacgtcggctcatcatctcaggccagctcaagtgacaaggccaacatgctccaggagtactcaaaattcctccaacaggccctggatagaacaagccagaatgacgcgtacctgaacagcccgagcctaaactttgtgactgataatcagactttgccaaatcagcccgcattttccagcattgacaagcaagtttacgccacaatgcctattaactcttttcgatcaggaatgaatagtccgctgagaactacaccagataaaagtcatttcggactgatcgttggggactctcagcacagctttccattcagcggtgacgagaccaaccacgccagcgccacctcgacccaggacttccttgaccaggtcaccagccagaagaaagccgaagcccaacctgtgcaccaggcatatcaaatgtccagcttcgaacaaccttttagggcaccataccacgggtctagggctggcatcgcaacacaattttcaacagccaacggccaggtaaacctgcggggtcccggcacctctgcggagtttagtgagttccccctggttaacgttaacgataacagggccggaatgacctcctctcccgatgcaaccacagggcagacttttggatag

SEQ ID NO: 210594 - DNA, 228 bp, Artificial Sequence
  derived and/or modified sequence
atgaacatcgacgacaagctggagggcctgttcctgaagtgcggcggaattgatgaaatgcagtcctccagaacgatggtggtgatgggtggggtctccgggcagtccacagtctcaggcgagctgcaggactcagtgcttcaggaccgcagtatgcctcaccaggaaatcctggcagccgatgaggtgctgcaagagtcggaaatgagacagcaggatatgatctag

SEQ ID NO: 210595 - DNA, 1365 bp, Artificial Sequence
  derived and/or modified sequence
atgaacatcgacgacaagctggagggcctgttcctgaagtgcggcgggatagacgagatgcagtctagccggacaatggtggtaatgggaggcgtctccggccagagcactgtgtcaggcgagttacaggactcggtactgcaagacagaagcatgccccatcaggaaatccttgccgcagacgaggtcctgcaagaatcagagatgcggcagcaggacatgatctctcacgacgagctcatggtgcatgaggaaaccgtgaaaaacgatgaggaacagatggaaacccatgaaagacttccccagggtctccagtatgctctcaatgttccgatctctgtcaaacaggagatcacctttacagatgtctccgagcaactgatgagagacaaaaagcagatccgcgaaccagtcgatcttcagaagaaaaaaaagcgtaaacagcgcagccctgctaagatcttgaccatcaacgaggacggctccttaggtctgaaaacacccaagagccatgtgtgcgagcactgcaatgcagccttccggacgaactatcatttgcagcgacacgtgtttattcatacaggtgaaaagccattccagtgttcccaatgcgatatgcgtttcattcagaagtatttgttacagaggcacgaaaaaatccatacaggagagaaaccttttaggtgtgatgagtgtggaatgcgctttatccaaaaatatcacatggaacgccataaacgcacgcatagtggagagaaaccttatcagtgcgaatactgtctccagtacttctcaaggacagaccgcgtcctgaaacacaagcgtatgtgccatgaaaatcacgataagaagctgaaccgctgcgccatcaaaggggggcttctgacgtctgaggaggattctggattttcgacatctccaaaagataatagtttaccaaagaagaaaaggcaaaagacagagaagaagtcttccggaatggataaggaaagtgctctggacaagtcagacctgaaaaaagacaaaaacgactatttacccctgtattcttctagcacgaaggtcaaggatgaatatatggtggccgaatatgctgtcgagatgccgcattcgtccgttggcggcagtcacctggaggatgcctctggcgaaattcatcctcccaaactggtgctaaagaaaattaacagcaaacgctccctgaaacagccactggagcagaaccagaccattagcccgctgtctacatatgaggagtcaaagttccagtcaatgctgcttaacctgtggattaatagactgtattggactcaaaaggctatgcttacacttattagactaatcatttgtcgacgggctcagtag

SEQ ID NO: 210596 - DNA, 396 bp, Artificial Sequence
  derived and/or modified sequence
atgcggttcatccagaagtacctgctgcagcggcacgagaagatccacactggggaaaaaccttttagatgtgatgagtgcggagatgaaaccaatcatgcaagcgctacgagcacacaagacttcctggaccaggtcacgagccagaaaaaagccgaggcacagcccgtgcaccaggcctatcagatgtcctccttcgaacagccctttcgtgccccataccatgggagtagagccgggatcgccacccagtttagcaccgcgaatgggcaggtcaacctgaggggacccggaacgagcgctgaattctctgaattccctctggtaaatgtaaacgataatcgggcaggaatgacctctagtccagacgccaccaccggacagacgtttggttag

SEQ ID NO: 210597 - DNA, 2385 bp, Artificial Sequence
  derived and/or modified sequence
atgaacatcgatgacaagctcgaaggactattcctaaagtgtgggggaatagatgaaatgcagtcctctaggaccatggtcgttatggggggagtctccggccagtctacagtaagcggggagttgcaggactccgttcttcaggatcgaagcatgccacatcaggaaatactcgccgctgacgaggtcttgcaggaatcagagatgcggcagcaagatatgatatcccatgacgaactcatggtgcatgaagagacagtgaaaaacgatgaagagcagatggaaacccacgagagactgccacaaggactgcagtacgcgctgaatgtacctatctcagtcaagcaagagattacttttactgatgtctccgagcaactgatgagagataaaaaacaaatacgcgaacccgtggatcttcaaaaaaaaaaaaagcggaagcagcgtagccccgctaagatcttaacaattaacgaggacgggagtttaggactcaagacaccgaaaagtcacgtctgcgaacattgcaacgccgcttttcgcaccaattaccaccttcaacgccacgtttttattcatacgggagaaaagccttttcaatgtagtcaatgtgacatgaggtttatacagaagtacctgctgcagcgtcatgagaagatccataccggtgagaagccatttaggtgtgatgagtgcggcatgagattcatccagaagtaccatatggagcggcacaaaagaacacactccggtgagaagccataccagtgtgaatactgcctgcaatatttctcgaggacagatcgcgtgctgaaacacaagcggatgtgtcatgagaatcacgataaaaaactgaaccgttgtgcaatcaagggaggcttgctgacgagcgaggaagacagcggtttctccacaagcccgaaagacaactcgttgcctaagaaaaagaggcaaaaaaccgagaagaagagctccggtatggacaaggaaagtgcactcgataaatctgaccttaaaaaagacaaaaacgactacctgccgttatatagctccagtaccaaagtcaaggacgaatatatggtggcagagtacgccgttgagatgccgcactcctctgtgggaggttcacacttggaagacgcttctggtgagatccacccaccgaagttggtgctgaagaagatcaactccaagaggtctctgaagcagcctctggaacagaaccagacaataagtcctcttagcacatacgaggagagcaaagtgtcaaaatacgcattcgaattagtggataaacaggccttattggatagcgagggaaatgccgatatcgaccaagtcgacaacctgcaggagggaccctcaaaacctgtgcactctagcactaactatgacgacgctatgcagttccttaaaaaaaaacgctatctccaggctgctagcaataatagccgggagtacgcgctgaatgtaggcacaatagctagccagccctcggtcacccaagcagcggttgcctccgtgatcgacgagtctaccactgcgagcattcttgaatcacaggccctcaatgtggagatcaagagtaatcacgataagaacgttattccagatgaggtgcttcagaccttgctagatcattactctcacaaggccaacggtcagcatgaaataagcttctctgtggcggataccgaggtcacctcatccatctctatcaattctagcgaggttcccgaggtcaccccatcggaaaatgtcggatctagcagccaggcgagcagttctgacaaagccaacatgcttcaggagtattcaaaatttttgcagcaggccctggatagaaccagtcaaaatgacgcttatctgaattcaccaagcctgaacttcgtcactgacaatcagaccctgccgaaccagccagcattctcctccatcgataaacaggtgtacgccaccatgcccatcaattcattccgttccggcatgaattctccgctgaggactactcccgataaaagccatttcggcctaatcgtgggtgactcccaacacagctttccattctctggggacgagaccaatcacgccagtgccacatctacacaggacttcttagatcaggtaacctcacagaaaaaagcagaggcccaacctgttcaccaagcgtaccagatgtcttcttttgaacagcctttccgcgcaccttatcatggatctcgcgcaggcatcgccacccaattctcaacagctaatgggcaggtcaaccttcggggacctggtactagcgccgagttctctgaatttccgttagtcaatgtgaacgacaacagggcagggatgacttcaagccccgatgctactaccggccagaccttcggctag

SEQ ID NO: 210598 - DNA, 252 bp, Artificial Sequence
  derived and/or modified sequence
atgaatatcgatgacaagttggaagggttgtttctgaagtgtgggggaatagatgaaatgcaatcttccaggacgatggtggtgatgggcggtgtgtcaggacagtccacagtctcgggggagttgcaggattcagtgctacaggaccgaagcatgccccatcaagagattctggccgctgacgaggtcctgcaggagtcagaaatgcgtcagcaggatatgataagccatgacgaattaatggtccattag

SEQ ID NO: 210599 - DNA, 435 bp, Artificial Sequence
  derived and/or modified sequence
atgaagggcgagaaacccttccagtgttcacagtgcgacatgagattcatccagaaatacctgctgcagcgtcacgagaagattcacactggcgagaagccctttagatgcgatgagtgcggcgacgagacaaaccacgcaagcgcaaccagtacgcaagattttcttgaccaggtcacctcacagaagaaagccgaggcgcagccagtccaccaggcataccagatgtctagctttgagcaacctttccgcgcaccataccatgggtcccgagctggtattgctacacagttttcaactgcaaatggacaggttaatttgaggggcccagggacctctgccgagttttcagagtttccactggtgaacgtcaacgacaacagggctggaatgaccagttcccccgatgctacgacgggtcaaacatttggctag

SEQ ID NO: 210600 - DNA, 78 bp, Artificial Sequence
  derived and/or modified sequence
atgaacattgatgacaagctggagggactgtttctgaaatgcgggggtattgacgagatgcaaagtagtcggacttag

SEQ ID NO: 210601 - DNA, 2385 bp, Artificial Sequence
  derived and/or modified sequence
atgaatatcgacgacaaacttgagggcttgtttctcaaatgcggaggaattgacgaaatgcaatccagtagaaccatggtggttatgggaggtgtcagcgggcaaagcactgtgagtggagaacttcaagatagtgtgcttcaagacagatctatgccacatcaagaaatacttgctgccgacgaggtgctgcaggaaagcgaaatgagacaacaggacatgatcagccacgatgagctgatggtgcatgaggagacagttaaaaatgatgaagaacagatggagacacacgagcgcctgcctcagggactccagtatgccctcaacgtcccaataagtgtgaaacaggagattacgttcaccgacgtgagcgagcagttgatgcgggataaaaaacagattcgcgaacctgttgacctgcaaaagaaaaaaaaacgaaaacagcggagcccggctaagatactgactatcaatgaagacgggagcctcggcctcaagacacctaagagtcacgtgtgtgagcactgtaatgccgcttttcgcactaactatcatttgcagaggcatgttttcatccatactggcgagaagcctttccagtgctctcagtgcgatatgcggtttatacaaaagtatttgctgcagagacacgagaagattcataccggtgaaaagccttttcgctgtgatgaatgtgggatgcgatttattcaaaagtaccacatggagagacacaaacgcacacactccggcgaaaaaccataccagtgtgagtactgcctgcagtacttttctagaacagaccgcgtcctgaagcacaagcgcatgtgccacgaaaatcacgataaaaaactgaacagatgtgccatcaagggcggtctgcttaccagcgaagaggacagcggattctccacgagccctaaagataactcccttcccaagaaaaaaagacagaagacggagaagaagtcaagcgggatggataaggagagcgccctggataaaagcgacttgaaaaaggataagaacgattacttacctttatattcttccagcactaaggtcaaggacgaatacatggtcgccgagtacgccgtagagatgccccactccagtgttggaggcagccatctggaagatgccagcggcgagatccaccctcctaagctggtgctcaagaaaattaacagcaaacggagtctgaaacagcctttggagcagaatcagacaatctctccactgagtacttacgaggaatctaaggtgtcaaaatatgctttcgagctagtggataaacaggctctattggatagtgaaggcaatgccgacatcgatcaggtcgacaatctgcaggagggcccatctaagcccgtgcactcctcaacgaactatgatgacgctatgcagttcctgaaaaaaaagcgctacctgcaggcagccagcaataactcacgggaatacgccttaaacgtgggtaccatagcctcacaaccttccgtgactcaagctgccgtcgcatcagtaatcgacgagagtaccacagcgagcatcttggaaagccaagctctgaacgtggaaatcaaatccaaccatgataagaatgtgatccctgatgaggtacttcagaccctgctagatcactactcgcataaggctaacgggcagcacgaaattagcttttccgtcgctgacaccgaagttacatcatctatcagcattaattcttccgaagtgcctgaggtgacaccatctgaaaatgtcggctccagtagccaggcttcttcctcggacaaggcaaacatgctccaggagtatagcaagtttcttcagcaagctttagacagaaccagtcagaatgacgcttacctgaactcgccgtccctcaacttcgtgaccgacaaccagaccctcccaaatcagccagccttttccagtattgacaagcaggtctatgctaccatgccgatcaacagcttccggtctggcatgaattctcctctgcgcacgacacccgacaagagccacttcgggctgattgtgggcgacagccagcattccttcccctttagtggagacgagactaatcacgcctctgccacctctacccaggactttttagaccaggtgacttctcagaaaaaagcagaggcccagcccgttcaccaggcataccaaatgtccagtttcgagcagccctttagggcaccgtaccatggatctagggccggaattgctacccaattctcaaccgctaatggacaggtgaacctgcggggtccaggcactagtgccgagttctctgaatttccactggtcaacgtcaacgacaatcgtgcagggatgacctcaagccctgatgccaccaccggccagacgttcgggtag

SEQ ID NO: 210602 - DNA, 2385 bp, Artificial Sequence
  derived and/or modified sequence
atgaacatagacgacaagctcgagggtttgttcctgaaatgtggtgggatcgacgagatgcaatcaagtcgcacgatggtagtcatgggaggtgtctcaggccagagcaccgtgtccggcgaactgcaggattcagtgctgcaggaccggtccatgccccaccaagagatattggccgctgacgaagtgctgcaggagtctgagatgaggcagcaggacatgattagtcatgacgaactgatggttcacgaggaaacggtgaagaacgacgaagaacagatggagacacacgaaagactcccccagggacttcaatatgccctgaatgtgcctatcagcgtgaagcaggagataacctttactgacgtgtcggagcagctcatgagggacaagaagcagatacgtgagccagttgacttgcaaaagaaaaaaaaaaggaagcaacggtctccagcgaagattctcactattaatgaagatggaagtctcggcttgaagacacccaagagtcacgtgtgcgaacactgcaacgctgcattcagaaccaactaccacctgcaacggcatgtgtttattcacactggagagaagccgtttcagtgtagccaatgtgatatgagatttattcagaagtacttactccagagacacgagaaaatccatactggcgagaagcccttcaggtgcgatgagtgtggaatgcgatttatacagaaataccatatggaaagacataagcggacacactctggggagaagccgtatcagtgcgagtattgcttgcagtactttagtaggaccgaccgggtcttgaagcataaaaggatgtgtcacgagaatcatgataaaaagctgaaccgctgtgccatcaagggcggtctgctgacatccgaggaggactctgggttttcgacgtcacctaaagacaactctcttcccaagaaaaagaggcaaaaaactgagaagaagagcagcggaatggacaaggagtccgcattggataagagtgacctgaagaaggacaagaacgactatctgcccctatactcatcatctacgaaagtgaaagacgaatatatggtggccgaatatgctgtggagatgccccatagttctgtgggtggtagccaccttgaggacgcctccggcgagattcatcccccaaaactggtccttaaaaagataaatagcaaaaggtctttgaaacagccccttgaacagaatcaaactatctctcccctgtctacatatgaagaaagcaaagtgtctaagtatgcctttgagctggttgacaaacaagcactacttgatagcgagggcaacgcggacatagatcaggtggataacctgcaggagggcccaagcaagcctgtccactcatctactaattatgacgatgccatgcagtttctgaaaaagaaacgatatttacaagcggcatctaacaattccagggaatatgccctgaacgttggcaccatagcctctcaaccaagcgtgactcaggccgctgtggcctctgtcatagatgaatctaccactgcgtctattctggaatctcaagcactgaatgtcgaaatcaaatccaatcatgacaagaatgtgataccagatgaagtattgcaaaccctgctcgatcattactcacacaaggcaaacgggcagcatgaaatctctttctctgtcgcggatacggaagtgacatccagcatctccataaattccagcgaagttcccgaagttactccctcagaaaatgtgggatcttcttcccaagccagctcatccgacaaagcgaacatgctgcaggaatattccaaatttctgcagcaagcactcgataggaccagtcagaatgacgcctatctgaactctcccagcctgaactttgtgacagacaaccagactctccccaatcagcctgcctttagcagtattgataaacaagtgtatgcaactatgccaattaacagcttcagaagcggtatgaattccccactacgcacgacacccgataagagtcacttcggactgattgtgggtgattctcaacactctttccccttctcaggggatgagaccaatcacgccagcgccacctccacccaagattttcttgaccaggttaccagccaaaaaaaagcggaggcccaacccgtccatcaggcctatcaaatgtctagcttcgagcagccatttagagccccatatcatggttccagggccggtatagccacccagtttagtaccgccaatggtcaagttaacctccgcggaccaggcacttccgccgaattcagcgaattccccctggtcaacgtaaacgataacagggcgggaatgacatcaagccccgacgcaactacaggccagacgtttggttag

SEQ ID NO: 210603 - DNA, 2385 bp, Artificial Sequence
  derived and/or modified sequence
atgaatatcgacgataagttggaagggctgtttctgaagtgcgggggtatagatgaaatgcaaagcagtcggacgatggtggtcatggggggtgtctctgggcagtctaccgtaagtggcgagctgcaagactctgtcctccaagacagatcaatgcctcaccaagaaatcctggctgctgacgaagtccttcaggaatccgagatgcgacaacaggacatgatcagccatgacgagctcatggtgcacgaggagacggtgaagaatgacgaggagcagatggagacccacgagagactcccccaaggactgcagtacgccttaaacgttcctatctcagtcaagcaggagatcacctttactgatgtatctgagcaactaatgagagataagaagcaaatcagagaaccagtggacttgcagaagaaaaaaaaacggaagcaaaggtcccctgccaagatccttacgattaacgaagacggaagcctaggcctcaagacccccaagagccacgtgtgtgagcactgcaacgccgctttccgcactaactaccacctacagcggcatgtgtttatacacacaggcgaaaagcctttccagtgttcacagtgtgatatgaggttcattcaaaagtatctgctgcagcggcatgagaagatacacaccggtgaaaagcctttcagatgtgatgaatgtgggatgcgatttatccagaaataccatatggagaggcataagaggacccactctggagagaagccttatcagtgtgaatactgtctccagtacttctcgagaacagatcgcgtgctcaagcataagagaatgtgtcacgagaatcacgataagaaattgaacagatgtgctattaaagggggtctgctgacttcagaggaagactccgggtttagtacaagtccgaaggataattcactcccaaagaaaaaacgccaaaagaccgaaaaaaagtccagtgggatggataaagaaagcgcacttgacaaatctgatctgaagaaggataaaaacgattacctaccactctatagctcctccactaaggtgaaagatgaatatatggtagctgaatacgccgtcgagatgccacacagctccgtcgggggatctcatttggaggatgccagcggagagattcaccctcctaagttggttctgaagaagattaacagcaaacggagtctcaaacaacccttagaacagaatcagacgatctctcccttgagtacctacgaggaatccaaagtttcaaagtacgccttcgagctcgtagacaagcaggccctgctggattccgaaggaaacgcagacattgatcaggtggacaatcttcaggagggcccttccaaacctgtgcattcctcaacaaattacgacgatgcgatgcagtttttaaagaagaagagatacctgcaggccgcttcgaataactctagagagtatgcccttaacgtgggaacaatcgcatctcagcctagtgtaacccaagctgcagtggcctcagtcatcgacgagtcaaccaccgcttctatcctcgagtcccaagccctgaacgtggagattaaatccaatcacgacaagaatgtgatcccagatgaagttctgcaaacactacttgaccattactctcacaaggctaacgggcaacacgaaatcagcttttctgtggctgacaccgaggtgacgtcctctatcagtataaactcgtccgaagtgcccgaggtaacacccagcgagaatgtaggatctagcagtcaggccagtagttcagataaggcaaacatgctgcaggagtattcaaaattcttgcagcaggcgttggatagaacatctcagaacgacgcctatctcaacagtccatcccttaactttgtgaccgataatcagaccttgccaaatcagcccgctttctctagcatcgataagcaggtgtacgccaccatgccaatcaactcctttcggtccggtatgaactcacctctcaggacaactcctgataaaagtcattttggcctcattgtcggtgactcgcagcactcatttccgtttagtggggacgagacaaaccacgcctctgccaccagtacccaggatttccttgaccaggtgacaagccagaagaaagcagaggctcaacccgttcatcaggcataccagatgagctccttcgagcagccgtttcgggctccctaccacgggagtcgggctggcattgctacccagtttagtacagcaaacggtcaggtcaacctgcgaggacctgggacatcagccgaattcagcgaatttccactggtaaacgtgaacgacaaccgcgctggaatgacttctagccctgatgctaccacaggccagacctttggctag

SEQ ID NO: 210604 - DNA, 228 bp, Artificial Sequence
  derived and/or modified sequence
atgaatatcgatgataaactggagggattgtttctcaaatgtggagggattgatgagatgcagagcagtagaactatggtggtaatgggaggcgtttctggccagtctaccgtgtcaggagagctgcaggatagcgtgctgcaagatcgcagcatgccacatcaggaaattcttgccgcagacgaggtactgcaagagtcagaaatgcggcagcaggatatgatctag

SEQ ID NO: 210605 - DNA, 1365 bp, Artificial Sequence
  derived and/or modified sequence
atgaacattgacgacaagttggagggcctgtttctgaagtgtgggggtatagacgagatgcagtccagcaggactatggtggtcatggggggtgtgagcggtcaaagtaccgtgtctggagagttgcaggattcagttctccaggaccggagtatgcctcatcaagaaatcctcgctgcagacgaggtcctacaagagtccgagatgaggcagcaggacatgatttctcacgacgaactgatggtgcacgaagagaccgtgaaaaacgacgaagagcagatggaaacccatgaacggctgcctcaaggattgcaatacgctctgaatgtgcctatatccgtgaagcaggaaatcacgttcacagacgtgtccgagcagttaatgcgggacaaaaagcagataagggaaccggtggatcttcagaaaaagaaaaagcgaaagcagaggtccccagcaaaaattctaactattaacgaagacggtagccttggcctgaagacacctaagtcccacgtgtgtgagcattgcaacgctgcatttaggaccaactaccacctgcaacggcatgtgttcattcacaccggtgagaagccattccagtgctcacagtgtgacatgcgctttattcagaaatacctcctacagagacatgagaaaatccacactggagagaagcctttccgatgcgacgagtgtggcatgcggtttatccaaaagtatcacatggaacggcataagaggactcactcaggcgagaagccttaccaatgcgaatattgcctgcagtacttctctagaaccgatcgcgtgctaaagcacaagcgcatgtgtcacgagaaccatgacaaaaagctgaacagatgtgcaatcaaaggtgggttgctcacgtccgaggaggattctggcttctctacttcacctaaggacaattctctgcccaagaaaaaacggcagaagactgagaaaaaaagtagtgggatggacaaggaaagtgcgcttgacaaatccgacctgaagaaggataagaacgattatctgcccctttacagcagctcgactaaggtcaaagatgaatatatggtggccgagtacgcagtggaaatgccacactccagtgtgggtggatcacatttggaagatgctagcggtgagattcacccgcctaagctggtgctcaagaagatcaacagcaagcggtcattaaagcagccactggagcagaaccaaacaatctctccattgagcacatacgaggaaagcaagttccagtctatgctgctcaacctgtggatcaacaggttatactggacccagaaggccatgctcactttgatccgactcatcatctgcaggcgtgcccagtag

SEQ ID NO: 210606 - DNA, 396 bp, Artificial Sequence
  derived and/or modified sequence
atgcgcttcatccagaagtacctgttgcaaagacacgagaaaatccacaccggagagaagccatttcgttgcgacgagtgtggagacgaaactaaccatgcctccgccactagcacacaggattttctagaccaggtgacaagtcaaaaaaaagccgaggcgcagccagtgcatcaagcctatcagatgtcttcgttcgagcagccgttcagagcaccatatcatggatctcgggcagggatcgctacccagttttcgacagctaacggacaggtcaatctgcgcggacccggaaccagcgcagagttttccgaattcccactggttaacgtcaacgacaaccgtgctggaatgacaagttcacctgatgcaaccaccggccagacatttggatag

SEQ ID NO: 210607 - DNA, 9651 bp, Artificial Sequence
  derived and/or modified sequence
ggcgaccgcggcggcgctctagctgcggcatgtctgcgtctctactgctctgggaggaggaagagaaggaggaagaggaggaggaggaggagggggaggaagaggagaaaggcgcaggggtgggagctgttgccgaagctgccacagcaaaagttctcccccctccccccttcccctcctctcaaggcccctagaaaggttggagctgccgccgcctgcagtcggtgaccgcgcgactcggcgcccgcccgcggatagagggaggaatcagcagcttggaaattcaagcacgtgatctggcgggatgggcgtttgcctaacgtatttaatggaggaatcggatggcataagtgattaaggtggtattgaggatttctgaagcctatgaaaggtagaaactcaaccatgatttctttttcaactctacagcattcctttccttgaagtcttcgtttttaccttagtctcgggcagttatacttaagcatgaacattgacgacaaactggaaggattgtttcttaaatgtggcggcatagacgaaatgcagtcttccaggacaatggttgtaatgggtggagtgtctggccagtctactgtgtctggagagctacaggattcagtacttcaagatcgaagtatgcctcaccaggagatccttgctgcagatgaagtgttacaagaaagtgaaatgagacaacaggatatgatatcacatgatgaactcatggtccatgaggagacagtgaaaaatgatgaagagcagatggaaacacatgaaagacttcctcaaggactacagtatgcacttaatgtccctataagcgtaaagcaggaaattacttttactgatgtatctgagcaactgatgagagacaaaaaacaaatcagagagccagtagacttacagaaaaagaagaagcggaaacaacgttctcccgcaaaaatccttacaataaatgaggatggatcacttggtttgaaaacccctaaatctcacgtttgtgagcactgcaatgctgcctttagaacgaactatcacttacagagacatgtcttcattcatacaggtgaaaaaccatttcaatgtagtcaatgtgacatgcgtttcatacagaagtacctgcttcagagacatgagaagattcatactggtgaaaaaccatttcgctgtgatgaatgtggtatgagattcatacaaaaatatcatatggaaaggcataagagaactcatagtggagaaaaaccttaccagtgtgaatactgtttacagtatttttccagaacagatcgtgtattgaaacataaacgtatgtgccatgaaaatcatgacaaaaaactaaatagatgtgccatcaaaggtggccttctgacatctgaggaagattctggcttttctacatcaccaaaagacaactcactgccaaaaaagaaaaggcagaaaacggagaaaaaatcatctggaatggacaaagagagtgctttggacaaatctgacctgaaaaaagacaaaaatgattacttgcctctttattcttcaagtactaaagtaaaagatgagtatatggttgcagaatatgctgttgaaatgccacattcgtcagttgggggctcgcatttagaagatgcgtcaggagaaatacacccacctaagttagttctcaaaaaaattaatagtaagagaagtctgaaacagccactggagcaaaatcaaacaatttcacctttatccacatatgaagagagcaaagtttcaaagtatgcttttgaacttgtggataaacaggctttactggactcagaaggcaatgctgacattgatcaggttgataatttgcaggaggggcccagtaaacctgtgcatagtagtactaattatgatgatgccatgcagtttttgaagaagaagcggtatcttcaagcagcaagtaacaacagcagggaatatgcgctgaatgtgggtaccatagcttctcagccttctgtaacacaagcagctgtggcaagtgtcattgatgaaagtaccacggcatccatattagagtcacaggcactgaatgtggagattaagagtaatcatgacaaaaatgttattccagatgaggtactgcagactctgttggatcattattcccacaaagctaatggacagcatgagatatccttcagtgttgcagatactgaagtgacttctagcatatcaataaattcttcagaagtaccagaggtcaccccgtcagagaatgttggatcaagctcccaagcatcctcatcagataaagccaacatgttgcaggaatactccaagtttctgcagcaggctttggacagaactagccaaaatgatgcctatttgaatagcccgagccttaactttgtgactgataaccagaccctcccaaatcagccagcattctcttccatagacaagcaggtctatgccaccatgcccatcaatagctttcgatcaggaatgaattctccactaagaacaactccagataagtcccactttggactaatagttggtgattcacagcactcatttcccttttcaggtgatgagacaaaccatgcttctgccacatcaacacaggactttctggatcaagtgacttctcagaagaaagctgaggcccagcctgtccaccaagcttaccaaatgagctcctttgaacagcccttccgtgctccctatcatggatcaagagctggaatagctactcaatttagcactgccaatggacaggtgaaccttcggggaccagggacaagtgctgaattttcagaatttcccttggtgaatgtaaatgataatagagctgggatgacatcttcacctgatgccacaactggccagacttttggctaaaaaaaaaaaaaaagtgtaaataatactggcactttagaacagattaatcaagagtggggttactctgtgtaaatggagtgctgtacagatttaagagcaatgcgtaataacaagttaagctgatatgaatagcaagataatccaataactgcatttcgtttggttagtcagcattctttgaactgccttacatgttgtcacctttatagaagcaatgcattacttgttttagatcagaaacttgctattccacccacaccaagttaaaaaggaaaaaaaaaagactttcgcacaattgtttcctaactgataacattgtacattcttaggagattagtaattgtgtgaaatttactcatactgtttctaagtttttcagcatagtcattgcacttcagcagggaatctgagtatactttacagacagagtgaacttaaaagtttaatgtcaagagattatggcttaaataaattagtgtgtcctatagggggaaaaaaaccaagaaaccaccttttaaaaagaatgatatgccatatacccttgattttcattttgcattatattgacgtgtttttttgaaggaaaaaaagtaataaaaatctgatagtctaagactccactatttaaaagcctaattactttaaaaatatgcatactttcagaacttttaccaaaacacacaactgttgaagcagtcacttctctatggaagtatgcatattggtgtcagtttctttgtacagttgtacttagatattttttatgatttttcatgtgcaggtatcaaggttttgaagttttagtaaaagaaattctgtagattacattcccaagaacataatgcttacacaaaatgtatattccacgttttaaagcttaattgtattttactttacatatacacttcagttaacatagagcacttagaatctatttggtatttttgatttctcaaagtaaaaaaaaaattagatttttaggtttgatatggttgtgtcataatcatctcgtaattgacaattttaacttttggcaataaaaggaaattgggatatctttggaactgtaaaacctggtttaatctttttctttctagactcttgatagattggataattaaacagtatccagagaaactaaagaaatgggcattttaattgcatattttatcttgagttactttttaatgaacactgctcattacaactttacaaaccaaaagtgtttactaattccagtaactaccatttctttttcagctagatgagtgatcggaaaatttttgttgcatttcaaaatctaaataaactacagactttatccttataccatgaatgtttttttttaatactctgtcttaaaataatacagcatggtacaataaatagtgcttttatgtatatatacacacacacacttttctgaagaatgatggtttgagttatgcgttgggcagttttgatttttggaagttatattagttattgactctttgttacaactttttcatttttacattttaaattttctgccatcgttgtcacaatgcacatcctgatatagcaccagtgaaaatctaaaattaatacccttggaaaatgaaaatattcttaatttccattttgactcttatactggccctatagctctgcagtctttgtttcaatatagaatatgttatccatttaaattattttttcttttatttaatgttatcccaagactgttctcataaagaaagggaagaaataactatccacccttaacatccttcatttattttgaatatattggtgtttttatgataaggaatataaattatatttaatgtggtttcctgtatactttggttattaagttttgcttgaaatagtagttttcccgtttgacagctttctttgctgccaaagttttcaagaatttaagacttctttgaagtaaatatttaagttctgccattattgactcttaagattgtgtgtgttgtgttgtgcattacataattacaaaaaggcttcattcaggtgatacgttaaaaatggaactgtgctcaccctaaataggcattggtatttttctcttttggtgagagtaggcatttatttcttgagttgttttggagcctgatcaaaaattttgttcatggagaacttgatgcaattttgatacagtggagaggtttttttcggttgttttaacatcaccagcatagtttttagaatgtgactcttgctgagcatttagggtgagcttgggaaggaaggcctttgaaaatggtagttatgcaagcagactttcaggtgttgcattcctgttttcaacacatttctttaaatctacataatggcagacttttctaccaggttataagcagtttttagataagtgatactcagccagcataacttattgacttaccatttacgtatagtcatcactctcttactgtgaaattccaaatgcctaccagagttaccttgttctatcataatatgacaaacatctcaacagttttggatttccccactttggttcagaaggttatttaatttctatctgggcattaatggagaaaataagtagccttgtgtgctgcttcagattgaaacatggaggatatgagatattcttctgcaattcatgtttctcatttctcaaagtgagcacattgttctataaaaacatgctggtacacccttaaacttttgatcaatctgagtgaggtgtgcttttcctcttgggacctactcacgtttgaagattggaaacatcacgttaggcgaggcagtatctcttgaacatcttctaaagggttttttaaaaccttattctcacatatttcatttgtcttgaatatttaagtggctcttaaacgttttgggtctacatgcaaatgtggtacttaacaaggtaggaatccatcttcttagctctggctgagggtgccagccatcggtcaggtcatttttatctcaagaggcagaaggcagttatgtcaagaattgtgctcagggcaggatttcgtttccacagaggagagacacttgcagagtgccagctaggttagatcttttgccgcttctttcatttgattaatttgggtttttaaagggctgtttaaaaaaaaaaaaaaaaggccgggaaactttaaaagtaggcattactgtagtactgcatttcttagaacattttaaactagaactcatttttttttcacagtatatttacttgaagaagcactataataatcattgagaagtattttgagtctgaaatttaatttaattttccgtttcaaattgctttatttcagggaaataattttccagttgttttgctatattctgcaaataaaaaccgtgtttccttttttcacttaaactttggtaggaaacaaactaaagcagacaaacatttcttgttatgtttgttgctttctttaatccaatggataaaaaagtaaaaccctgtaaacattattttatttttttatgcaataccatgctgtaaatatggttcatcaaataaggatgtacctatgattgaatctttaattctgcacagttagagtttatatataaacgtgtcttgacaatcaaggacttttatgtgagtcttcctttatgatgtttattaatgttatgcattccatttgttttgaagtgagtaccaatgtgctaatttgtattgtctgaaagtatgtaatgtttttacagcttgtttttaagaatctgtaaatatgtacaaacaaatcacagtactgctttatgttagaaggcatatgatgttgtactgtatgtaagcaataatacatagcagtgctaactttacaagtagcatcaggaaagttctaaaaacatttcagagttattaattatccttatttcatttaataatgattatctttaatcagtttttataagcaaattccattgttcctcctattggaacgtaacactgtttacacagcataattgaagttgcaggggagacaggctaaatctgacttcatctgtactcactttcactaagcattgaatggccttaccactcttctgcaagatggaggaagaccgcaaaacttagtgcccatcacactgaaggaagggatgtggttttttttcctgcttctgtactgctacctaactttgtgatttgctttggattttaatatttgtttctgttttagattcaagcccgtaagttttgaggtgacttcagctccattgtgaaatagatagttctcttcatatttcataactacatttcaataattctaaactttctacattgatttttagatacttatttttcaagcttggtttctcagctgatcagatgaatttattcaacttcaatacaaagaaagacaaacctattatagtttcaagtgagtagatattatactgtacaggacagctatttgaacacacacatcactgctttagaaataaaaccgccaatttataaatgtatatgacctacattttataggaaaaaatgtttttaaatgctagtcatttatataatgtgctttgaaggatttgctagtccacttctgtcactttttagtacactggtatcttttatatgtaatgtatgctttttattattgtagcaaagcatttcagtagaaagaattttgcaacaatatgggggaaatttttcattgttggatttgaattatactggattttatctgtgtagtcttacttgtctttattttaatgctgtctgaagggaacttggtatccaaataaagcaggtaacctcattttacttcaagggcatactgtgtagtgctgaatttaatctgaaaatctgatgattttgaaaagaaaaacaagtttataaacattgtacagaagaaattaaatgtgtgtgatggaaatcctgatggtggagcacgttgaattttctgatatatagtgttattttcctgggatcccctatgccttctttgtatttcaactaataaaggaaaaaccctgtcattaaaactggtaagataataggatattctgattatacagtattactattcctatcccattttctgaccttttctcaatcactgtaaatttttattttctatttcctattgataattaaatatgtacataatatagacactgttgtatagaactaaatgaattgggttgctatgcttgagtgggtagtgaaatggaaatatttgatgaatactgagagttcctaaaatgctagagcaaatttccgagggaaaggggggcatcgtgtgtcttgggaaggttgcagcaggttgtttcttcaactccctaagaaatcattgggaaggactcaactgcaaactcgggatcagatacaaaatgggtctttccttcccctctcccccaaaaaataggagcactaaattttaaaatctactcaggtgacagttgctttgcaatgaaacttatcacattgaaattttcagtgttaaataaaaagagatttgtgatatttttaaatataaacttttacatcagtagtcagcagcctgacaattgaaatttggtaagtcgatatattttaaaatattttgctctccaaatagaattgtttttaaacaattgggaggttttttgtttctttaaatatgttttaattgtcattgtaaaaacaaaatcttgcttgaccctatattatgccatgaatgaattgctgagcctttataatacagtgacagcttgtttcatgcatagtcatggaacatagagatgttctttaaactgacctattgataagaggtttaatgagtttcacggctttcaacactattgtcatatagttatctttgccatttggagtttataaaaccattttatgtattgtgatactaaaggaagttgttttgctttactttaaattgaattattagactaatatttgcaaattctgcattttaaatgtggacactggctgtttgaaaaataaaatatagaatacagttttatggataattttcgagctgaatttttcacaatattctgaaccaaataacgaatggtaaatatgcaaaaatcatggtgcatagatataaccgtaaagagaaaagaatttctgtgtggaattaacagttacacaaattgggtaacaattatcagggcctttattatagctttatgtggaatgttattctaaaatgcaagagtcaaatgttactgtcattgaatattttagacttgaaacgtgtttatcatagagcgaagaaaatatgtgttcttttctttacagataagactctgttaacccactgtcagcatacgtgggatttcttttcttttttctttcattagtggagatttgttttcatccatctaccaccttgccagtaccctagcttgtgaccagcgggatgcattgtaagaaagttgtctgtggttaggagtgcagtctgggtccatggaacaaatttaaactaattggccctcgcaatgatcagtcctaggaccctggccttattattagcatggtgctttaaccaattgtacataataataccactgatagtctactaatgcatttcctagatcccagtttttcttgaatgattaggaatggtggggagaggggaggggagatattctacatgatacttctccaatcttctaaagattataagaaaaaataaaaaattgaagtcacttgaattaatgtgttgtcattgagtcttactcgacaatttatcatgcacaaagtgattatgaagattttcctgattatatgtttggattgaatttaaaaattttttttttcag

SEQ ID NO: 210608 - DNA, 566 bp, Artificial Sequence
  derived and/or modified sequence
ctgtgttctgcagcgttttgttggatactattgataactggttctttaaggaaaggggcttaaacaggccttggtttgtagaggatagagggaggaatcagcagcttggaaattcaagcacgtgatctggcgggatgggcgtttgcctaacgtatttaatggaggaatcggatggcataagtgattaaggtggtattgaggatttctgaagcctatgaaaggtagaaactcaaccatgatttctttttcaactctacagcattcctttccttgaagtcttcgtttttaccttagtctcgggcagttatacttaagcatgaacattgacgacaaactggaaggattgtttcttaaatgtggcggcatagacgaaatgcagtcttccaggacaatggttgtaatgggtggagtgtctggccagtctactgtgtctggagagctacaggattcagtacttcaagatcgaagtatgcctcaccaggagatccttgctgcagatgaagtgttacaagaaagtgaaatgagacaacaggatatgatatcacatgatgaactcatggtccatg

SEQ ID NO: 210609 - DNA, 1025 bp, Artificial Sequence
  derived and/or modified sequence
ggaggaggaggaggagggggaggaagaggagaaaggcgcaggggtgggagctgttgccgaagctgccacagcaaaagttctcccccctccccccttcccctcctctcaaggcccctagaaaggttggagctgccgccgcctgcagtcggtgaccgcgcgactcggcgcccgcccgcggatagagggaggaatcagcagcttggaaattcaagcacgtgatctggcgggatgggcgtttgcctaacgtatttaatggaggaatcggatggcataagtgattaaggtggtattgaggatttctgaagcctatgaaaggtgaaaaaccatttcaatgtagtcaatgtgacatgcgtttcatacagaagtacctgcttcagagacatgagaagattcatactggtgaaaaaccatttcgctgtgatgaatgtggtgatgagacaaaccatgcttctgccacatcaacacaggactttctggatcaagtgacttctcagaagaaagctgaggcccagcctgtccaccaagcttaccaaatgagctcctttgaacagcccttccgtgctccctatcatggatcaagagctggaatagctactcaatttagcactgccaatggacaggtgaaccttcggggaccagggacaagtgctgaattttcagaatttcccttggtgaatgtaaatgataatagagctgggatgacatcttcacctgatgccacaactggccagacttttggctaaaaaaaaaaaaaaagtgtaaataatactggcactttagaacagattaatcaagagtggggttactctgtgtaaatggagtgctgtacagatttaagagcaatgcgtaataacaagttaagctgatatgaatagcaagataatccaataactgcatttcgtttggttagtcagcattctttgaactgccttacatgttgtcacctttatagaagcaatgcattacttgttttagatcagaaacttgctattccacccacaccaagttaaaaaggaaaaaaaaaa

SEQ ID NO: 210610 - DNA, 566 bp, Artificial Sequence
  derived and/or modified sequence
aggagggggaggaagaggagaaaggcgcaggggtgggagctgttgccgaagctgccacagcaaaagttctcccccctccccccttcccctcctctcaaggcccctagaaaggttggagctgccgccgcctgcagtcggtgaccgcgcgactcggcgcccgcccgcggcacacctctacattgtgttcagtgcctagtgtaattctgggcatgtattctagacagagtagatcggattggttctggcattgaataaggatagagggaggaatcagcagcttggaaattcaagcacgtgatctggcgggatgggcgtttgcctaacgtatttaatggaggaatcggatggcataagtgattaaggtggtattgaggatttctgaagcctatgaaaggtagaaactcaaccatgatttctttttcaactctacagcattcctttccttgaagtcttcgtttttaccttagtctcgggcagttatacttaagcatgaacattgacgacaaactggaaggattgtttcttaaatgtggcggcatagacgaaatgcagtcttccaggacaat

SEQ ID NO: 210611 - DNA, 2952 bp, Artificial Sequence
  derived and/or modified sequence
agaaaggcgcaggggtgggagctgttgccgaagctgccacagcaaaagttctcccccctccccccttcccctcctctcaaggcccctagaaaggttggagctgccgccgcctgcagtcggtgaccgcgcgactcggcgcccgcccgcggatagagggaggaatcagcagcttggaaattcaagcacgtgatctggcgggatgggcgtttgcctaacgtatttaatggaggaatcggatggcataagtgattaaggtggtattgaggatttctgaagcctatgaaaggcagttatacttaagcatgaacattgacgacaaactggaaggattgtttcttaaatgtggcggcatagacgaaatgcagtcttccaggacaatggttgtaatgggtggagtgtctggccagtctactgtgtctggagagctacaggattcagtacttcaagatcgaagtatgcctcaccaggagatccttgctgcagatgaagtgttacaagaaagtgaaatgagacaacaggatatgatatcacatgatgaactcatggtccatgaggagacagtgaaaaatgatgaagagcagatggaaacacatgaaagacttcctcaaggactacagtatgcacttaatgtccctataagcgtaaagcaggaaattacttttactgatgtatctgagcaactgatgagagacaaaaaacaaatcagagagccagtagacttacagaaaaagaagaagcggaaacaacgttctcccgcaaaaatccttacaataaatgaggatggatcacttggtttgaaaacccctaaatctcacgtttgtgagcactgcaatgctgcctttagaacgaactatcacttacagagacatgtcttcattcatacaggtgaaaaaccatttcaatgtagtcaatgtgacatgcgtttcatacagaagtacctgcttcagagacatgagaagattcatactggtgaaaaaccatttcgctgtgatgaatgtggtatgagattcatacaaaaatatcatatggaaaggcataagagaactcatagtggagaaaaaccttaccagtgtgaatactgtttacagtatttttccagaacagatcgtgtattgaaacataaacgtatgtgccatgaaaatcatgacaaaaaactaaatagatgtgccatcaaaggtggccttctgacatctgaggaagattctggcttttctacatcaccaaaagacaactcactgccaaaaaagaaaaggcagaaaacggagaaaaaatcatctggaatggacaaagagagtgctttggacaaatctgacctgaaaaaagacaaaaatgattacttgcctctttattcttcaagtactaaagtaaaagatgagtatatggttgcagaatatgctgttgaaatgccacattcgtcagttgggggctcgcatttagaagatgcgtcaggagaaatacacccacctaagttagttctcaaaaaaattaatagtaagagaagtctgaaacagccactggagcaaaatcaaacaatttcacctttatccacatatgaagagagcaaagtttcaaagtatgcttttgaacttgtggataaacaggctttactggactcagaaggcaatgctgacattgatcaggttgataatttgcaggaggggcccagtaaacctgtgcatagtagtactaattatgatgatgccatgcagtttttgaagaagaagcggtatcttcaagcagcaagtaacaacagcagggaatatgcgctgaatgtgggtaccatagcttctcagccttctgtaacacaagcagctgtggcaagtgtcattgatgaaagtaccacggcatccatattagagtcacaggcactgaatgtggagattaagagtaatcatgacaaaaatgttattccagatgaggtactgcagactctgttggatcattattcccacaaagctaatggacagcatgagatatccttcagtgttgcagatactgaagtgacttctagcatatcaataaattcttcagaagtaccagaggtcaccccgtcagagaatgttggatcaagctcccaagcatcctcatcagataaagccaacatgttgcaggaatactccaagtttctgcagcaggctttggacagaactagccaaaatgatgcctatttgaatagcccgagccttaactttgtgactgataaccagaccctcccaaatcagccagcattctcttccatagacaagcaggtctatgccaccatgcccatcaatagctttcgatcaggaatgaattctccactaagaacaactccagataagtcccactttggactaatagttggtgattcacagcactcatttcccttttcaggtgatgagacaaaccatgcttctgccacatcaacacaggactttctggatcaagtgacttctcagaagaaagctgaggcccagcctgtccaccaagcttaccaaatgagctcctttgaacagcccttccgtgctccctatcatggatcaagagctggaatagctactcaatttagcactgccaatggacaggtgaaccttcggggaccagggacaagtgctgaattttcagaatttcccttggtgaatgtaaatgataatagagctgggatgacatcttcacctgatgccacaactggccagacttttggctaaaaaaaaaaaaaaagtgtaaataatactggcactttagaacagattaatcaagagtggggttactctgtgtaaatggagtgctgtacagatttaagagcaatgcgtaataacaagttaagctgatatgaatagcaagataatccaataactgcatttcgtttggttagtcagcattctttgaactgccttacatgttgtcacctttatagaagcaatgcattacttgttttagatcagaaacttgctattccacccacaccaagtt

SEQ ID NO: 210612 - DNA, 2960 bp, Artificial Sequence
  derived and/or modified sequence
ctactgctctgggaggaggaagagaaggaggaagaggaggaggaggaggagggggaggaagaggagaaaggcgcaggggtgggagctgttgccgaagctgccacagcaaaagttctcccccctccccccttcccctcctctcaaggcccctagaaaggttggagctgccgccgcctgcagtcggtgaccgcgcgactcggcgcccgcccgcggatagagggaggaatcagcagcttggaaattcaagcacgtgatctggcgggatgggcgtttgcctaacgtatttaatggaggaatcggatggcataagtgattaaggtggtattgaggatttctgaagcctatgaaaggtagaaactcaaccatgatttctttttcaactctacagcattcctttccttgaagtcttcgtttttaccttagtctcggggtcttattctgtcacctaggtggagtgcagtagtacagtcacagctcactgcagccccaacatcctgggctcaagccatcctcctgcctcagcctcccaagtagctgggaccacaggcagttatacttaagcatgaacattgacgacaaactggaaggattgtttcttaaatgtggcggcatagacgaaatgcagtcttccaggacaatggttgtaatgggtggagtgtctggccagtctactgtgtctggagagctacaggattcagtacttcaagatcgaagtatgcctcaccaggagatccttgctgcagatgaagtgttacaagaaagtgaaatgagacaacaggatatgatatcacatgatgaactcatggtccatgaggagacagtgaaaaatgatgaagagcagatggaaacacatgaaagacttcctcaaggactacagtatgcacttaatgtccctataagcgtaaagcaggaaattacttttactgatgtatctgagcaactgatgagagacaaaaaacaaatcagagagccagtagacttacagaaaaagaagaagcggaaacaacgttctcccgcaaaaatccttacaataaatgaggatggatcacttggtttgaaaacccctaaatctcacgtttgtgagcactgcaatgctgcctttagaacgaactatcacttacagagacatgtcttcattcatacaggtgaaaaaccatttcaatgtagtcaatgtgacatgcgtttcatacagaagtacctgcttcagagacatgagaagattcatactggtgaaaaaccatttcgctgtgatgaatgtggtatgagattcatacaaaaatatcatatggaaaggcataagagaactcatagtggagaaaaaccttaccagtgtgaatactgtttacagtatttttccagaacagatcgtgtattgaaacataaacgtatgtgccatgaaaatcatgacaaaaaactaaatagatgtgccatcaaaggtggccttctgacatctgaggaagattctggcttttctacatcaccaaaagacaactcactgccaaaaaagaaaaggcagaaaacggagaaaaaatcatctggaatggacaaagagagtgctttggacaaatctgacctgaaaaaagacaaaaatgattacttgcctctttattcttcaagtactaaagtaaaagatgagtatatggttgcagaatatgctgttgaaatgccacattcgtcagttgggggctcgcatttagaagatgcgtcaggagaaatacacccacctaagttagttctcaaaaaaattaatagtaagagaagtctgaaacagccactggagcaaaatcaaacaatttcacctttatccacatatgaagagagcaaagtttcaaagtatgcttttgaacttgtggataaacaggctttactggactcagaaggcaatgctgacattgatcaggttgataatttgcaggaggggcccagtaaacctgtgcatagtagtactaattatgatgatgccatgcagtttttgaagaagaagcggtatcttcaagcagcaagtaacaacagcagggaatatgcgctgaatgtgggtaccatagcttctcagccttctgtaacacaagcagctgtggcaagtgtcattgatgaaagtaccacggcatccatattagagtcacaggcactgaatgtggagattaagagtaatcatgacaaaaatgttattccagatgaggtactgcagactctgttggatcattattcccacaaagctaatggacagcatgagatatccttcagtgttgcagatactgaagtgacttctagcatatcaataaattcttcagaagtaccagaggtcaccccgtcagagaatgttggatcaagctcccaagcatcctcatcagataaagccaacatgttgcaggaatactccaagtttctgcagcaggctttggacagaactagccaaaatgatgcctatttgaatagcccgagccttaactttgtgactgataaccagaccctcccaaatcagccagcattctcttccatagacaagcaggtctatgccaccatgcccatcaatagctttcgatcaggaatgaattctccactaagaacaactccagataagtcccactttggactaatagttggtgattcacagcactcatttcccttttcaggtgatgagacaaaccatgcttctgccacatcaacacaggactttctggatcaagtgacttctcagaagaaagctgaggcccagcctgtccaccaagcttaccaaatgagctcctttgaacagcccttccgtgctccctatcatggatcaagagctggaatagctactcaatttagcactgccaatggacaggtgaaccttcggggaccagggacaagtgctgaattttcagaatttcccttggtgaatgtaaatgataatagagctgggatgacatcttcacctgatgccacaactggccagacttttggctaaaaaaaaaaaaaaa

SEQ ID NO: 210613 - DNA, 2949 bp, Artificial Sequence
  derived and/or modified sequence
ggagaaaggcgcaggggtgggagctgttgccgaagctgccacagcaaaagttctcccccctccccccttcccctcctctcaaggcccctagaaaggttggagctgccgccgcctgcagtcggtgaccgcgcgactcggcgcccgcccgcggaatcggatggcataagtgattaaggtggtattgaggatttctgaagcctatgaaaggtagaaactcaaccatgatttctttttcaactctacagcattcctttccttgaagtcttcgtttttaccttagtctcgggcagttatacttaagcatgaacattgacgacaaactggaaggattgtttcttaaatgtggcggcatagacgaaatgcagtcttccaggacaatggttgtaatgggtggagtgtctggccagtctactgtgtctggagagctacaggattcagtacttcaagatcgaagtatgcctcaccaggagatccttgctgcagatgaagtgttacaagaaagtgaaatgagacaacaggatatgatatcacatgatgaactcatggtccatgaggagacagtgaaaaatgatgaagagcagatggaaacacatgaaagacttcctcaaggactacagtatgcacttaatgtccctataagcgtaaagcaggaaattacttttactgatgtatctgagcaactgatgagagacaaaaaacaaatcagagagccagtagacttacagaaaaagaagaagcggaaacaacgttctcccgcaaaaatccttacaataaatgaggatggatcacttggtttgaaaacccctaaatctcacgtttgtgagcactgcaatgctgcctttagaacgaactatcacttacagagacatgtcttcattcatacaggtgaaaaaccatttcaatgtagtcaatgtgacatgcgtttcatacagaagtacctgcttcagagacatgagaagattcatactggtgaaaaaccatttcgctgtgatgaatgtggtatgagattcatacaaaaatatcatatggaaaggcataagagaactcatagtggagaaaaaccttaccagtgtgaatactgtttacagtatttttccagaacagatcgtgtattgaaacataaacgtatgtgccatgaaaatcatgacaaaaaactaaatagatgtgccatcaaaggtggccttctgacatctgaggaagattctggcttttctacatcaccaaaagacaactcactgccaaaaaagaaaaggcagaaaacggagaaaaaatcatctggaatggacaaagagagtgctttggacaaatctgacctgaaaaaagacaaaaatgattacttgcctctttattcttcaagtactaaagtaaaagatgagtatatggttgcagaatatgctgttgaaatgccacattcgtcagttgggggctcgcatttagaagatgcgtcaggagaaatacacccacctaagttagttctcaaaaaaattaatagtaagagaagtctgaaacagccactggagcaaaatcaaacaatttcacctttatccacatatgaagagagcaaagtttcaaagtatgcttttgaacttgtggataaacaggctttactggactcagaaggcaatgctgacattgatcaggttgataatttgcaggaggggcccagtaaacctgtgcatagtagtactaattatgatgatgccatgcagtttttgaagaagaagcggtatcttcaagcagcaagtaacaacagcagggaatatgcgctgaatgtgggtaccatagcttctcagccttctgtaacacaagcagctgtggcaagtgtcattgatgaaagtaccacggcatccatattagagtcacaggcactgaatgtggagattaagagtaatcatgacaaaaatgttattccagatgaggtactgcagactctgttggatcattattcccacaaagctaatggacagcatgagatatccttcagtgttgcagatactgaagtgacttctagcatatcaataaattcttcagaagtaccagaggtcaccccgtcagagaatgttggatcaagctcccaagcatcctcatcagataaagccaacatgttgcaggaatactccaagtttctgcagcaggctttggacagaactagccaaaatgatgcctatttgaatagcccgagccttaactttgtgactgataaccagaccctcccaaatcagccagcattctcttccatagacaagcaggtctatgccaccatgcccatcaatagctttcgatcaggaatgaattctccactaagaacaactccagataagtcccactttggactaatagttggtgattcacagcactcatttcccttttcaggtgatgagacaaaccatgcttctgccacatcaacacaggactttctggatcaagtgacttctcagaagaaagctgaggcccagcctgtccaccaagcttaccaaatgagctcctttgaacagcccttccgtgctccctatcatggatcaagagctggaatagctactcaatttagcactgccaatggacaggtgaaccttcggggaccagggacaagtgctgaattttcagaatttcccttggtgaatgtaaatgataatagagctgggatgacatcttcacctgatgccacaactggccagacttttggctaaaaaaaaaaaaaaagtgtaaataatactggcactttagaacagattaatcaagagtggggttactctgtgtaaatggagtgctgtacagatttaagagcaatgcgtaataacaagttaagctgatatgaatagcaagataatccaataactgcatttcgtttggttagtcagcattctttgaactgccttacatgttgtcacctttatagaagcaatgcattacttgttttagatcagaaacttgctattccacccacaccaa

SEQ ID NO: 210614 - DNA, 763 bp, Artificial Sequence
  derived and/or modified sequence
ggaggaggaggcggaggggcgcggagaagctggcgcactttgggcctcggcggggtcgtctgcggcggccggacctcccagataccgcgccttctgggcctgccccgctggcgcagtcaggaccccttccctcaacgggatgggaaactttgtgagtggcttctccgcagccactaacaagtgtccgccagacagcgggggggccgccgaaggctgatgatggacacccgtttttcttcttattcctcttttacaaatcttctgttgaactgcattgtgtttacagtttcacgtctgtgaaaaggatagagggaggaatcagcagcttggaaattcaagcacgtgatctggcgggatgggcgtttgcctaacgtatttaatggaggaatcggatggcataagtgattaaggtggtattgaggatttctgaagcctatgaaaggtagaaactcaaccatgatttctttttcaactctacagcattcctttccttgaagtcttcgtttttaccttagtctcgggcagttatacttaagcatgaacattgacgacaaactggaaggattgtttcttaaatgtggcggcatagacgaaatgcagtcttccaggacaatggttgtaatgggtggagtgtctggccagtctactgtgtctggagagctacaggattcagtacttcaagatcgaagtatgcctcaccaggagatccttgctgcagatgaagtgttacaagaaagtgaaatgagacaacaggatatgatat

SEQ ID NO: 210615 - DNA, 2375 bp, Artificial Sequence
  derived and/or modified sequence
ggagaaaggcgcaggggtgggagctgttgccgaagctgccacagcaaaagttctcccccctccccccttcccctcctctcaaggcccctagaaaggttggagctgccgccgcctgcagtcggtgaccgcgcgactcggcgcccgcccgcggatagagggaggaatcagcagcttggaaattcaagcacgtgatctggcgggatgggcgtttgcctaacgtatttaatggaggaatcggatggcataagtgattaaggtggtattgaggatttctgaagcctatgaaaggtagaaactcaaccatgatttctttttcaactctacagcattcctttccttgaagtcttcgtttttaccttagtctcgggcagttatacttaagcatgaacattgacgacaaactggaaggattgtttcttaaatgtggcggcatagacgaaatgcagtcttccaggacaatggttgtaatgggtggagtgtctggccagtctactgtgtctggagagctacaggattcagtacttcaagatcgaagtatgcctcaccaggagatccttgctgcagatgaagtgttacaagaaagtgaaatgagacaacaggatatgatatcacatgatgaactcatggtccatgaggagacagtgaaaaatgatgaagagcagatggaaacacatgaaagacttcctcaaggactacagtatgcacttaatgtccctataagcgtaaagcaggaaattacttttactgatgtatctgagcaactgatgagagacaaaaaacaaatcagagagccagtagacttacagaaaaagaagaagcggaaacaacgttctcccgcaaaaatccttacaataaatgaggatggatcacttggtttgaaaacccctaaatctcacgtttgtgagcactgcaatgctgcctttagaacgaactatcacttacagagacatgtcttcattcatacaggtgaaaaaccatttcaatgtagtcaatgtgacatgcgtttcatacagaagtacctgcttcagagacatgagaagattcatactggtgaaaaaccatttcgctgtgatgaatgtggtatgagattcatacaaaaatatcatatggaaaggcataagagaactcatagtggagaaaaaccttaccagtgtgaatactgtttacagtatttttccagaacagatcgtgtattgaaacataaacgtatgtgccatgaaaatcatgacaaaaaactaaatagatgtgccatcaaaggtggccttctgacatctgaggaagattctggcttttctacatcaccaaaagacaactcactgccaaaaaagaaaaggcagaaaacggagaaaaaatcatctggaatggacaaagagagtgctttggacaaatctgacctgaaaaaagacaaaaatgattacttgcctctttattcttcaagtactaaagtaaaagatgagtatatggttgcagaatatgctgttgaaatgccacattcgtcagttgggggctcgcatttagaagatgcgtcaggagaaatacacccacctaagttagttctcaaaaaaattaatagtaagagaagtctgaaacagccactggagcaaaatcaaacaatttcacctttatccacatatgaagagagcaagtttcaaagtatgcttttgaacttgtggataaacaggctttactggactcagaaggcaatgctgacattgatcaggttgataatttgcaggagggcccagtaaacctgtgcatagtagtactaattatgatgatgccatgcagtttttgaagaagaagcggtatcttcaagcagcaagtaacaacagcagggaatatgcgctgaatgtgggtaccatagcttctcagccttctgtaacacaagcagctgtggcaagtgtcattgatgaaagtaccacggcatccatattagagtcacaggcactgaatgtggagattaagagtaatcatgacaaaaatgttattccagatgaggtactgcagactctgttggatcattattcccacaaagctaatggacagcatgagatatccttcagtgttgcagatactgaagtgacttctagcatatcaataaattcttcagaagtaccagaggtcaccccgtcagagaatgttggatcaagctcccaagcatcctcatcagataaagccaacatgttgcaggaatactccaagtttctgcagcaggctttggacagaactagccaaaatgatgcctatttgaatagcccgagccttaactttgtgactgataaccagaccctcccaaatcagccagcattctcttccatagacaagcaggtctatgccaccatgcccatcaatagctttcgatcaggaatgaattc

SEQ ID NO: 210616 - DNA, 1008 bp, Artificial Sequence
  derived and/or modified sequence
ggaggaggaggaggagggggaggaagaggagaaaggcgcaggggtgggagctgttgccgaagctgccacagcaaaagttctcccccctccccccttcccctcctctcaaggcccctagaaaggttggagctgccgccgcctgcagtcggtgaccgcgcgactcggcgcccgcccgcggatagagggaggaatcagcagcttggaaattcaagcacgtgatctggcgggatgggcgtttgcctaacgtatttaatggaggaatcggatggcataagtgattaaggtggtattgaggatttctgaagcctatgaaaggtgaaaaaccatttcaatgtagtcaatgtgacatgcgtttcatacagaagtacctgcttcagagacatgagaagattcatactggtgaaaaaccatttcgctgtgatgaatgtggtgatgagacaaaccatgcttctgccacatcaacacaggactttctggatcaagtgacttctcagaagaaagctgaggcccagcctgtccaccaagcttaccaaatgagctcctttgaacagcccttccgtgctccctatcatggatcaagagctggaatagctactcaatttagcactgccaatggacaggtgaaccttcggggaccagggacaagtgctgaattttcagaatttcccttggtgaatgtaaatgataatagagctgggatgacatcttcacctgatgccacaactggccagacttttggctaaaaaaaaaaaaaaagtgtaaataatactggcactttagaacagattaatcaagagtggggttactctgtgtaaatggagtgctgtacagatttaagagcaatgcgtaataacaagttaagctgatatgaatagcaagataatccaataactgcatttcgtttggttagtcagcattctttgaactgccttacatgttgtcacctttatagaagcaatgcattacttgttttagatcagaaacttgctattccacccacaccaagtt

SEQ ID NO: 210617 - protein, 110 aa, Artificial Sequence
  derived and/or modified sequence
MARGNQRELARQKNMKKTQEISKGKRKEDSLTASQRKQSSGGQKSESKMSAGPHLPLKAPRENPCFPLPAAGGSRYYLAYGSITPISAFVFVVFFSVFFPSFYEDFCCWI

SEQ ID NO: 210618 - protein, 96 aa, Artificial Sequence
  derived and/or modified sequence
MKKTQEISKGKRKEDSLTASQRKQSSGGQKSESKMSAGPHLPLKAPRENPCFPLPAAGGSRYYLAYGSITPISAFVFVVFFSVFFPSFYEDFCCWI

SEQ ID NO: 210619 - protein, 89 aa, Artificial Sequence
  derived and/or modified sequence
MKKTQEISKGKRKEDSLTASQRKQSSGGQKSESKMSAGPHLPLKAPRENPCFPLPAAGGSRYYLAYGSITPISAFVFVVFFSVFFPSFY

SEQ ID NO: 210620 - DNA, 333 bp, Artificial Sequence
  derived and/or modified sequence
atggccagaggcaaccagagagagctggccagacagaagaacatgaagaagacccaggagatcagcaagggcaagagaaaggaggacagcctgaccgccagccagagaaagcagagcagcggcggccagaagagcgagagcaagatgagcgccggcccccacctgcccctgaaggcccccagagagaacccctgcttccccctgcccgccgccggcggcagcagatactacctggcctacggcagcatcacccccatcagcgccttcgtgttcgtggtgttcttcagcgtgttcttccccagcttctacgaggacttctgctgctggatctag

SEQ ID NO: 210621 - DNA, 333 bp, Artificial Sequence
  derived and/or modified sequence
atggctcgtggaaatcaaagagagttagcgaggcagaaaaacatgaagaaaacacaggagatcagcaagggcaaacggaaggaggattctctgacagccagccagcggaagcagtctagcggtgggcaaaaaagcgaaagcaaaatgtcggctggaccccatttgcctctgaaagctcccagagaaaacccatgtttccccctccccgccgctgggggcagccgctattacctagcctacggatctataacacctatttcagcctttgtgtttgtggtttttttttctgtgtttttcccgtcgttttacgaggatttttgctgctggatttag

SEQ ID NO: 210622 - DNA, 333 bp, Artificial Sequence
  derived and/or modified sequence
atggcccggggcaaccagcgggagctggcccggcagaagaacatgaagaagacccaggagatcagcaagggcaagaggaaggaggacagcctgacagccagccagaggaagcagagcagcggcggccagaagtctgagagcaagatgtctgctggcccccacctgcccctgaaggccccccgggagaacccctgcttccccctgcctgctgctgggggcagccgctactacctggcctacggcagcatcacccccatcagcgcctttgtgtttgtggtgttcttcagcgtcttcttccccagcttctatgaggacttctgctgctggatctag

SEQ ID NO: 210623 - DNA, 333 bp, Artificial Sequence
  derived and/or modified sequence
atggcccggggcaaccagcgggagctggcccggcagaagaacatgaaaaagacgcaggagatttcaaaaggcaaacggaaggaggatagcctgactgccagtcagaggaagcagagctctggcgggcagaaaagcgaaagtaaaatgagtgcagggccacacttacctctgaaggcacctcgcgagaacccatgcttccccctgcctgctgccggcggtagcagatattacctagcttatggatcaattactccgatctccgccttcgtgtttgtagtcttttttagcgtgttctttcccagcttttacgaagacttttgctgctggatctag

SEQ ID NO: 210624 - DNA, 333 bp, Artificial Sequence
  derived and/or modified sequence
atggcgcgaggcaaccagcgggagctcgcaaggcagaagaacatgaagaagacccaagagattagtaagggaaagcgcaaagaggactcactgactgcttcacagaggaagcagagtagtggtgggcaaaaatcggaatcaaagatgtctgcagggcctcatctcccactcaaggccccacgcgagaacccctgctttccgctgcctgcagctgggggatcgcggtattacctcgcttacggctctatcacacctatatcagcattcgtctttgtcgtcttctttagtgtgttctttccctccttttacgaagacttttgctgctggatctag

SEQ ID NO: 210625 - DNA, 1889 bp, Artificial Sequence
  derived and/or modified sequence
ccggcggctgttgtcgggcctccagcgggcggggccgttggcggagcagaggggaggcgcagccgggcggagggcccacgagggctcagccttcccggtcagcggtggtgacggtatcccagagtgccagagaaccgttgcttttccgagttgctcttcttccaggctccgttggtggtcggcatggcccgtggaaatcaacgagaacttgcccgccagaaaaacatgaagaaaacccaggaaattagcaagggaaagaggaaagaggatagcttgactgcctctcagagaaagcagagttctggaggccagaaatctgagagcaagatgtcagctgggccacacctccctctgaaggctccaagggagaatccttgctttcctcttccagctgctggtggctccaggtattacttggcttatggcagcataactcctatctctgcctttgtctttgtggtcttcttttctgtcttcttcccttctttttatgaggacttttgctgttggatttaggttccattctaacctaggatgatctcatttggaaatccttaatttcatctacaaaaactgttttcccaaataggtcacattcacgcatatcagatggacagatgtatcattttggggtccaccattcaacccactacaaggagttttttaaacaaaaataggaaacttagatgtaacttagcactttttttttttttttttgagatggagtctcactctgtcaccagactggagtgcagtggcgccatctcagctccatgcaacctctgcctcctgggttcaagcagttctcttgcctcagcctcctgggtagctgggattacaggcacgcgctgccacacccaggtaatttatttattttttttttgagacagagtctcgcactgttgcccaggctggactgcagtggcgtgatctctgctcactgcaacctccgcctcccgggttcaagcgattctccagcctcagcttcctgagtagatgggattacaggcgcctgccaccacgcccagctaattttttgtattcttagtagagatggggtttcaccatgttggccaggctggtctccatctcctgacctcgtgattcacccgcctcggcctcccaaagtgctgggattacaggcgtgagtcacagcccccggccataatttagcactttaaaaaataatagccatgttgggccaggcgtggtggctcatgcctgtaatctgagcactttgggagaccaaggcgggtagatcccttgtgcccaggagttcaagaccagcctgggcaacatggcgaaaccccatttctactaaaaatacaaaaattagctggggcgaggggataggccgagttccgggtgtaagggggccattagggagagcagagcgaggcagctgatcttccggattgggggccttgcccggaagctggacctcacggagatgaaacggaagatgcacgaggatatgatctccatacagaactttctcatctacgtggccctgctgcgagtcactccatttatcttaaagaaattggacagcatatgaagattggacatcacatgtgaatgcatgatatgaagagcctggttacagtttctactgttctctgcaagtaaataggcccagaaaggtataagagactctttgaatggacataaaaattctgcttgttaagaacaagttgagctctggtaactgatcttaatagctaaaatataaaaatatttgggaagtctgaaatgaggtctcctggccctggtgtgcccttaatgcctgtgacagttggcctctgtgaatattggtataattgtaaataatgtcaaactccattttctagcaagtattaataattaagggaagtatgtctgaaatggca

SEQ ID NO: 210626 - DNA, 333 bp, Artificial Sequence
  derived and/or modified sequence
atggcgcgtggcaatcagagggaacttgccagacagaaaaacatgaagaagactcaagagatttcaaagggcaaacgcaaggaggactctctcacagcctcccagagaaagcagagctccgggggtcaaaaatccgagagcaagatgtccgcgggccctcatctgccattaaaggccccaagagagaacccttgctttccgctcccagctgcgggaggaagcagatactatctggcgtatggatctattacccccatatcagctttcgtctttgtcgtcttctttagcgtcttttttccaagcttttacgaagatttttgctgctggatctag

SEQ ID NO: 210627 - DNA, 291 bp, Artificial Sequence
  derived and/or modified sequence
atgaaaaagactcaggagatatctaagggtaaacgcaaggaggactccttaaccgcgtcccaacgaaagcagagctctggtgggcagaaatcggagtccaagatgagtgcaggaccacacttgccactgaaagcaccacgcgaaaacccctgctttccgctgcccgctgcgggaggtagcagatactatcttgcctatggctcaattacaccgatctccgccttcgtcttcgttgtcttcttttctgtgttctttcccagcttctacgaggacttctgttgctggatctag

SEQ ID NO: 210628 - DNA, 270 bp, Artificial Sequence
  derived and/or modified sequence
atgaagaaaactcaggagatctctaaaggcaaacggaaggaggacagcctgactgcttctcagcggaaacagtcctccgggggacagaagtctgaatcaaagatgagtgcggggccacacttacctctcaaggctcccagggaaaacccctgctttccactcccagctgcaggcgggagtcgatactatttggcctatgggtccataactcccatcagtgcctttgtctttgttgtctttttctccgttttctttccctcattttattag

SEQ ID NO: 210629 - DNA, 291 bp, Artificial Sequence
  derived and/or modified sequence
atgaagaagacccaggagatcagcaagggcaagaggaaggaggacagcctgacagccagccagaggaagcagagcagcggcggccagaagtctgagagcaagatgtctgctggcccccacctgcccctgaaggccccccgggagaacccctgcttccccctgcctgctgctgggggcagccgctactacctggcctacggcagcatcacccccatcagcgcctttgtgtttgtggtgttcttcagcgtcttcttccccagcttctatgaggacttctgctgctggatctag

SEQ ID NO: 210630 - DNA, 270 bp, Artificial Sequence
  derived and/or modified sequence
atgaagaagacccaggagatcagcaagggcaagaggaaggaggacagcctgacagccagccagaggaagcagagcagcggcggccagaagtctgagagcaagatgtctgctggcccccacctgcccctgaaggccccccgggagaacccctgcttccccctgcctgctgctgggggcagccgctactacctggcctacggcagcatcacccccatcagcgcctttgtgtttgtggtgttcttcagcgtcttcttccccagcttctactag

SEQ ID NO: 210631 - DNA, 333 bp, Artificial Sequence
  derived and/or modified sequence
atggcccggggcaaccagcgggagctggcccggcagaagaacatgaagaaaacacaagagatctccaagggcaaaaggaaagaggattccctgactgcctcgcagcgtaaacagtcatcaggaggccagaaaagtgagtcaaagatgtctgctggcccccacctgccactcaaggcgcccagagaaaatccttgctttcctctgcctgcggctggaggatctcggtattacttggcttatgggagtattacgccaatttccgccttcgtctttgtggtgtttttcagtgttttctttccttctttctatgaagatttctgttgttggatatag

SEQ ID NO: 210632 - DNA, 291 bp, Artificial Sequence
  derived and/or modified sequence
atgaagaagacccaggagatcagcaagggcaagcggaaggaggactctctcacagctagtcaacgcaaacagagcagcggagggcagaagagcgaatctaagatgtcagcaggacctcaccttcccctcaaggcccccagggaaaatccctgctttccgctacctgcagcgggtggctcccggtattatctggcgtatgggtccattacgcctataagtgctttcgtcttcgtagtgttcttcagcgtgttctttccctcattttatgaagacttctgttgctggatctag

SEQ ID NO: 210633 - DNA, 270 bp, Artificial Sequence
  derived and/or modified sequence
atgaagaagacccaggagatcagcaagggcaagcggaaggaggactcactgaccgctagccagcggaaacagtcttcaggaggacagaagtctgaatccaaaatgtccgctgggccccacctgcctctcaaagcccctcgggaaaatccgtgttttccactccctgcagcaggggggtctcgatactatctggcctatggctcaattactccaattagcgcattcgtgtttgtagtgttcttctctgttttcttcccctctttctattag

SEQ ID NO: 210634 - DNA, 568 bp, Artificial Sequence
  derived and/or modified sequence
attcttttgtgtcccgcagctcgcgagaggcttccgcccagaagggagctaggcctggagggggcttggcctggaggtggtttggagggagggcactgaagggacagtgtcttgatgtcatagttagatcttggactttgaaggcaaactagtgggtttgactcttggccacatggttaatcacctgtgaccttgggcaagtcaccagaatcctctctgtgtcagtttcctcatctgcaaaatggaataatgccttaaacaaggaggaccttgtttctatctatgaagcatggagaacagtgcctggaagataggatggtgccttgagtgaatgacccccttggagaacattcttccgcatccctcgcctcaagccagcctcagacagaaaactgaagattcagcagatccagtgcttcctgctcctcttctgcccaggaacacgcttgccttccccaaggcttccagaagctctgaggcaggaggcaccaagttctacctcatgtttggaggatcttgctagctatggccctcgtactcggctccctgttgctgctggggctgtgcg

SEQ ID NO: 210635 - DNA, 333 bp, Artificial Sequence
  derived and/or modified sequence
atggcccgtgggaaccagcgtgaattagcccgtcaaaagaacatgaagaaaacccaggaaatttccaaggggaaaaggaaagaggactcactgaccgcgtcccagcgcaagcagtcatcaggaggccagaaatcagaatccaagatgtcagccggtcctcatctgccgctgaaagcccctagggagaatccatgcttccctctgcccgcagcaggaggatcaagatattacctggcatacggctctataacgcccataagcgccttcgtttttgtcgtcttctttagtgtgttctttccttccttctatgaagatttctgctgctggatttag

SEQ ID NO: 210636 - DNA, 291 bp, Artificial Sequence
  derived and/or modified sequence
atgaagaagacccaggaaatcagcaagggtaaacgtaaggaagacagccttactgcttcccagcggaaacagagttctgggggtcaaaagtccgaatcaaaaatgtccgcaggccctcacctgccactcaaggcgccaagagagaacccatgctttccgctgccagctgccggtgggtcccggtattaccttgcctacggaagcatcacaccaatttctgcctttgtgttcgtagtgttctttagtgttttcttcccctccttctacgaggatttctgctgttggatctag

SEQ ID NO: 210637 - DNA, 270 bp, Artificial Sequence
  derived and/or modified sequence
atgaaaaagacacaggagatctcaaaagggaagcgcaaagaagactcactgacagcgagccaaagaaagcaatctagcggcggacagaagagcgaatctaaaatgtcagcaggacctcatctgcctctcaaagcgcctagagagaatccctgctttcctttgccagcagctggcggttctcgttactacctcgcatacgggtctatcacccccatcagtgcctttgtgtttgtcgtgtttttttcagtgttttttccctcattttattag

SEQ ID NO: 210638 - DNA, 1889 bp, Artificial Sequence
  derived and/or modified sequence
ccggcggctgttgtcgggcctccagcgggcggggccgttggcggagcagaggggaggcgcagccgggcggagggcccacgagggctcagccttcccggtcagcggtggtgacggtatcccagagtgccagagaaccgttgcttttccgagttgctcttcttccaggctccgttggtggtcggcatggcccgtggaaatcaacgagaacttgcccgccagaaaaacatgaagaaaacccaggaaattagcaagggaaagaggaaagaggatagcttgactgcctctcagagaaagcagagttctggaggccagaaatctgagagcaagatgtcagctgggccacacctccctctgaaggctccaagggagaatccttgctttcctcttccagctgctggtggctccaggtattacttggcttatggcagcataactcctatctctgcctttgtctttgtggtcttcttttctgtcttcttcccttctttttatgaggacttttgctgttggatttaggttccattctaacctaggatgatctcatttggaaatccttaatttcatctacaaaaactgttttcccaaataggtcacattcacgcatatcagatggacagatgtatcattttggggtccaccattcaacccactacaaggagttttttaaacaaaaataggaaacttagatgtaacttagcactttttttttttttttttgagatggagtctcactctgtcaccagactggagtgcagtggtgccatctcagctccatgcaacctctgcctcctgggttcaagcagttctcttgcctcagcctcctgggtagctgggattacaggcacgcgctgccacacccaggtaatttatttattttttttttgagacagagtctcgcactgttgcccaggctggactgcagtggcgtgatctctgctcactgcaacctccgcctcccgggttcaagcgattctccagcctcagcttcctgagtagatgggattacaggcgcctgccaccacgcccagctaattttttgtattcttagtagagatggggtttcaccatgttggccaggctggtctccatctcctgacctcgtgattcacccgcctcggcctcccaaagtgctgggattacaggcgtgagtcacagcccccggccataatttagcactttaaaaaataatagccatgttgggccaggcgtggtggctcatgcctgtaatctgagcactttgggagaccaaggcgggtagatcccttgtgcccaggagttcaagaccagcctgggcaacatggcgaaaccccatttctactaaaaatacaaaaattagctggggcgaggggataggccgagttccgggtgtaagggggccattagggagagcagagcgaggcagctgatcttccggattgggggccttgcccggaagctggacctcacggagatgaaacggaagatgcacgaggatatgatctccatacagaactttctcatctacgtggccctgctgcgagtcactccatttatcttaaagaaattggacagcatatgaagattggacatcacatgtgaatgcatgatatgaagagcctggttacagtttctactgttctctgcaagtaaataggcccagaaaggtataagagactctttgaatggacataaaaattctgcttgttaagaacaagttgagctctggtaactgatcttaatagctaaaatataaaaatatttgggaagtctgaaatgaggtctcctggccctggtgtgcccttaatgcctgtgacagttggcctctgtgaatattggtataattgtaaataatgtcaaactccattttctagcaagtattaataattaagggaagtatgtctgaaatggca

SEQ ID NO: 210639 - DNA, 846 bp, Artificial Sequence
  derived and/or modified sequence
atccccgcttcagtcggcagagagagagctcgcgggtggttccggtccggcttttcaggccggacgggtgcctgcccctcaggtgcgagtttgtgcggtaaagaacacaccccggagatgtggacacggccgccccaggagggtccttgtttggaggtggaaatcaacgagaacttgcccgccagaaaaacatgaagaaaacccaggaaattagcaagggaaagaggaaagaggatagcttgactgcctctcagagaaagcagagttctggaggccagaaatctgagagcaagatgtcagctgggccacacctccctctgaaggctccaagggagaatccttgctttcctcttccagctgctggtggctccaggtattacttggcttatggcagcataactcctatctctgcctttgtctttgtggtcttcttttctgtcttcttcccttctttttatgaggacttttgctgttggatttaggttccattctaacctaggatgatctcatttggaaatccttaatttcatctacaaaaactgttttcccaaataggtcacattcacgcatatcagatggacagatgtatcattttggggtccaccattcaacccactacaaggagttttttaaacaaaaataggaaacttagatgtaacttagcactttttttttttttttttgagatggagtctcactctgtcaccagactggagtgcagtggtgccatctcagctccatgcaacctctgcctcctgggttcaagcagttctcttgcctcagcctcctgggtagctgggattacaggcacgcgctgccacacccaggtaatttatttattttttt

SEQ ID NO: 210640 - DNA, 532 bp, Artificial Sequence
  derived and/or modified sequence
gcgcagtgcggggatccccgcttcagtcggcagagagagagctcgcgggtggttccggtccggcttttcaggccggacgggtgcctgcccctcaggtgcgagtttgtgcggtaaagaacacaccccggagatgtggacacggccgccccaggagggtccttgtttggagacttaccttcaatctgttcagtctccatccacccctctccgcctctgcatggggataaaggtggaaatcaacgagaacttgcccgccagaaaaacatgaagaaaacccaggaaattagcaagggaaagaggaaagaggatagcttgactgcctctcagagaaagcagagttctggaggccagaaatctgagagcaagatgtcagctgggccacacctccctctgaaggctccaagggagaatccttgctttcctcttccagctgctggtggctccaggtattacttggcttatggcagcataactcctatctctgcctttgtctttgtggtcttcttttctgtcttcttcccttctttttatg

SEQ ID NO: 210641 - DNA, 291 bp, Artificial Sequence
  derived and/or modified sequence
atgaagaagacccaggagatcagcaagggcaagagaaaggaggacagcctgaccgccagccagagaaagcagagcagcggcggccagaagagcgagagcaagatgagcgccggcccccacctgcccctgaaggcccccagagagaacccctgcttccccctgcccgccgccggcggcagcagatactacctggcctacggcagcatcacccccatcagcgccttcgtgttcgtggtgttcttcagcgtgttcttccccagcttctacgaggacttctgctgctggatctag

SEQ ID NO: 210642 - DNA, 270 bp, Artificial Sequence
  derived and/or modified sequence
atgaagaagacccaggagatcagcaagggcaagagaaaggaggacagcctgaccgccagccagagaaagcagagcagcggcggccagaagagcgagagcaagatgagcgccggcccccacctgcccctgaaggcccccagagagaacccctgcttccccctgcccgccgccggcggcagcagatactacctggcctacggcagcatcacccccatcagcgccttcgtgttcgtggtgttcttcagcgtgttcttccccagcttctactag

SEQ ID NO: 210643 - protein, 124 aa, Artificial Sequence
  derived and/or modified sequence
MADDLKRFLYKKLPSVEGLHAIVVSDRDGVPVIKVANDNAPEHALRPGFLSTFALATDQGSKLGLSKNKSIICYYNTYQVVQFNRLPLVVSFIASSSANTGLIVSLEKELAPLFEELRQVVEVS

SEQ ID NO: 210644 - DNA, 375 bp, Artificial Sequence
  derived and/or modified sequence
atggccgacgacctgaagagattcctgtacaagaagctgcccagcgtggagggcctgcacgccatcgtggtgagcgacagagacggcgtgcccgtgatcaaggtggccaacgacaacgcccccgagcacgccctgagacccggcttcctgagcaccttcgccctggccaccgaccagggcagcaagctgggcctgagcaagaacaagagcatcatctgctactacaacacctaccaggtggtgcagttcaacagactgcccctggtggtgagcttcatcgccagcagcagcgccaacaccggcctgatcgtgagcctggagaaggagctggcccccctgttcgaggagctgagacaggtggtggaggtgagctag

SEQ ID NO: 210645 - DNA, 375 bp, Artificial Sequence
  derived and/or modified sequence
atggccgatgatcttaaaaggtttctgtataaaaaactccccagcgtcgagggcctgcatgcgatcgtcgtcagtgaccgcgatggggtccccgtaattaaagtggccaatgacaatgctccagagcatgccttgcgacctgggttcctttctactttcgcattagccactgatcagggttccaaactcgggttgtcaaagaataaaagcattatctgttactataatacctatcaggtggtccagtttaacagacttcccctggtggtgtcgtttatcgcctccagcagtgccaatactggccttatagtgtctctagaaaaggaactcgctcccctgttcgaggaactccgacaggtggtggaggtgagctag

SEQ ID NO: 210646 - DNA, 4226 bp, Artificial Sequence
  derived and/or modified sequence
ggaaatcccgtatcgtagggcgacggcggcttagaaagtgcttcctggagcgcagacgaggtcatgaatcatgtgacggtggcttgaggaggaacctgtctttaaagctgtccctgaagtgacagcggagagaaccaggcagcccagaaaccccaggcgtggagattgatcctgcgagagaagggggttcatcatggcggatgacctaaagcgattcttgtataaaaagttaccaagtgttgaagggctccatgccattgttgtgtcagatagagatggagtacctgttattaaagtggcaaatgacaatgctccagagcatgctttgcgacctggtttcttatccacttttgcccttgcaacagaccaaggaagcaaacttggactttccaaaaataaaagtatcatctgttactataacacctaccaggtggttcaatttaatcgtttacctttggtggtgagtttcatagccagcagcagtgccaatacaggactaattgtcagcctagaaaaggaacttgctccattgtttgaagaactgagacaagttgtggaagtttcttaatctgacagtggtttcagtgtgtaccttatcttcattataacaacacaatatcaatccagcaatctttagactacaataatacttttatccatgtgctcaagaaagggcccctttttccaacttatactaaagagctagcatatagatgtaatttatagatagatcagttgctatattttctggtgtagggtctttcttatttagtgagatctagggataccacagaaatggttcagtctatcacagctcccatggagttagtctggtcaccagatatggatgagagattctattcagtggatcagaatcaaactggtacattgatccacttgagccgttaagtgctgccaattgtacaatatgcccaggcttgcagaataaagccaactttttattgtgaataataataaggacatatttttcttcagattatgttttatttctttgcattgagtgaggaacataaaatggcttggtaaaagtaataaaatcagtacaatcactaactttcctttgtacatattattttgcagtatagatgaatattactaatcagtttgattattctcagagggtgctgctctttaatgaaaatgaaaattatagctaatgttttttcctcaaactctgctttctgtaaccaatcagtgttttaatgtttgtgtgttcttcataaaatttaaatacaattcgttattctgtttccaatgttagtatgtatgtaaacatgatagtacagccatttttttcatatgtgagtaaaaataaaatagtatttttaaaaatatagtttgagcactgtataggtcctttttttgttcagactttttccaaaaatctaaacataattaatatactctttcagccacatgaataaataatgagtgtttcttgtaggtattggtttggagattgttttacggtagtatgaactgttaactggaaaagaaacctgagattgcagtcagccaagattgtgccactgcaccccagcctgggcaacagagactccgtctcaaaaacaaaaaagaaaagaaaccaagaaacctcaggcatgaacctaatttaatctccatgaaagaggtactacagttctagaatataccctttatgttcaggaatgcagtctatcattcagagttaatttctttctaggctctttgacaatcagtttttccctggatcagttcagtacatatgcattgagcacctgtgtgccagtcagccgagctatcacattgcacaattctaagaagcaccattcatgtctcatcatatttctatgctctgggagttgcctttcacatagaatatgtgtgattgttatccctagaattgtgcagtgaggcaattggctaggtgctgtgctgctttttctttctttctttttttttttaagagacagagtcttgctgtgttgcccagtctggagtgcagtggtggcatgatcttgcctcactgtaacctctgcctcctgggttcaagctgttctcatgccccattctcccttgtagctgggattacaggcttacaccatcgcacttggcaaatttgtgtatttttagtagagacaggaattcaccatgttggccaggctggtcttgaactcctgacttaaagtgatccacctgctttggcctcccaaaatgctaggattataggtgtgagccactgcaccgggccatgtgctactttttcttccttccatccttcctcccttcttcagtgtaaatatgagattaatttgtgataccttactttaaagaacttagagttcagtaaaggaagcaggtatagaaagtgctatgataaagctatacataggatggtatagaaccacagactaggggcacttaaaatgggcaagaaaatagcctttgtaaataaaatagaggcaagagatataatgctttacctgcaaagagctataaatacagccatgtaccatataatgatgtttcagttagtgaaggaccacatacgagggtggtcagaacagcaggctataccatatagcctaggtgtgtagtaggctataccatatagcctaggtgtgtagtagtaggctataccatatagcctaggtgtgtagtagtaggcgataccatatagcctaggtgtgtagtagtaggctataccatatagcctaggtgtatagtagtaggctataccatatagcctaggtgtgtagtaggctataccatatagcctaggtatgtagtagtaggctataccatatagcctaggtgtgtagtagtaggctataccatctggggttcctgtcagtacagtatgatgttcacataatgatgaaatcacctaacaaagcatgtctcgaaatgtatccacattgttacgtaacacatgactgtagttaattgttacaattgaaatactagatgtactcattgaaatccagaattcccattatctggattatttaatatcgttcaggaaatttttgccagtgcaatggtgcatgaaacaatgtcttttagaaatgaggtggccagatttctatttgcagataataattgtatatctaaaaatcctagaaaaagaaatgataacaaatggagctacttaacctttacatgttgaatgctgccactgttaaaatttctgagggggtataatagataaactatcccatagttcatctggaaaaataaggtggtgaaaattgctaagaaatttttgaaagggtaatgtaaacctagattaactgtttttgaaaggtagtacagaactgaatgcacaactagatatcaatggtatgtactcacccagaaaaaagacttcagtacatacatgtgagggcttaaaacattgttataaagacgggatcacaatgggaaaaggattattcaataagtagggcaggcattctctatgcctgctagggaagtgtgacttgttatactctttatgtacagcaattggcagtctgtgaaacttttaaattcatatacataaccttttgccctgcaattccacttctagaaatttatcctaccaaacaaagcacatagatgtgcaaaagtatgtatttacaagtatattctttgcaacttggtaatgtcaaagaattggaagcaacctaaatatctgccataggtaggataaccatatgctttggctttttgaacactaccagtttatacctgctgttcttggataattattaatagtgctttcattctcaatgtctcactttagataataaattacagaggattggtgaaactaatttgcccaatggaaaaaggaatgaagaagtgctttaggtactgagatgaaaagatctctaaggcataataatgtttattgagaaaagcatggtgtcaaactgtatggcatgctacaattgatgtataagaagaaaaaatgtgtatgtattcctatttgtttgtatatggtagactgtctctgaagacatatatggaagaacctgatcacattggtagtctccaaggagcagaactagatacctgggggataaggatcccaggagtgagccttttcattgtaaacttcattgtactttgagtttttaactgttcaaaaataataaaattagaaataaaatatttcaacaaacaataaaatgggatatttggggaagaaagttgtctcagggctctccaaagaagcagaa

SEQ ID NO: 210647 - DNA, 375 bp, Artificial Sequence
  derived and/or modified sequence
atggctgatgacctgaagcgcttcctgtacaagaagctgcccagcgtggagggcctgcacgccatcgtggtgtctgacagagatggagtgcctgtgatcaaggtggccaatgacaatgcccctgagcacgccctgcggcccggcttcctgagcacctttgccctggccacagaccagggcagcaagctgggcctgagcaagaacaagagcatcatctgctactacaacacctaccaggtggtgcagttcaaccggctgcccctggtggtgtccttcatcgccagcagcagcgccaacacaggcctgattgtgtccctggagaaggagctggcccccctgtttgaggagctgcggcaggtggtggaggtgtcctag

SEQ ID NO: 210648 - DNA, 375 bp, Artificial Sequence
  derived and/or modified sequence
atggccgacgacctgaagcggttcctgtacaagaagctgcccagcgtggaagggctacacgcaattgttgtgagtgatcgcgatggagttcctgtgatcaaagtggcgaatgataacgctccggagcacgccctgcgcccaggattcttgtctacattcgccctcgccacagaccaggggagtaaactgggactgagcaaaaacaagtctatcatttgctattataacacttaccaggtggtgcagtttaatcgcctgccgctggtggtatcctttattgcctcctctagcgccaacaccggcctgattgtgtcgcttgaaaaagaactggcgccactgttcgaagaactccggcaagtggtcgaagtgagttag

SEQ ID NO: 210649 - DNA, 375 bp, Artificial Sequence
  derived and/or modified sequence
atggctgatgacctgaagaggttcctttataagaaactgcccagcgtggagggactgcacgcaattgtggtgtcagaccgggatggcgtacccgttattaaagtggccaatgacaatgccccagagcacgccctgcgcccaggtttccttagtaccttcgcattggccactgatcaggggagcaagcttgggctgtctaagaataaatcaattatctgctattataacacataccaggtagtacagtttaatagactccccttggtggtctcattcatcgcctctagttcagcgaacaccggtctgattgtgtccctagaaaaagaattggctcctctgtttgaagaactcagacaagtggtggaggtcagctag

SEQ ID NO: 210650 - protein, 360 aa, Artificial Sequence
  derived and/or modified sequence
MKALILVGGYGTRLRPLTLSTPKPLVDFCNKPILLHQVEALAAAGVDHVILAVSYMSQVLEKEMKAQEQRLGIRISMSHEEEPLGTAGPLALARDLLSETADPFFVLNSDVICDFPFQAMVQFHRHHGQEGSILVTKVEEPSKYGVVVCEADTGRIHRFVEKPQVFVSNKINAGMYILSPAVLQRIQLQPTSIEKEVFPIMAKEGQLYAMELQGFWMDIGQPKDFLTGMCLFLQSLRQKQPERLCSGPGIVGNVLVDPSARIGQNCSIGPNVSLGPGVVVEDGVCIRRCTVLRDARIRSHSWLESCIVGWRCRVGQWVRMENVTVLGEDVIVNDELYLNGASVLPHKSIGESVPEPRIIM

SEQ ID NO: 210651 - DNA, 1083 bp, Artificial Sequence
  derived and/or modified sequence
atgaaggccctgatcctggtgggcggctacggcaccagactgagacccctgaccctgagcacccccaagcccctggtggacttctgcaacaagcccatcctgctgcaccaggtggaggccctggccgccgccggcgtggaccacgtgatcctggccgtgagctacatgagccaggtgctggagaaggagatgaaggcccaggagcagagactgggcatcagaatcagcatgagccacgaggaggagcccctgggcaccgccggccccctggccctggccagagacctgctgagcgagaccgccgaccccttcttcgtgctgaacagcgacgtgatctgcgacttccccttccaggccatggtgcagttccacagacaccacggccaggagggcagcatcctggtgaccaaggtggaggagcccagcaagtacggcgtggtggtgtgcgaggccgacaccggcagaatccacagattcgtggagaagccccaggtgttcgtgagcaacaagatcaacgccggcatgtacatcctgagccccgccgtgctgcagagaatccagctgcagcccaccagcatcgagaaggaggtgttccccatcatggccaaggagggccagctgtacgccatggagctgcagggcttctggatggacatcggccagcccaaggacttcctgaccggcatgtgcctgttcctgcagagcctgagacagaagcagcccgagagactgtgcagcggccccggcatcgtgggcaacgtgctggtggaccccagcgccagaatcggccagaactgcagcatcggccccaacgtgagcctgggccccggcgtggtggtggaggacggcgtgtgcatcagaagatgcaccgtgctgagagacgccagaatcagaagccacagctggctggagagctgcatcgtgggctggagatgcagagtgggccagtgggtgagaatggagaacgtgaccgtgctgggcgaggacgtgatcgtgaacgacgagctgtacctgaacggcgccagcgtgctgccccacaagagcatcggcgagagcgtgcccgagcccagaatcatcatgtag

SEQ ID NO: 210652 - DNA, 1083 bp, Artificial Sequence
  derived and/or modified sequence
atgaaggcactaattctggtcggtggctacggcacaagactccgccctctgactctttcaacacctaagccattagtggatttctgcaacaaacccattctccttcaccaggtggaagcccttgccgctgctggggtggatcatgttattttagctgtgtcctatatgagccaggtattagagaaagaaatgaaggcgcaggaacagcgcttaggaatacggatctccatgtcccacgaggaagagccattgggaaccgccggccctctggcactggcccgggacctgctttccgaaaccgcagatccttttttcgtactgaattccgacgtcatttgtgattttccgttccaggcaatggtccaatttcaccgacaccacggtcaagaaggtagtattcttgtaacgaaggttgaggagccttccaagtacggcgtagttgtgtgcgaagccgacactggccggattcatcgctttgtggaaaagccgcaggtttttgtgtctaataagattaacgcagggatgtacattctgtcaccagccgtgcttcagaggatacagctgcagcccacgtccattgagaaagaagtttttccaatcatggccaaggagggccagctctatgccatggagctgcagggattttggatggatatcgggcagccgaaggatttcttgacagggatgtgtctgttcctgcaaagtttacgacagaagcagcccgagcggctctgtagcggaccgggaatcgtcggcaatgttctggtcgacccaagcgcccgcatcggccaaaactgcagcattggacccaatgtgtctctgggccccggagtcgtcgtggaagacggagtttgcatcagaaggtgtactgtgctgagagacgctagaatcagatcacattcttggttagagtcctgcatcgtgggctggaggtgtagagtcggccaatgggtcaggatggagaatgtgactgtgcttggtgaggacgtcatcgttaatgacgaactgtatttgaacggcgcctccgtgttgccgcataagagcataggggagagtgtaccagagccacgaatcattatgtag

SEQ ID NO: 210653 - DNA, 1083 bp, Artificial Sequence
  derived and/or modified sequence
atgaaagccctcatactggttggcgggtacggaacgaggctccggccgttaaccctgagtactccaaaaccgctggtggatttctgtaataagccgatcctgctccatcaggttgaggccttagcggcagccggcgttgatcacgttatattggcagtgtcttatatgtcacaggtattggagaaggagatgaaggcacaggaacagagacttggcatccggatctccatgagccacgaggaggaacctctaggcactgcagggccacttgccctggcacgtgacctgctgagcgaaacagccgatcccttcttcgtcctgaatagcgatgttatttgtgatttccccttccaggctatggtccagtttcaccgccaccatggacaagagggatccattctggttacgaaggtggaggagccttctaaatacggggtcgtggtgtgtgaggcagatacaggccgtatccatcgtttcgtggagaagccacaggtctttgtctcaaacaagatcaatgccgggatgtacatcctctccccagctgtgttgcagagaatccagttacagccaacttcaattgagaaagaagtcttccccatcatggcaaaggaagggcagctatacgcgatggagctgcagggcttttggatggacattggccaaccaaaggatttcctcacaggcatgtgcttgttcctgcaaagccttaggcagaaacagccagaaagactgtgttccggtcccggcatcgttggaaatgtgctggtagatcctagcgctcgcattggccagaattgtagcatcggtccgaacgtgagcctcggacccggagtggtggtggaagatggcgtatgtatccgccgatgcactgtcctacgggatgctcggatcagatcacactcctggcttgaaagttgcattgtgggctggcgctgcagggtgggccagtgggtccggatggagaacgtgactgtgcttggtgaggacgttattgtgaacgatgagctgtatttgaacggagcatcagttctgccccacaaatctattggcgagtcagtccctgaacccaggattattatgtag

SEQ ID NO: 210654 - DNA, 1083 bp, Artificial Sequence
  derived and/or modified sequence
atgaaggccctgatcctggtgggcggctacggcacccggctgcggcccctgaccctgagcacccccaagcccctggtggacttctgcaacaagcccatcctgctgcaccaggtggaggccctggccgccgccggcgtggaccacgtgatcctggccgtgtcctacatgagccaggtgctggagaaggagatgaaggcccaggagcagaggctgggcatccgcatctccatgagccatgaggaggagcccctgggcacagctggccccctggccctggcccgggacctgctgtctgaaacagctgaccccttctttgtgctgaacagtgatgtgatctgtgacttccccttccaggccatggtgcagttccaccgccaccacggccaggagggcagcatcctggtgaccaaggtggaggagcccagcaaatatggagtggtggtgtgtgaggccgacaccggccgcatccacagatttgtggagaagccccaggtgtttgtgagcaacaagatcaatgccggcatgtacatcctgagccctgctgtgctgcagaggatccagctgcagcccaccagcattgagaaggaggtgttccccatcatggccaaggagggccagctgtatgccatggagctgcagggcttctggatggacatcggccagcccaaggacttcctgaccggcatgtgcctcttcctgcagagcctgcggcagaagcagcctgagcggctgtgcagcggccctggcatcgtgggcaatgtgctggtggaccccagcgcccgcatcggccagaactgcagcatcggccccaacgtgtccctgggccctggggtggtggtggaggatggagtgtgcatccgccgctgcaccgtgctgagagatgcccgcatccgcagccacagctggctggagagctgcatcgtgggctggcgctgccgggtgggccagtgggtgaggatggagaatgtgacagtgctgggggaggatgtgattgtgaatgatgagctgtacctgaatggagcctctgtgctgccccacaagagcattggagagagcgtgcctgagccccgcatcatcatgtag

SEQ ID NO: 210655 - DNA, 1582 bp, Artificial Sequence
  derived and/or modified sequence
gttcggggccagcagccgtctacccggtgtcgcgttctgtgttgtggcggccctggatccggcgtcagggcgaccgggcggacgaggtggagccagagtctgtcaggcgggttggtgaagggcgcggggccgggcacggcgttgggagtgcgcggcagggaccggccaggcgggctgcaggcacctcagagcccgggacaccccctcaacgtccgcaggcgcgatgaaggcactgatcttagtggggggctatgggacgcggctacggccgctgacgctgagcaccccgaagccactggtggacttctgcaataagcccatcttgctgcaccaagtggaggcgctagccgcggcaggcgtggaccacgtgatcctggccgtgagctacatgtcgcaggtgctggagaaggaaatgaaggcacaggagcagaggctgggaatccgaatctccatgtcccatgaagaggagcctttggggacagctgggcccctggcgctggcccgtgacctactctctgagactgcagaccctttcttcgtcctcaacagtgacgtgatctgcgatttccccttccaagccatggtgcagttccaccggcaccatggccaggagggctccatcctggtgaccaaggtggaggaaccctccaagtacggtgtggtggtgtgtgaggctgacacaggccgcattcaccggttcgtggagaagccacaggtgtttgtgtccaataagatcaacgcaggcatgtacatcctgagccctgcagtgctgcagcgcatccagctgcagcctacgtccattgagaaggaggtcttccccattatggccaaggaggggcagctatatgccatggagttacagggcttctggatggacattgggcagcccaaggacttcctcactggcatgtgcctcttcctgcagtcactgaggcagaagcagcctgagcggctgtgctcaggccctggcattgtgggcaacgtgctggtggacccaagtgcccgcatcggccagaactgcagcattggccccaatgtgagcctgggacctggcgtggtggtcgaagatggtgtgtgtatccggcggtgcacggtgctgcgggatgcccggatccgttcccattcctggcttgagtcctgcattgtgggctggcgctgccgcgtgggtcagtgggtacgcatggagaacgtgacagtgctgggtgaggacgtcatagttaatgatgagctctacctcaacggagccagcgtgctgccccacaagtctattggcgagtcagtgccagagcctcgtatcatcatgtgaggggatgcagtggggctggccgagccccggttttcccatcagcaaggggagtgctggcctgacacatcagaagaccctggacttgtcattatttgtctggggggcactgggtgaagctgaagctgttggacacctgccttctcatgtggacatcatctggcaggatccctgctgggcacaccccacaaaccccactccctcaagaagggccagggccagggctgtatggaataataatttaatgctcactgtggccctgactgaaagtcaagctca

SEQ ID NO: 210656 - DNA, 1083 bp, Artificial Sequence
  derived and/or modified sequence
atgaaggccctgatcctggtgggcggctacggcacccggctgcggccgctcactctgtcgacacctaagccacttgtggatttttgtaataagcccatcctgctgcaccaggttgaagccttggccgcagccggcgtggatcatgtcattttagctgtgtcctacatgagccaggtgctggagaaagagatgaaggcacaggaacagcgcctgggcatcaggatatcaatgtctcacgaggaagaaccacttggcacagccggtcctcttgcacttgcccgagatttgctgagcgagactgctgaccccttcttcgtcctcaactccgatgtcatttgcgactttcctttccaggccatggtgcagtttcaccggcatcacgggcaagagggaagcatactagtcactaaggtggaagagccaagtaaatacggagttgtcgtatgtgaagcagacactgggcggatccatagatttgtggagaaacctcaggtgtttgtcagcaacaaaatcaacgcgggaatgtacattctctcccccgctgtcctgcagcgtatacaactgcagcccacttcgatcgagaaagaagtgttcccgattatggcaaaggaaggtcagctttatgccatggagcttcagggattttggatggacatcggtcagcctaaagatttccttacgggaatgtgcctctttttgcagtcattacgccagaagcagcctgagcgtctctgttccggacccggtatcgtggggaacgtattggtagaccccagcgcacggatcgggcagaattgctcgataggccctaatgtgtccctgggccctggtgtcgtagtggaagacggagtgtgtatacgaaggtgtacagtattgcgagacgcacggatccgctcgcattcttggctcgaatcttgcatcgtaggatggcgatgtcgggtcgggcagtgggtgcggatggaaaacgtgaccgtgctcggagaggacgtaattgtgaatgatgaattgtatctgaatggagctagtgtcctgccgcacaaatcaatcggcgaatccgtgcccgaaccacggattattatgtag

SEQ ID NO: 210657 - DNA, 1083 bp, Artificial Sequence
  derived and/or modified sequence
atgaaggccctgatcctggtgggcggctacggcacccggctgcggcctcttacactttccactcccaaacctttggtggacttttgtaacaaacccatcctcctgcaccaggttgaagcactagccgcggccggcgttgaccacgtgattcttgccgtttcctacatgtcccaggttcttgaaaaagagatgaaagcccaggaacagaggctggggatacgcataagcatgtctcacgaagaggagcccctgggcactgctggccccctggctctcgcccgtgacctgctctccgagactgctgacccatttttcgtgctaaactctgatgttatctgtgacttcccatttcaggcgatggtgcagtttcaccgccatcacgggcaggaaggttctattctggtgaccaaggtggaagaacccagcaaatacggcgttgttgtgtgcgaagcagataccggtcgtatccataggtttgtcgaaaagcctcaagtgttcgtatctaacaagatcaacgctgggatgtacattctctcacctgccgttctccagcggatccagctgcaacccactagcatcgaaaaagaagtcttcccaattatggctaaagaggggcagctgtacgctatggaactccaaggtttttggatggacattgggcagcccaaggatttcctgaccggcatgtgtctgtttctgcagagcctgcgccagaagcagcctgagcggttatgttccgggcctggaatcgtaggtaacgttctggtcgatccgagcgcacgcatagggcagaattgcagcatcggtccaaacgtaagcctggggcccggggtggtggttgaagatggggtgtgcatcaggcggtgcaccgtgctgagggatgccagaatcaggtcccatagttggctagaatcctgcattgtaggctggagatgccgggtcggtcaatgggttcgcatggagaacgtcactgttctgggtgaagatgtaatcgttaatgacgaactgtatctgaacggcgcatccgtgctacctcataagtcaatcggcgaatcagtccccgagccccgaattatcatgtag

SEQ ID NO: 210658 - DNA, 1083 bp, Artificial Sequence
  derived and/or modified sequence
atgaaggcacttatcctggtgggcggttacgggacacggctccgccctctcacactatctacgccaaagcccttagtggatttttgtaataaacccattctgctgcaccaggtggaagctttagccgcagctggtgtagatcacgtgattttggcggtttcctacatgagtcaggtcctggagaaagagatgaaagcacaagaacagcgtttgggaatccgcatctcgatgtctcacgaggaagaacccttagggacagcgggtccgttggctctcgccagggatttactgtcagagacggcagatcccttcttcgtgctcaactcagacgtgatctgtgacttccctttccaagccatggtgcagttccatagacatcacggtcaggaagggagcattctcgtcacaaaggtagaagagcctagtaagtatggagtcgtggtgtgtgaggccgacactggccgtattcaccgcttcgtggagaagccacaggtgttcgtttccaacaagatcaacgcaggcatgtacatactgagccctgcggtgctgcagagaattcagctgcagccaacttctatcgagaaggaggtgttccccataatggccaaagagggccagctctatgccatggaactccaaggtttttggatggacatcggccagcccaaagactttctgacaggtatgtgtctgttcctgcagtcgctcagacagaagcagcccgagaggttgtgttctggaccaggcatcgtcggcaatgtgctggtggatccatccgccagaattgggcaaaattgctcgattggcccaaatgtttccctgggacccggagtcgtcgtggaagatggggtttgcatccgcaggtgcacggtcctgagagatgcacgaatccgctcccattcctggttggaatcttgcatagtaggatggagatgtcgcgtggggcagtgggtacgaatggaaaatgtcactgttctgggtgaagacgtcattgtgaatgacgaattatacctgaacggagccagcgtgctgccacataagagcataggtgagtccgtgcccgaaccacgcatcatcatgtag

SEQ ID NO: 210659 - DNA, 1083 bp, Artificial Sequence
  derived and/or modified sequence
atgaaggccttgatcctggtcggcggatatgggactcgcctgaggcccctcaccttgtcaactccaaagccgttggttgacttctgtaataagcccattttactgcatcaggtggaagcactggctgcggctggggttgatcacgtgattctggccgtatcttatatgagccaggtgctcgagaaagagatgaaggcccaggagcagcggcttgggatccggatttctatgtcacacgaggaggaacctctcgggaccgccggacccctggccctcgcaagggacctgctgagcgaaactgccgatcctttcttcgtcctaaactccgacgtgatctgcgatttccccttccaggccatggtgcagttccataggcaccacgggcaggaagggagtatcctagtaaccaaggtggaggagccaagcaagtacggggtggtggtatgtgaggcagacactggaaggatacacagattcgtcgaaaaaccacaggtattcgtcagcaacaaaatcaacgccggtatgtacattttgtctcctgccgtgctgcagcgtatccaactacagccgacctctatagaaaaggaagtttttccaataatggcaaaagaagggcaactgtacgccatggaactacagggcttctggatggacattgggcagccaaaggactttctcactggtatgtgtctgtttttacagtctcttagacagaaacagccagagagactctgtagcggccctgggatcgtggggaatgtactggtggacccttctgcaagaatcggccaaaactgttccatcggaccaaacgtctctttaggacctggagtagtggtcgaagacggagtttgtatcagacgctgcacggtgctgagagatgcacgaattcgttcccacagttggttagagagctgtattgtgggttggcgatgtcgcgtgggtcagtgggtacggatggagaatgtgacagtgcttggggaggatgtgattgttaatgacgagctgtatctgaatggcgcaagcgttctcccgcacaaatccatcggcgagtcagtgcccgagcccagaatcatcatgtag

SEQ ID NO: 210660 - protein, 398 aa, Artificial Sequence
  derived and/or modified sequence
MDPVVGCGRGLFGFVFSAGGPRGVLPRPCRVLVLLNPRGGKGKALQLFRSHVQPLLAEAEISFTLMLTERRNHARELVRSEELGRWDALVVMSGDGLMHEVVNGLMERPDWETAIQKPLCSLPAGSGNALAASLNHYAGYEQVTNEDLLTNCTLLLCRRLLSPMNLLSLHTASGLRLFSVLSLAWGFIADVDLESEKYRRLGEMRFTLGTFLRLAALRTYRGRLAYLPVGRVGSKTPASPVVVQQGPVDAHLVPLEEPVPSHWTVVPDEDFVLVLALLHSHLGSEMFAAPMGRCAAGVMHLFYVRAGVSRAMLLRLFLAMEKGRHMEYECPYLVYVPVVAFRLEPKDGKGVFAVDGELMVSEAVQGQVHPNYFWMVSGCVEPPPSWKPQQMPPPEEPL

SEQ ID NO: 210661 - DNA, 1197 bp, Artificial Sequence
  derived and/or modified sequence
atggaccccgtggtgggctgcggcagaggcctgttcggcttcgtgttcagcgccggcggccccagaggcgtgctgcccagaccctgcagagtgctggtgctgctgaaccccagaggcggcaagggcaaggccctgcagctgttcagaagccacgtgcagcccctgctggccgaggccgagatcagcttcaccctgatgctgaccgagagaagaaaccacgccagagagctggtgagaagcgaggagctgggcagatgggacgccctggtggtgatgagcggcgacggcctgatgcacgaggtggtgaacggcctgatggagagacccgactgggagaccgccatccagaagcccctgtgcagcctgcccgccggcagcggcaacgccctggccgccagcctgaaccactacgccggctacgagcaggtgaccaacgaggacctgctgaccaactgcaccctgctgctgtgcagaagactgctgagccccatgaacctgctgagcctgcacaccgccagcggcctgagactgttcagcgtgctgagcctggcctggggcttcatcgccgacgtggacctggagagcgagaagtacagaagactgggcgagatgagattcaccctgggcaccttcctgagactggccgccctgagaacctacagaggcagactggcctacctgcccgtgggcagagtgggcagcaagacccccgccagccccgtggtggtgcagcagggccccgtggacgcccacctggtgcccctggaggagcccgtgcccagccactggaccgtggtgcccgacgaggacttcgtgctggtgctggccctgctgcacagccacctgggcagcgagatgttcgccgcccccatgggcagatgcgccgccggcgtgatgcacctgttctacgtgagagccggcgtgagcagagccatgctgctgagactgttcctggccatggagaagggcagacacatggagtacgagtgcccctacctggtgtacgtgcccgtggtggccttcagactggagcccaaggacggcaagggcgtgttcgccgtggacggcgagctgatggtgagcgaggccgtgcagggccaggtgcaccccaactacttctggatggtgagcggctgcgtggagcccccccccagctggaagccccagcagatgcccccccccgaggagcccctgtag

SEQ ID NO: 210662 - DNA, 1197 bp, Artificial Sequence
  derived and/or modified sequence
atggacccagtggtcggctgcgggcgtggactgttcgggtttgtcttctctgccgggggaccaagaggagtgctaccccgcccctgtcgtgttcttgtgctgttgaacccacgcgggggtaaggggaaggccctgcagctgttccgctcccatgtgcaacccttgctcgcagaagccgagattagttttaccttaatgctcaccgaacggcggaaccacgctagggagttggttcggtcagaagagttaggcagatgggacgccctcgtggtgatgtccggggatggtctgatgcacgaagtggtgaatggcctcatggagcggccagactgggagaccgccatccagaaaccactttgtagcctgccagccggaagcgggaatgctctggccgcatcactcaatcactatgctggatatgagcaggtgaccaatgaggatcttcttaccaactgcactcttctcctctgcaggaggctgctcagccctatgaaccttctttcgctgcacaccgctagtggcctccgtctttttagtgtattgtccctggcttggggttttatagccgatgtggatctggaatccgagaagtaccgaagacttggagaaatgcggtttaccctaggcactttcttacgactggcagcgctgcgaacctacaggggacggctggcctaccttccggtaggaagagtgggctccaaaacgccagcgtctcctgttgttgttcagcaaggtccagttgacgcccacctcgttcccctcgaagaacccgtcccctcccattggactgtggtgcctgatgaagactttgtgttggtgctagccctcctgcattctcacctggggagtgaaatgtttgcagctcccatgggccggtgtgcagccggagtgatgcacctgttctacgtgagggccggcgtatctagagccatgctcttgcgcctgttcttggccatggagaagggcaggcacatggagtacgaatgcccctacctcgtgtacgtacctgtggttgcctttcggttggagcccaaagacggaaagggtgtgttcgctgttgacggagagttaatggtgagcgaagccgtgcaaggccaagtccatcccaactatttttggatggtttctgggtgtgtggagccgccgccaagctggaagccacagcaaatgcctcctccagaagagccgctctag

SEQ ID NO: 210663 - DNA, 1197 bp, Artificial Sequence
  derived and/or modified sequence
atggaccctgtggtgggctgcggccggggcctgtttggatttgtgttttctgctgggggcccccggggcgtgctgccccggccctgccgggtgctggtgctgctgaacccccggggcggcaagggcaaggccctgcagctgttccgcagccacgtgcagcccctgctggccgaggccgagatctccttcaccctgatgctgacagagaggagaaatcatgcccgggagctggtgcgctctgaggagctgggccgctgggatgccctggtggtgatgtctggagatggcctgatgcatgaggtggtgaatggcctgatggagaggccagactgggagacagccatccagaagcccctgtgcagcctgcctgctggcagcggaaatgccctggccgccagcctgaaccactacgccggctatgagcaggtgaccaatgaagacctgctgaccaactgcaccctgctgctgtgccggcggctgctgagccccatgaacctgctgagcctgcacacagccagcggcctgcggctcttctctgtgctgagcctggcctggggcttcatcgcagatgtggacctggagagcgagaagtacagaaggctgggggagatgaggttcaccctgggcaccttcctgcggctggccgccctgcggacctaccggggccgcctggcctacctgcctgtgggccgggtgggcagcaagaccccagccagccctgtggtggtgcagcagggccctgtggatgcccacctggtgcccctggaggagcctgtgcccagccactggacagtggtgcctgatgaagattttgtgctggtgctggccctgctgcacagccacctgggcagcgagatgtttgctgcccccatgggccgctgtgccgccggcgtgatgcacctgttctacgtgcgggccggcgtgtcccgggccatgctgctgcggctcttcctggccatggagaagggccgccacatggagtatgaatgtccctacctggtgtatgtgcctgtggtggccttccggctggagcccaaggatggaaaaggagtgtttgctgtggatggagagctgatggtgtctgaggccgtgcagggccaggtgcaccccaactacttctggatggtgtctggctgtgtggagcccccacccagctggaagccccagcagatgcctcctcctgaggagcccctgtag

SEQ ID NO: 210664 - DNA, 1197 bp, Artificial Sequence
  derived and/or modified sequence
atggaccccgtggtgggctgcggccggggcctgttcggcttcgtgttctctgccggagggccacgcggggtgcttccgcgcccttgccgcgtccttgtccttctgaatccccgcggaggaaaagggaaagccctccaattgttccgaagccacgtgcagccgttgctagccgaagcagagatttcattcaccctgatgttaaccgagcgccgaaaccacgcccgcgagctggtgcggtcagaggagctcggtcggtgggacgccctcgtagtcatgtccggcgatggtctgatgcacgaggtggtgaacggactcatggaaaggccagattgggaaaccgcaatccaaaagcccctctgttctttacccgcaggttcaggcaacgccctggcagcgtctctgaatcactatgctggatacgaacaagtcactaatgaagacctgctcactaattgtaccttgctgctctgtagaagactgcttagcccaatgaatcttctgagcctgcacaccgcttcaggcctgaggctgttttcggtactgtcacttgcttggggattcattgccgacgtcgacctcgagagcgagaagtatagacgccttggcgaaatgcggttcaccctggggaccttccttagactggcagccctcaggacatacagaggtaggctcgcttatctccccgtaggaagagtaggcagcaagaccccagcctctcccgtggtggtgcagcagggtccagtggacgcccatctggtacctctggaggagccagttcctagtcactggactgtggtcccagatgaagattttgtactcgtactggcactgctgcattcacatctgggtagtgagatgttcgcagccccaatgggcaggtgcgccgccggcgtcatgcatctgttctatgtcagggccggagttagcagggccatgctgctccggctgtttcttgcaatggagaagggacgtcatatggagtacgaatgcccctaccttgtatacgtccctgtcgtggctttccgtcttgagccaaaggatgggaagggagtatttgctgtagatggagagttgatggtgtccgaggccgttcagggccaggtgcaccccaactacttctggatggtgagtggttgtgttgaacccccgccctcatggaagccccagcaaatgccacctcctgaggaaccactgtag

SEQ ID NO: 210665 - DNA, 1197 bp, Artificial Sequence
  derived and/or modified sequence
atggatccggtcgtgggatgcggacgaggcctgttcggctttgtatttagcgctggagggccaaggggagttctgccacgcccttgccgagtattggtccttcttaacccgaggggaggcaaaggcaaagctctgcagctgttcagaagccatgtgcaaccactccttgccgaagcggagatctcttttaccctcatgctcacagaaaggcgtaatcacgccagggaactggttcgttccgaggaactgggaagatgggacgctcttgtcgtcatgtccggagacgggctcatgcatgaggtagtgaatgggctgatggaacggcctgactgggagacagcaattcagaagcccctctgttcactccctgcagggagcggcaatgcccttgccgcaagtctgaatcactacgcgggatacgagcaggttaccaacgaggacctgctcaccaactgcacgttgctcctgtgtcgacgattgctctcgcccatgaatctgctaagtctgcatacggcctctggattgcggctgttctccgtgctgagcttggcatggggatttatcgcagatgtggacttggagtccgagaagtacaggcggctaggggagatgcgttttacactgggaactttcctccgcttagccgcactgcggacctatcggggtcggctggcctatctgcccgtgggcagagtgggctcaaagacacctgcctcccccgtcgtggtgcaacagggccctgtggatgcacacctggtgcctttagaggaacctgtccccagccattggacggtcgttcccgatgaagatttcgtcctcgtgctcgctctgttgcacagtcacctgggatccgagatgttcgccgcaccaatgggtcgctgcgccgcaggggtgatgcatttgttctacgtgagggctggcgtttcgcgagctatgctactcaggttgtttctggccatggagaagggaaggcatatggagtatgaatgcccatatttggtttatgtcccagtagtagcctttcggctcgagcccaaagatggtaagggagttttcgcagtggatggagagctgatggtaagcgaagctgttcagggccaggtacacccgaactacttttggatggttagcgggtgtgtcgagccgcctcctagttggaagcctcagcagatgcctccgcctgaggaaccactgtag

SEQ ID NO: 210666 - protein, 217 aa, Artificial Sequence
  derived and/or modified sequence
MSLVGGFPHHPVVHHEGYPFAAAAAAAAAAAASRCSHEENPYFHGWLIGHPEMSPPDYSMALSYSPEYASGAAGLDHSHYGGVPPGAGPPGLGGPRPVKRRGTANRKERRRTQSINSAFAELRECIPNVPADTKLSKIKTLRLATSYIAYLMDLLAKDDQNGEAEAFKAEIKKTDVKEEKRKKELNEILKSTVSSNDKKTKGRTGWPQHVWALELKQ

SEQ ID NO: 210667 - protein, 186 aa, Artificial Sequence
  derived and/or modified sequence
MSLVGGFPHHPVVHHEGYPFAAAAAAAAAAAASRCSHEENPYFHGWLIGHPEMSPPDYSMALSYSPEYASGTANRKERRRTQSINSAFAELRECIPNVPADTKLSKIKTLRLATSYIAYLMDLLAKDDQNGEAEAFKAEIKKTDVKEEKRKKELNEILKSTVSSNDKKTKGRTGWPQHVWALELKQ

SEQ ID NO: 210668 - protein, 165 aa, Artificial Sequence
  derived and/or modified sequence
MSPPDYSMALSYSPEYASGAAGLDHSHYGGVPPGAGPPGLGGPRPVKRRGTANRKERRRTQSINSAFAELRECIPNVPADTKLSKIKTLRLATSYIAYLMDLLAKDDQNGEAEAFKAEIKKTDVKEEKRKKELNEILKSTVSSNDKKTKGRTGWPQHVWALELKQ

SEQ ID NO: 210669 - DNA, 2368 bp, Artificial Sequence
  derived and/or modified sequence
ctgtacatggagatcttgctgggaaaatccgcttgctcccctcacgtcgtccagcccaggagaaccaccgccgtcaccccggagcttcctcggccaccgcgcagagccctccgagagcccgagccgcggtcttcgagctccaaggctcattcagggccccagatccttgccccgaaaggagaggatctgagaaaatggatgcactgagacctctctgaaaaccctccgagagagcgcgagaggagcgaggacacgttactcgcagctaaaatcacatttaaggaccaaaacaacaacaaccaaaaatttcattaaaacaataagcgcccaagaacccagatcgggctggtggggggaggggaagaggcgggaaggggagggtcgcacggaggtagctttgcagtgagcagtcgaccccgccgccccccggcacagctggaccggctcctccagccgcggctcagactcgcccctggattccgggttagcttcggtgccaggaccgcggcccgggcttggattcccgagactccgcgtaccagcctcgcgggagccccggcacctttgtatgagcacgagaggattctgcctccgcgcagcagcccgggaagcaggagccgaagcgcgggccgtggagcaaggcgggaaccggaggcggcggcggcggcggccaggggcgcacggtgccaggaccagctcgccgcgccccatggggagccggcggccgcagcgctgctgaggcgggcccggctggccaggcggggggacggggcccgggctgcagcagccccctctgcggctgccgggcgggcccgggcgcccgggggctggggggtggggggtgggggaggacgccgagcgctgaggcaggggcccgggccgagggcgcggcggggctgcgcgcacgctggggcgcgtggaggggcgcggagggcgaaatgagtctggtaggtggttttccccaccacccggtggtgcaccacgagggctacccgtttgccgccgccgccgccgcagctgccgccgccgccgccagccgctgcagccatgaggagaacccctacttccatggctggctcatcggccaccccgagatgtcgccccccgactacagcatggccctgtcctacagccccgagtatgccagcggcgccgccggcctggaccactcccattacgggggggtgccgccgggcgccgggcccccgggcctgggggggccgcgcccggtgaagcgccgaggcaccgccaaccgcaaggagcggcgcaggactcagagcatcaacagcgccttcgccgaactgcgcgagtgcatccccaacgtacccgccgacaccaaactctccaaaatcaagaccctgcgcctggccaccagctacatcgcctacctcatggacctgctggccaaggacgaccagaatggcgaggcggaggccttcaaggcagagatcaagaagaccgacgtgaaagaggagaagaggaagaaggagctgaacgaaatcttgaaaagcacagtgagcagcaacgacaagaaaaccaaaggccggacgggctggccgcagcacgtctgggccctggagctcaagcagtgaggaggaggagaaggaggaggaggagagcgcgagtgagcaggggccaaggcgccagatgcagacccaggactccggaaaagccgtccgcgctccgctctgaggactccttgcatttggaatcatccggtttatttatgtgcaatttccttcccctctctttgaccccctttgaggcatctgctccccgtctccccctccaaaaaaaaagtggatatttgaagaaaagcattccatattttaatacgaagaggacactcccgtgtggtaagggatcccgtcgtctcatagattctgtgtgcgtgaatgttccctcttggctgtgtagacaccagcgttgccccccgccaacctactcaaccccttccagataaagacagtgggcactagtgcgtttgtgaagtgtatctttaatacttggcctttggatataaatattcctgggtattataaagttttatttcaaagcagaaaacagggccgctaacatttccgttggggtcggtatctagtgctatccattcatctgtggtcgttccctctttgaagatgtttccaacagccacttgttttgtgcacttccgtcctctaaaactaaatggaatttaattaatattgaaggtgtaaacgttgtaagtattcaataaaccactgtgttttttttttacaaaaaccttaatcttttaatggctgatacctcaaaagagttttgaaaacaaagctgttatacttgttttcgtaatatttaaaatattcagaagtaaactaaattatcatga

SEQ ID NO: 210670 - DNA, 654 bp, Artificial Sequence
  derived and/or modified sequence
atgtccctcgtgggcggttttccacaccatcccgtggtccatcatgaagggtatccttttgccgcagccgccgccgccgctgctgcagccgcggcttccaggtgttcccacgaagaaaatccatactttcacggttggcttatcggacaccccgaaatgtcccctcccgattatagcatggccctgtcctattctccagagtatgccagtggtgccgctggtctcgaccatagtcactatgggggggtaccccccggggcaggccccccagggttgggtggaccgcgaccagtcaaacggaggggtaccgctaaccgcaaagagaggcgacggacacaatctattaacagcgcctttgccgaattgagagaatgcatccctaacgtgccggccgatacaaagctcagtaaaattaagactttgcgtttggcaacctcctatattgcctacctgatggatctgctggcgaaagacgaccagaatggtgaggccgaggcattcaaggctgagatcaagaaaaccgacgtgaaagaggaaaagcggaagaaagaattaaatgaaatcctgaaatccactgttagttcaaacgataaaaagactaagggacgtacaggatggcctcagcacgtttgggctctggagttgaaacagtag

SEQ ID NO: 210671 - DNA, 561 bp, Artificial Sequence
  derived and/or modified sequence
atgtccctcgttgggggatttccacaccaccccgtggtgcatcatgagggctacccctttgctgctgccgcagccgccgcagctgcggctgccgcatcaagatgtagccatgaagagaacccctattttcacggctggcttattgggcatcccgaaatgagcccccctgactatagtatggcactgtcttacagtccagagtacgctagcggtacggccaaccgcaaagaacgcagaaggactcaatccattaattccgcttttgcagaattaagggagtgcattcctaatgtgccagccgatacaaagctcagcaaaattaagacccttcgtttagccacatcctatattgcttacctcatggacctactggccaaagatgaccagaacggggaggcagaggcatttaaagctgagatcaagaaaactgatgtgaaagaggagaagaggaaaaaagaacttaacgaaatattgaagtctaccgtgtctagtaacgataagaagaccaagggccgaacaggatggcctcaacacgtttgggcgctggaactgaaacaatag

SEQ ID NO: 210672 - DNA, 498 bp, Artificial Sequence
  derived and/or modified sequence
atgtcacctccagactatagtatggccctctcatacagcccagagtacgcaagcggagcggcgggcctggatcacagtcattatggcggcgttccacccggagcagggccccccggactcggcggacccaggcccgtcaagaggcgaggcaccgccaaccgcaaagaacggcggagaacacagtccattaattccgctttcgccgagctgagggagtgtataccaaacgtgcccgccgacactaagttgtctaaaatcaagactctgaggttagcaactagttatatcgcttatctcatggatctgcttgcaaaagatgatcagaatggcgaggcagaggctttcaaggcagaaattaagaaaaccgacgtgaaagaagagaagcggaagaaagaacttaacgagatcttgaagtcgactgtttcatctaatgataaaaagaccaaggggcgtaccggctggccccagcatgtttgggccttagagctgaagcagtag

SEQ ID NO: 210673 - DNA, 2780 bp, Artificial Sequence
  derived and/or modified sequence
agctgtacatggagatcttgctgggaaaatccgcttgctcccctcacgtcgtccagcccaggagaaccaccgccgtcaccccggagcttcctcggccaccgcgcagagccctccgagagcccgagccgcggtcttcgagctccaaggctcattcagggccccagatccttgccccgaaaggagaggatctgagaaaatggatgcactgagacctctctgaaaaccctccgagagagcgcgagaggagcgaggacacgttactcgcagctaaaatcacatttaaggaccaaaacaacaacaaccaaaaatttcattaaaacaataagcgcccaagaacccagatcgggctggtggggggaggggaagaggcgggaaggggagggtcgcacggaggtagctttgcagtgagcagtcgaccccgccgccccccggcacagctggaccggctcctccagccgcggctcagactcgcccctggattccgggttagcttcggtgccaggaccgcggcccgggcttggattcccgagactccgcgtaccagcctcgcgggagccccggcacctttgtatgagcacgagaggattctgcctccgcgcagcagcccgggaagcaggagccgaagcgcgggccgtggagcaaggcgggaaccggaggcggcggcggcggcggccaggggcgcacggtgccaggaccagctcgccgcgccccatggggagccggcggccgcagcgctgctgaggcgggcccggctggccaggcggggggacggggcccgggctgcagcagccccctctgcggctgccgggcgggcccgggcgcccgggggctggggggtggggggtgggggaggacgccgagcgctgaggcaggggcccgggccgagggcgcggcggggctgcgcgcacgctggggcgcgtggaggggcgcggagggcgaaatgagtctggtaggtggttttccccaccacccggtggtgcaccacgagggctacccgtttgccgccgccgccgccgcagctgccgccgccgccgccagccgctgcagccatgaggagaacccctacttccatggctggctcatcggccaccccgagatgtcgccccccgactacagcatggccctgtcctacagccccgagtatgccagcggcgccgccggcctggaccactcccattacgggggggtgccgccgggcgccgggcccccgggcctgggggggccgcgcccggtgaagcgccgaggcaccgccaaccgcaaggagcggcgcaggactcagagcatcaacagcgccttcgccgaactgcgcgagtgcatccccaacgtacccgccgacaccaaactctccaaaatcaagaccctgcgcctggccaccagctacatcgcctacctcatggacctgctggccaaggacgaccagaatggcgaggcggaggccttcaaggcagagatcaagaagaccgacgtgaaagaggagaagaggaagaaggagctgaacgaaatcttgaaaagcacagtgagcagcaacgacaagaaaaccaaaggccggacgggctggccgcagcacgtctgggccctggagctcaagcagtgaggaggaggagaaggaggaggaggagagcgcgagtgagcaggggccaaggcgccagatgcagacccaggactccggaaaagccgtccgcgctccgctctgaggactccttgcatttggaatcatccggtttatttatgtgcaatttccttcccctctctttgaccccctttgaggcatctgctccccgtctccccctccaaaaaaaaagtggatatttgaagaaaagcattccatattttaatacgaagaggacactcccgtgtggtaagggatcccgtcgtctcatagattctgtgtgcgtgaatgttccctcttggctgtgtagacaccagcgttgccccccgccaacctactcaaccccttccagataaagacagtgggcactagtgcgtttgtgaagtgtatctttaatacttggcctttggatataaatattcctgggtattataaagttttatttcaaagcagaaaacagggccgctaacatttccgttggggtcggtatctagtgctatccattcatctgtggtcgttccctctttgaagatgtttccaacagccacttgttttgtgcacttccgtcctctaaaactaaatggaatttaattaatattgaaggtgtaaacgttgtaagtattcaataaaccactgtgttttttttttacaaaaaccttaatcttttaatggctgatacctcaaaagagttttgaaaacaaagctgttatacttgttttcgtaatatttaaaatattcagaagtaaactaaattatcatgattgcctctaactttattttaaagactcagtggttccaaccagtcaccctgacctgcggcctacgcaggaggaggaggtgctcttaaagagaagtgtccttgttacaaatcctgcaaatggtctggggtttgtcggtgtggtgtctccttccctcttcccccagctggagaacgctgagtagtctctagaaggaagatctgggctggagaacccagtccggcagttcgctcagaaggtgtaaaggtgctcttgctttcctgaagtcaatcagaagccatttcttgaggccgtcagtttttgtttggagagtgtttctggtggaggagttgtgaggagaaccccggcattattgctgcaacgggaactagtctggggtgtttaattcaaactatggggctttcatccaagaa

SEQ ID NO: 210674 - DNA, 1337 bp, Artificial Sequence
  derived and/or modified sequence
atgagtctggtaggtggttttccccaccacccggtggtgcaccacgagggctacccgtttgccgccgccgccgccgcagctgccgccgccgccgccagccgctgcagccatgaggagaacccctacttccatggctggctcatcggccaccccgagatgtcgccccccgactacagcatggccctgtcctacagccccgagtatgccagcggcaccgccaaccgcaaggagcggcgcaggactcagagcatcaacagcgccttcgccgaactgcgcgagtgcatccccaacgtacccgccgacaccaaactctccaaaatcaagaccctgcgcctggccaccagctacatcgcctacctcatggacctgctggccaaggacgaccagaatggcgaggcggaggccttcaaggcagagatcaagaagaccgacgtgaaagaggagaagaggaagaaggagctgaacgaaatcttgaaaagcacagtgagcagcaacgacaagaaaaccaaaggccggacgggctggccgcagcacgtctgggccctggagctcaagcagtgaggaggaggagaaggaggaggaggagagcgcgagtgagcaggggccaaggcgccagatgcagacccaggactccggaaaagccgtccgcgctccgctctgaggactccttgcatttggaatcatccggtttatttatgtgcaatttccttcccctctctttgaccccctttgaggcatctgctccccgtctccccctccaaaaaaaaagtggatatttgaagaaaagcattccatattttaatacgaagaggacactcccgtgtggtaagggatcccgtcgtctcatagattctgtgtgcgtgaatgttccctcttggctgtgtagacaccagcgttgccccccgccaacctactcaaccccttccagataaagacagtgggcactagtgcgtttgtgaagtgtatctttaatacttggcctttggatataaatattcctgggtattataaagttttatttcaaagcagaaaacagggccgctaacatttccgttggggtcggtatctagtgctatccattcatctgtggtcgttccctctttgaagatgtttccaacagccacttgttttgtgcacttccgtcctctaaaactaaatggaatttaattaatattgaaggtgtaaacgttgtaagtattcaataaaccactgtgttttttttttacaaaaaccttaatcttttaatggctgatacctcaaaagagttttgaaaacaaagctgttatacttgttttcgtaatatttaaaatattcagaagtaaactaaattatcatga

SEQ ID NO: 210675 - DNA, 1652 bp, Artificial Sequence
  derived and/or modified sequence
agctgtacatggagatcttgctgggaaaatccgcttgctcccctcacgtcgtccagcccaggagaaccaccgccgtcaccccggagcttcctcggccaccgcgcagagccctccgagagcccgagccgcggtcttcgagctccaaggctcattcagggccccagatccttgccccgaaaggagaggatctgagaaaatggatgcactgagacctctctgaaaaccctccgagagagcgcgagaggagcgaggacacgttactcgcagctaaaatcacatttaaggaccaaaacaacaacaaccaaaaatttcattaaaacaataagcgcccaagaacccagatcgggctggtggggggaggggaagaggcgggaaggggagggtcgcacggaggtagctttgcagtgagcagtcgaccccgccgccgccagccgctgcagccatgaggagaacccctacttccatggctggctcatcggccaccccgagatgtcgccccccgactacagcatggccctgtcctacagccccgagtatgccagcggcgccgccggcctggaccactcccattacgggggggtgccgccgggcgccgggcccccgggcctgggggggccgcgcccggtgaagcgccgaggcaccgccaaccgcaaggagcggcgcaggactcagagcatcaacagcgccttcgccgaactgcgcgagtgcatccccaacgtacccgccgacaccaaactctccaaaatcaagaccctgcgcctggccaccagctacatcgcctacctcatggacctgctggccaaggacgaccagaatggcgaggcggaggccttcaaggcagagatcaagaagaccgacgtgaaagaggagaagaggaagaaggagctgaacgaaatcttgaaaagcacagtgagcagcaacgacaagaaaaccaaaggccggacgggctggccgcagcacgtctgggccctggagctcaagcagtgaggaggaggagaaggaggaggaggagagcgcgagtgagcaggggccaaggcgccagatgcagacccaggactccggaaaagccgtccgcgctccgctctgaggactccttgcatttggaatcatccggtttatttatgtgcaatttccttcccctctctttgaccccctttgaggcatctgctccccgtctccccctccaaaaaaaaagtggatatttgaagaaaagcattccatattttaatacgaagaggacactcccgtgtggtaagggatcccgtcgtctcatagattctgtgtgcgtgaatgttccctcttggctgtgtagacaccagcgttgccccccgccaacctactcaaccccttccagataaagacagtgggcactagtgcgtttgtgaagtgtatctttaatacttggcctttggatataaatattcctgggtattataaagttttatttcaaagcagaaaacagggccgctaacatttccgttggggtcggtatctagtgctatccattcatctgtggtcgttccctctttgaagatgtttccaacagccacttgttttgtgcacttccgtcctctaaaactaaatggaatttaattaatattgaaggtgtaaacgttgtaagtattcaataaaccactgtgttttttttttac

SEQ ID NO: 210676 - DNA, 654 bp, Artificial Sequence
  derived and/or modified sequence
atgagcctggtgggcggcttcccccaccaccctgtggtgcaccacgagggctacccctttgctgctgctgctgctgctgctgctgctgctgctgccagccgctgcagccatgaggagaacccctacttccacggctggctgattggccaccctgagatgagccccccagactacagcatggccctgagctacagcccagaatatgccagcggggctgctggcctggaccacagccactacggcggcgtgcccccaggagctggccccccaggcctgggcggccccaggcctgtgaagaggcggggcacagccaacaggaaggagaggaggaggacccagagcatcaacagcgcctttgctgagctgcgggagtgcatccccaacgtgcctgctgacaccaagctgagcaagatcaagaccctgcggctggccaccagctacatcgcctacctgatggacctgctggccaaggatgaccagaatggagaggccgaggccttcaaggccgagatcaagaagacagatgtgaaggaggagaagaggaagaaggagctgaatgagatcctgaagagcacagtgagcagcaatgacaagaagaccaagggccgcacaggctggccccagcacgtgtgggccctggagctgaagcagtag

SEQ ID NO: 210677 - DNA, 561 bp, Artificial Sequence
  derived and/or modified sequence
atgagcctggtgggcggcttcccccaccaccctgtggtgcaccacgagggctacccctttgctgctgctgctgctgctgctgctgctgctgctgccagccgctgcagccatgaggagaacccctacttccacggctggctgattggccaccctgagatgagccccccagactacagcatggccctgagctacagcccagaatatgccagcggcacagccaacaggaaggagaggaggaggacccagagcatcaacagcgcctttgctgagctgcgggagtgcatccccaacgtgcctgctgacaccaagctgagcaagatcaagaccctgcggctggccaccagctacatcgcctacctgatggacctgctggccaaggatgaccagaatggagaggccgaggccttcaaggccgagatcaagaagacagatgtgaaggaggagaagaggaagaaggagctgaatgagatcctgaagagcacagtgagcagcaatgacaagaagaccaagggccgcacaggctggccccagcacgtgtgggccctggagctgaagcagtag

SEQ ID NO: 210678 - DNA, 498 bp, Artificial Sequence
  derived and/or modified sequence
atgagccccccagactacagcatggccctgagctacagcccagaatatgccagcggggctgctggcctggaccacagccactacggcggcgtgcccccaggagctggccccccaggcctgggcggccccaggcctgtgaagaggcggggcacagccaacaggaaggagaggaggaggacccagagcatcaacagcgcctttgctgagctgcgggagtgcatccccaacgtgcctgctgacaccaagctgagcaagatcaagaccctgcggctggccaccagctacatcgcctacctgatggacctgctggccaaggatgaccagaatggagaggccgaggccttcaaggccgagatcaagaagacagatgtgaaggaggagaagaggaagaaggagctgaatgagatcctgaagagcacagtgagcagcaatgacaagaagaccaagggccgcacaggctggccccagcacgtgtgggccctggagctgaagcagtag

SEQ ID NO: 210679 - DNA, 654 bp, Artificial Sequence
  derived and/or modified sequence
atgagcctggtgggcggcttcccccaccaccccgtggtgcaccacgaggggtacccgttcgctgctgccgcagccgctgccgctgctgcggcagccagtagatgctctcacgaggagaacccttatttccacgggtggctgataggacatcctgagatgagtccacccgactactctatggccttgagttattcacccgaatatgcctcaggagcagccggcctggaccactcgcattatggcggggtacctcccggggccgggcccccgggactcgggggaccacgccctgtcaagcgccggggaacagcgaatcgcaaggagaggagacgaacacagagcatcaactcagccttcgcggaactgcgcgaatgcatacccaacgtccctgccgacactaagctctctaagatcaagaccctccgacttgccacgagttatatcgcctatcttatggatctactcgctaaggacgaccagaatggggaagccgaggccttcaaagcagagatcaagaaaaccgacgtgaaggaggagaaacgaaaaaaagaactgaacgaaatcctgaagtccacagtgtcaagcaatgataagaagactaaggggcgaaccggatggccacagcacgtctgggcactggaactgaaacagtag

SEQ ID NO: 210680 - DNA, 561 bp, Artificial Sequence
  derived and/or modified sequence
atgagcctggtgggcggcttcccccaccaccccgtggtgcaccacgagggctatccatttgcagcagccgccgcggcagctgctgcagcagcagcatccagatgttcccacgaggagaatccctacttccacgggtggctgattgggcacccagagatgtccccccccgattacagcatggcactatcctactcacccgaatatgcttctggcaccgccaatcggaaagagcggcgcaggacgcagagtattaatagcgcattcgcagagctgagagagtgcatccccaatgttcccgcagatacaaagctgagtaagatcaagactctgcgtctggcaacctcgtacatagcttacctcatggatcttttggcaaaagatgatcaaaacggggaggcagaagcttttaaggccgagatcaagaagactgatgtaaaggaggaaaagcggaagaaagagctgaacgagattctgaagtctacagtatctagtaatgacaagaagactaaagggcggacaggctggccccagcacgtctgggcactcgagcttaagcagtag

SEQ ID NO: 210681 - DNA, 498 bp, Artificial Sequence
  derived and/or modified sequence
atgagcccccccgactacagcatggccctgagctacagccccgagtacgcttcgggggcagccggactggaccactcccactatggcggcgtccctcctggtgctggcccacctggcctaggtggacctagaccagtcaaacggagggggacagctaatagaaaagaaaggcgaaggactcagtcaattaactcagcctttgccgaactccgtgagtgtattccaaacgtccccgctgacaccaagctatctaaaattaagactttgcgtctcgccacctcttacatcgcatatctgatggatttactggccaaggatgaccagaacggggaagctgaggcgtttaaggccgaaatcaagaaaaccgacgttaaagaggagaagaggaaaaaggagctgaatgagattctgaaatcaacggtctcgtccaacgataaaaagaccaaagggcgcacaggctggccacaacacgtctgggcactggagctcaagcaatag

SEQ ID NO: 210682 - DNA, 654 bp, Artificial Sequence
  derived and/or modified sequence
atgtctctggtgggcggttttccacatcacccagtggtacatcatgagggatacccttttgccgctgccgcagctgccgctgctgccgcagccgcatcccgctgctcccatgaggagaacccatacttccacggatggctcattggccaccccgagatgtccccccctgattactccatggccctctcctactcccctgaatatgcctccggtgcggcagggctggaccattcacactatggtggtgtgcccccaggcgctggtccccctgggctgggtggtccaaggccggtgaagcggagaggtacagccaacaggaaagagcgcaggcgcacccaaagcataaatagtgccttcgcggagctacgggaatgcataccaaacgtgcccgctgacaccaaactgtcaaagattaaaaccctccgtttggccacatcctacatcgcttaccttatggacctcctggctaaggatgaccagaatggggaagcggaggcctttaaagccgagattaaaaagactgacgtgaaggaagaaaagagaaagaaagagctgaatgagattctgaagtcgacggtgtcctcaaatgataaaaagaccaaaggcagaaccggctggcctcagcatgtatgggcccttgagttgaaacaatag

SEQ ID NO: 210683 - DNA, 561 bp, Artificial Sequence
  derived and/or modified sequence
atgtcccttgttggtggcttccctcaccatcctgttgtgcaccatgaaggatatccctttgccgctgctgcagcggcagctgccgctgctgcagctagtagatgcagccatgaagagaacccttacttccacgggtggctcattggacatccggagatgagtcctcctgattactccatggccctgagttattccccagaatacgcgtccggaaccgccaatcgcaaggagagacgacggacccagtctattaattccgcctttgcagaactgcgtgaatgcatccctaacgtcccggcagacaccaagctgtccaaaattaagaccttgagactggcaacgagctacattgcctacctgatggacctcctagcgaaagacgatcagaatggcgaggccgaggcgtttaaagctgagattaagaaaacagacgtcaaagaagagaagcgtaaaaaagaactgaatgaaatcctgaagtcaaccgtctcctctaatgataaaaagaccaaaggacgcacagggtggcctcagcacgtatgggccctggagcttaaacagtag

SEQ ID NO: 210684 - DNA, 498 bp, Artificial Sequence
  derived and/or modified sequence
atgtcaccaccggactattcaatggctctttcttacagccccgagtatgccagcggggctgccggactcgatcatagccattacggaggcgtgcctcccggagccggaccgcctggattgggcggtccacggcctgtcaaacgccgaggaaccgccaacagaaaggagagaagacgcacgcagtcaatcaatagcgcatttgccgagctgcgcgaatgcataccgaatgtcccagctgatacaaagctgagcaaaattaaaacattaaggttagctacttcctacattgcttatctgatggacttgctggcaaaggacgatcagaatggcgaggcagaagcttttaaagccgaaatcaagaagactgatgtgaaagaagagaaaagaaagaaagagcttaatgaaatactgaagtctaccgtctccagcaatgataaaaagaccaagggtcgcaccggttggcctcagcatgtatgggctctcgaactgaagcagtag

SEQ ID NO: 210685 - DNA, 654 bp, Artificial Sequence
  derived and/or modified sequence
atgagcctggtgggcggcttcccccaccaccccgtggtgcaccacgagggctaccccttcgccgccgccgccgccgccgccgccgccgccgccgccagcagatgcagccacgaggagaacccctacttccacggctggctgatcggccaccccgagatgagcccccccgactacagcatggccctgagctacagccccgagtacgccagcggcgccgccggcctggaccacagccactacggcggcgtgccccccggcgccggcccccccggcctgggcggccccagacccgtgaagagaagaggcaccgccaacagaaaggagagaagaagaacccagagcatcaacagcgccttcgccgagctgagagagtgcatccccaacgtgcccgccgacaccaagctgagcaagatcaagaccctgagactggccaccagctacatcgcctacctgatggacctgctggccaaggacgaccagaacggcgaggccgaggccttcaaggccgagatcaagaagaccgacgtgaaggaggagaagagaaagaaggagctgaacgagatcctgaagagcaccgtgagcagcaacgacaagaagaccaagggcagaaccggctggccccagcacgtgtgggccctggagctgaagcagtag

SEQ ID NO: 210686 - DNA, 561 bp, Artificial Sequence
  derived and/or modified sequence
atgagcctggtgggcggcttcccccaccaccccgtggtgcaccacgagggctaccccttcgccgccgccgccgccgccgccgccgccgccgccgccagcagatgcagccacgaggagaacccctacttccacggctggctgatcggccaccccgagatgagcccccccgactacagcatggccctgagctacagccccgagtacgccagcggcaccgccaacagaaaggagagaagaagaacccagagcatcaacagcgccttcgccgagctgagagagtgcatccccaacgtgcccgccgacaccaagctgagcaagatcaagaccctgagactggccaccagctacatcgcctacctgatggacctgctggccaaggacgaccagaacggcgaggccgaggccttcaaggccgagatcaagaagaccgacgtgaaggaggagaagagaaagaaggagctgaacgagatcctgaagagcaccgtgagcagcaacgacaagaagaccaagggcagaaccggctggccccagcacgtgtgggccctggagctgaagcagtag

SEQ ID NO: 210687 - DNA, 498 bp, Artificial Sequence
  derived and/or modified sequence
atgagcccccccgactacagcatggccctgagctacagccccgagtacgccagcggcgccgccggcctggaccacagccactacggcggcgtgccccccggcgccggcccccccggcctgggcggccccagacccgtgaagagaagaggcaccgccaacagaaaggagagaagaagaacccagagcatcaacagcgccttcgccgagctgagagagtgcatccccaacgtgcccgccgacaccaagctgagcaagatcaagaccctgagactggccaccagctacatcgcctacctgatggacctgctggccaaggacgaccagaacggcgaggccgaggccttcaaggccgagatcaagaagaccgacgtgaaggaggagaagagaaagaaggagctgaacgagatcctgaagagcaccgtgagcagcaacgacaagaagaccaagggcagaaccggctggccccagcacgtgtgggccctggagctgaagcagtag

SEQ ID NO: 210688 - protein, 127 aa, Artificial Sequence
  derived and/or modified sequence
MSDNEDNFDGDDFDDVEEDEGLDDLENAEEEGQENVEILPSGERPQANQKRITTPYMTKYERARVLGTRALQIAMCAPVMVELEGETDPLLIAMKELKARKIPIIIRRYLPDGSYEDWGVDELIITD

SEQ ID NO: 210689 - protein, 551 aa, Artificial Sequence
  derived and/or modified sequence
MDELFPLIFPAEPAQASGPYVEIIEQPKQRGMRFRYKCEGRSAGSIPGERSTDTTKTHPTIKINGYTGPGTVRISLVTKDPPHRPHPHELVGKDCRDGFYEAELCPDRCIHSFQNLGIQCVKKRDLEQAISQRIQTNNNPFQVPIEEQRGDYDLNAVRLCFQVTVRDPSGRPLRLPPVLSHPIFDNRAPNTAELKICRVNRNSGSCLGGDEIFLLCDKVQKEDIEVYFTGPGWEARGSFSQADVHRQVAIVFRTPPYADPSLQAPVRVSMQLRRPSDRELSEPMEFQYLPDTDDRHRIEEKRKRTYETFKSIMKKSPFSGPTDPRPPPRRIAVPSRSSASVPKPAPQPYPFTSSLSTINYDEFPTMVFPSGQISQASALAPAPPQVLPQAPAPAPAPAMVSALAQAPAPVPVLAPGPPQAVAPPAPKPTQAGEGTLSEALLQLQFDDEDLGALLGNSTDPAVFTDLASVDNSEFQQLLNQGIPVAPHTTEPMLMEYPEAITRLVTGAQRPPDPAPAPLGAPGLPNGLLSGDEDFSSIADMDFSALLSQISS

SEQ ID NO: 210690 - protein, 246 aa, Artificial Sequence
  derived and/or modified sequence
MDELFPLIFPAEPAQASGPYVEIIEQPKQRGMRFRYKCEGRSAGSIPGERSTDTTKTHPTIKINGYTGPGTVRISLVTKDPPHRPHPHELVGKDCRDGFYEAELCPDRCIHSFQNLGIQCVKKRDLEQAISQRIQTNNNPFQVPIEEQRGDYDLNAVRLCFQVTVRDPSGRPLRLPPVLSHPIFDNRAPNTAELKICRVNRNSGSCLGGDEIFLLCDKVQKEDIEVCPQASTPALSLYVIPEHHQL

SEQ ID NO: 210691 - protein, 377 aa, Artificial Sequence
  derived and/or modified sequence
MDELFPLIFPAEPAQASGPYVEIIEQPKQRGMRFRYKCEGRSAGSIPGERSTDTTKTHPTIKINGYTGPGTVRISLVTKDPPHRPHPHELVGKDCRDGFYEAELCPDRCIHSFQNLGIQCVKKRDLEQAISQRIQTNNNPFQVPIEEQRGDYDLNAVRLCFQVTVRDPSGRPLRLPPVLSHPIFDNRAPNTAELKICRVNRNSGSCLGGDEIFLLCDKVQKEDIEVYFTGPGWEARGSFSQADVHRQVAIVFRTPPYADPSLQAPVRVSMQLRRPSDRELSEPMEFQYLPDTDDRHRIEEKRKRTYETFKSIMKKSPFSGPTDPRPPPRRIAVPSRSSASVPKPGKDFLLSHWNDRFSSVQLRSSGDEDSWAPLQTY

SEQ ID NO: 210692 - protein, 237 aa, Artificial Sequence
  derived and/or modified sequence
MDELFPLIFPAEPAQASGPYVEIIEQPKQRGMRFRYKCEGRSAGSIPGERSTDTTKTHPTIKINGYTGPGTVRISLVTKDPPHRPHPHELVGKDCRDGFYEAELCPDRCIHSFQNLGIQCVKKRDLEQAISQRIQTNNNPFQVPIEEQRGDYDLNAVRLCFQVTVRDPSGRPLRLPPVLSHPIFDNRAPNTAELKICRVNRNSGSCLGGDEIFLLCDKVQKAHGIPVPARYRRSSPD

SEQ ID NO: 210693 - protein, 425 aa, Artificial Sequence [sequence omitted]

SEQ ID NO: 210694 - DNA, 1656 bp, Artificial Sequence
  derived and/or modified sequence
atggacgagctgttccccctgatcttccccgccgagcccgcccaggccagcggcccctacgtggagatcatcgagcagcccaagcagagaggcatgagattcagatacaagtgcgagggcagaagcgccggcagcatccccggcgagagaagcaccgacaccaccaagacccaccccaccatcaagatcaacggctacaccggccccggcaccgtgagaatcagcctggtgaccaaggaccccccccacagaccccacccccacgagctggtgggcaaggactgcagagacggcttctacgaggccgagctgtgccccgacagatgcatccacagcttccagaacctgggcatccagtgcgtgaagaagagagacctggagcaggccatcagccagagaatccagaccaacaacaaccccttccaggtgcccatcgaggagcagagaggcgactacgacctgaacgccgtgagactgtgcttccaggtgaccgtgagagaccccagcggcagacccctgagactgccccccgtgctgagccaccccatcttcgacaacagagcccccaacaccgccgagctgaagatctgcagagtgaacagaaacagcggcagctgcctgggcggcgacgagatcttcctgctgtgcgacaaggtgcagaaggaggacatcgaggtgtacttcaccggccccggctgggaggccagaggcagcttcagccaggccgacgtgcacagacaggtggccatcgtgttcagaacccccccctacgccgaccccagcctgcaggcccccgtgagagtgagcatgcagctgagaagacccagcgacagagagctgagcgagcccatggagttccagtacctgcccgacaccgacgacagacacagaatcgaggagaagagaaagagaacctacgagaccttcaagagcatcatgaagaagagccccttcagcggccccaccgaccccagacccccccccagaagaatcgccgtgcccagcagaagcagcgccagcgtgcccaagcccgccccccagccctaccccttcaccagcagcctgagcaccatcaactacgacgagttccccaccatggtgttccccagcggccagatcagccaggccagcgccctggcccccgcccccccccaggtgctgccccaggcccccgcccccgcccccgcccccgccatggtgagcgccctggcccaggcccccgcccccgtgcccgtgctggcccccggccccccccaggccgtggccccccccgcccccaagcccacccaggccggcgagggcaccctgagcgaggccctgctgcagctgcagttcgacgacgaggacctgggcgccctgctgggcaacagcaccgaccccgccgtgttcaccgacctggccagcgtggacaacagcgagttccagcagctgctgaaccagggcatccccgtggccccccacaccaccgagcccatgctgatggagtaccccgaggccatcaccagactggtgaccggcgcccagagaccccccgaccccgcccccgcccccctgggcgcccccggcctgcccaacggcctgctgagcggcgacgaggacttcagcagcatcgccgacatggacttcagcgccctgctgagccagatcagcagctag

SEQ ID NO: 210695 - DNA, 1656 bp, Artificial Sequence
  derived and/or modified sequence
atggacgagctctttcctctgatttttcctgctgagcctgcacaagctagtggtccttacgtggagatcattgaacaacccaaacagcgtgggatgagattcagatataaatgcgaggggcgatctgcaggctctataccaggggagcggtctactgataccaccaagactcatccaaccatcaagataaatgggtacaccgggcctggaacagtccgaatatctctggtcacaaaggacccgccgcatcgacctcatcctcatgagttggtgggcaaagattgtcgtgatggcttctacgaagccgaattatgcccagatagatgtatccacagcttccagaatctgggcatccagtgcgtaaagaaacgcgatttggaacaggcgatatctcaacggatccagacaaataataatccatttcaggttcctatcgaggaacagaggggggattatgacctcaacgctgtcagactatgtttccaagtgacagtgcgcgatccatctgggcgacctctaaggctcccgccggtgttaagtcatcccattttcgataatcgggcaccaaacactgctgagctgaagatttgcagggtgaacaggaactcaggctcttgcctcggtggggacgagatttttctgctctgcgataaggtgcagaaagaggatatcgaggtgtactttacaggccccggttgggaagcgcgcgggagctttagtcaggccgatgtgcatagacaggtggcaatcgtgttccgtacacccccctatgctgatccaagcctgcaggccccagtaagagtgagcatgcaacttcggaggccctcggacagagagttatctgaaccgatggagttccaatacctccctgataccgacgatagacaccgcatagaggagaagcgaaaaagaacctatgaaacttttaagtctatcatgaagaaaagtccatttagcggtccgaccgatcccagacctccaccaagaagaattgcagttccatccagatcttcagcctctgtgcctaaacccgccccccagccctatcctttcacctcaagcctttcaaccattaattatgacgagttccctacaatggtattcccctctggccagataagtcaagccagtgccctggcgcccgctccaccccaggtgctcccacaggctccagcccctgcaccagcacccgctatggtctctgccctagctcaggcgcccgcgcccgtgccagttcttgcccctgggcctccccaagccgttgccccccccgcgcccaagcctacccaggcgggcgaaggaacgctttccgaagcactgctgcagctacagttcgacgacgaggacctgggcgccttgctagggaactcgacagatcccgccgttttcacagatctggcatccgtggataactccgagttccaacagctgctgaaccaaggaatcccagtagcacctcataccactgagcccatgctaatggaatatcctgaagcaatcacacgcctggtaactggagcccagcgcccacccgacccagcccctgctcctctgggcgcccccggtctgcccaacggcctactatcaggcgacgaggatttcagcagtatcgcggacatggatttttccgctctgttaagtcagatctcatcctag

SEQ ID NO: 210696 - DNA, 1656 bp, Artificial Sequence
  derived and/or modified sequence
atggatgagctgttccccctcatcttccctgctgagcccgcccaggccagcggcccctacgtggagatcatcgagcagcccaagcagaggggcatgaggttccgctacaagtgtgagggccgctctgctggcagcatccctggagagaggagcacagacaccaccaagacccaccccaccatcaagatcaatggctacacaggccctggcaccgtgcgcatcagcctggtgaccaaggaccccccccaccggccccacccccatgagctggtgggcaaggactgcagagatggcttctatgaggccgagctgtgcccagaccgctgcatccacagcttccagaacctgggcatccagtgtgtgaagaagagggacctggagcaggccatcagccagaggatccagaccaacaacaaccccttccaggtgcccatcgaggagcagagaggagactatgacctgaatgctgtgcggctgtgcttccaggtgacagtgcgggaccccagcggccggcccctgcggctgccccctgtgctgagccaccccatctttgacaacagagcccccaacacagctgagctgaagatctgccgggtgaacagaaattctggcagctgcctgggcggagatgagatcttcctgctgtgtgacaaggtgcagaaggaggacatcgaggtgtacttcaccggccctggctgggaggcccggggcagcttcagccaggctgatgtgcaccggcaggtggccatcgtgttccgcaccccaccctatgctgaccccagcctgcaggcccctgtgcgggtgtccatgcagctgcggcggcccagcgaccgggagctgtctgagcccatggagttccagtacctgcctgacacagatgacagacaccgcatcgaggagaagaggaagaggacctatgagaccttcaagagcatcatgaagaagagccccttcagcggccccacagacccccggcccccaccaagaagaattgctgtgcccagccgcagcagcgcctctgtgcccaagccagccccccagccctaccccttcaccagcagcctgagcaccatcaactatgatgagttccccaccatggtgttccccagcggccagatcagccaggccagcgccctggccccagccccaccccaggtgctgccccaggccccagccccagccccagccccagccatggtgtctgccctggcccaggccccagcccctgtgcctgtgctggcccctggccccccccaggccgtggcccccccagcccccaagcccacccaggccggggagggcaccctgtctgaggccctgctgcagctgcagtttgatgatgaggacctgggcgccctgctgggcaacagcacagatcctgctgtgttcacagacctggcctctgtggacaacagcgagttccagcagctgctgaaccagggcatccctgtggccccccacaccacagagcccatgctgatggagtacccagaggccatcacccggctggtgactggagcccagaggcccccagaccctgccccagcccccctgggcgcccctggcctgcccaacggcctgctgtctggagatgaggacttcagcagcattgctgacatggacttcagcgccctgctgagccagatcagcagctag

SEQ ID NO: 210697 - DNA, 1656 bp, Artificial Sequence
  derived and/or modified sequence
atggacgagctgttccccctgatcttccccgccgagcccgcccaggcctccggaccatatgtggaaattatcgagcagccgaagcaaaggggcatgaggtttagatataaatgtgagggccgctcggcgggctcaattcctggtgagcggtccacagacaccactaaaacacaccccactataaagatcaacggctacaccggccccggtaccgtacgaatcagtctggtgaccaaagatccccctcatcggcctcacccgcacgaactagtggggaaagattgtcgagacggtttctacgaagctgaattgtgccctgaccgctgcattcacagtttccagaatctgggcatacagtgtgtcaagaaacgtgacctcgaacaggctatttcacagagaatacaaaccaataataaccccttccaggtaccaatcgaggagcagagaggagactatgatcttaacgccgttcggctgtgctttcaggtgactgtgcgcgacccgagcggacgccctctgagactcccccctgtcctctcacatcctattttcgataatcgcgcacccaataccgctgagttaaagatttgtagggtaaataggaattccggatcctgcctcggcggcgacgagatctttctgctctgtgacaaggtccaaaaagaggacattgaagtctatttcactggaccagggtgggaggcccgtggctctttctcccaggccgacgttcatcgacaggttgctatcgtctttcggacccctccctacgctgatcctagtttgcaggctcctgttcgggtttcaatgcagctgcggagaccgtctgatagagaactaagcgaacctatggagtttcagtacttacctgatacggatgaccggcaccgcatcgaggagaagcgtaagcggacttatgaaacattcaaaagcatcatgaagaagtctccattttcagggccaactgaccctagacctccccctaggcgcatcgcagttccctcgaggagcagcgcaagtgtgcctaaacctgcaccccagccatatcctttcactagctcccttagtacaataaattacgacgaattcccaactatggtctttcccagtgggcagataagtcaagcttcagcccttgctcctgctccgccgcaggtcttacctcaagctccagctcccgctcccgcccctgcaatggttagcgccctggcccaggctcccgcaccagtacccgttctcgcaccaggccctccacaggctgtggccccacccgctccgaaacctacccaggccggagaagggaccctcagcgaggctcttctccaacttcagtttgatgacgaagatctcggggccctgctgggcaattctactgacccagccgtgttcacagatttggcatccgttgataattccgagttccagcaactgctgaaccaggggataccagtcgctccccacaccaccgaacctatgctcatggagtaccctgaggctattacccgcctggtgacgggggcccagcgccctccagatcctgcaccggccccacttggggctccggggctgcccaacggactgttaagtggagatgaagacttcagctccattgctgatatggacttctctgcactgcttagccaaatttccagctag

SEQ ID NO: 210698 - DNA, 1656 bp, Artificial Sequence
  derived and/or modified sequence
atggacgaactgtttcctctcatctttccagctgagcccgctcaggccagtggcccttacgtggagataattgaacagcctaagcaacgaggaatgcggttccgatacaagtgtgagggtagatccgcaggatcaattccaggcgaaaggtcgacagacaccacaaagacacatcccactattaagatcaatggatatactggcccagggaccgtgagaattagcctcgtaacaaaggaccctcctcatcgacctcatccacacgagctagtgggcaaggattgtagagatggcttttacgaggccgaactttgccctgacaggtgcatacactcttttcagaacctgggaatccaatgcgtgaagaagagagacttggagcaggccataagtcagcgtatccagacgaataataacccatttcaagtgcccatcgaagagcaacgcggtgattatgacctcaatgccgtgaggctctgttttcaggtaactgttcgcgatcctagcggacgccctctccgcctcccgcctgttctttcacaccctatcttcgacaaccgagcccctaatacagccgagctaaagatctgtagggtgaaccgtaactcaggaagttgcttgggcggtgatgaaatcttcctcctttgcgataaagtccaaaaggaggatatcgaggtatactttacaggcccaggttgggaggcacgagggtccttcagccaggctgatgtgcatcggcaggtggcaatcgtcttccgaacgcccccttatgcggacccgtctcttcaggccccagtgagagtgagcatgcagcttcgaaggcccagcgatcgggaattgtctgagccgatggagttccaatacctgccagacacagatgataggcataggatcgaagagaagcgtaaaaggacttacgagacttttaagtctatcatgaaaaaaagcccctttagcgggccaactgatccgaggcctccgcctcgaagaatagctgtacccagccgcagcagcgcatcagtccctaaacctgctccgcagccatacccctttacctcttcactctccactatcaactacgacgagtttccaactatggtctttcccagcggacagatctcccaagcctccgccctggctccggctccccctcaggtacttcctcaggcccctgctcctgccccagcacctgctatggtctcggctcttgcgcaagccccagctcccgtgcccgtgctggcccctggaccgccacaggctgtggccccacccgctcctaaacctacccaggcaggcgaggggaccctttctgaggctctgctccagcttcagttcgacgatgaagaccttggagccttgctcggcaacagcactgacccagccgtcttcacagacctggcatcagtggacaactctgagttccagcagctgctgaaccagggcatccccgtcgccccacacactaccgagccaatgctcatggaatatcccgaagccatcaccagactggtcacgggtgcgcagagaccccctgaccccgctcctgcacctctgggtgcgcctggcctccccaacggccttctgtccggggacgaggacttctcctccattgcggacatggacttcagcgcgctccttagccaaatttcatcttag

SEQ ID NO: 210699 - DNA, 2700 bp, Artificial Sequence
  derived and/or modified sequence
tcttcgtcctcggcgaggcgcgcacttggccccgacccccggcagcggctgtgcgtgcagcctcttcgtcctccgcgcggcgtgcacttgctcccggcccctgcgccgggcggcggcggggcagcgcgcaggcgcggccggattccgggcagtgacgcgacggcgggccgcgcggcgcatttccgcctctggcgaatggctcgtctgtagtgcacgccgcgggcccagctgcgaccccggccccgcccccgggaccccggccatggacgaactgttccccctcatcttcccggcagagccagcccaggcctctggcccctatgtggagatcattgagcagcccaagcagcggggcatgcgcttccgctacaagtgcgaggggcgctccgcgggcagcatcccaggcgagaggagcacagataccaccaagacccaccccaccatcaagatcaatggctacacaggaccagggacagtgcgcatctccctggtcaccaaggaccctcctcaccggcctcacccccacgagcttgtaggaaaggactgccgggatggcttctatgaggctgagctctgcccggaccgctgcatccacagtttccagaacctgggaatccagtgtgtgaagaagcgggacctggagcaggctatcagtcagcgcatccagaccaacaacaaccccttccaagttcctatagaagagcagcgtggggactacgacctgaatgctgtgcggctctgcttccaggtgacagtgcgggacccatcaggcaggcccctccgcctgccgcctgtcctttctcatcccatctttgacaatcgtgcccccaacactgccgagctcaagatctgccgagtgaaccgaaactctggcagctgcctcggtggggatgagatcttcctactgtgtgacaaggtgcagaaagaggacattgaggtgtatttcacgggaccaggctgggaggcccgaggctccttttcgcaagctgatgtgcaccgacaagtggccattgtgttccggacccctccctacgcagaccccagcctgcaggctcctgtgcgtgtctccatgcagctgcggcggccttccgaccgggagctcagtgagcccatggaattccagtacctgccagatacagacgatcgtcaccggattgaggagaaacgtaaaaggacatatgagaccttcaagagcatcatgaagaagagtcctttcagcggacccaccgacccccggcctccacctcgacgcattgctgtgccttcccgcagctcagcttctgtccccaagccagcaccccagccctatccctttacgtcatccctgagcaccatcaactatgatgagtttcccaccatggtgtttccttctgggcagatcagccaggcctcggccttggccccggcccctccccaagtcctgccccaggctccagcccctgcccctgctccagccatggtatcagctctggcccaggccccagcccctgtcccagtcctagccccaggccctcctcaggctgtggccccacctgcccccaagcccacccaggctggggaaggaacgctgtcagaggccctgctgcagctgcagtttgatgatgaagacctgggggccttgcttggcaacagcacagacccagctgtgttcacagacctggcatccgtcgacaactccgagtttcagcagctgctgaaccagggcatacctgtggccccccacacaactgagcccatgctgatggagtaccctgaggctataactcgcctagtgacaggggcccagaggccccccgacccagctcctgctccactgggggccccggggctccccaatggcctcctttcaggagatgaagacttctcctccattgcggacatggacttctcagccctgctgagtcagatcagctcctaagggggtgacgcctgccctccccagagcactgggttgcaggggattgaagccctccaaaagcacttacggattctggtggggtgtgttccaactgcccccaactttgtggatgtcttccttggaggggggagccatattttattcttttattgtcagtatctgtatctctctctctttttggaggtgcttaagcagaagcattaacttctctggaaaggggggagctggggaaactcaaacttttcccctgtcctgatggtcagctcccttctctgtagggaactctggggtcccccatccccatcctccagcttctggtactctcctagagacagaagcaggctggaggtaaggcctttgagcccacaaagccttatcaagtgtcttccatcatggattcattacagcttaatcaaaataacgccccagataccagcccctgtatggcactggcattgtccctgtgcctaacaccagcgtttgaggggctggccttcctgccctacagaggtctctgccggctctttccttgctcaaccatggctgaaggaaaccagtgcaacagcactggctctctccaggatccagaaggggtttggtctgggacttccttgctctccctcttctcaagtgccttaatagtagggtaagttgttaagagtgggggagagcaggctggcagctctccagtcaggaggcatagtttttactgaacaatcaaagcacttggactcttgctctttctactctgaactaataaatctgttgccaagctggctaga

SEQ ID NO: 210700 - protein, 533 aa, Artificial Sequence
  derived and/or modified sequence
MSWAARPPFLPQRHAAGQCGPVGVRKEMHCGVASRWRRRRPWLDPAAAAAAAVAGGEQQTPEPEPGEAGRDGMGDSGRDSRSPDSSSPNPLPQGVPPPSPPGPPLPPSTAPSLGGSGAPPPPPMPPPPLGSPFPVISSSMGSPGLPPPAPPGFSGPVSSPQINSTVSLPGGGSGPPEDVKPPVLGVRGLHCPPPPGGPGAGKRLCAICGDRSSGKHYGVYSCEGCKGFFKRTIRKDLTYSCRDNKDCTVDKRQRNRCQYCRYQKCLATGMKREAVQEERQRGKDKDGDGEGAGGAPEEMPVDRILEAELAVEQKSDQGVEGPGGTGGSGSSPNDPVTNICQAADKQLFTLVEWAKRIPHFSSLPLDDQVILLRAGWNELLIASFSHRSIDVRDGILLATGLHVHRNSAHSAGVGAIFDRVLTELVSKMRDMRMDKTELGCLRAIILFNPDAKGLSNPSEVEVLREKVYASLETYCKQKYPEQQGRFAKLLLRLPALRSIGLKCLEHLFFFKLIGDTPIDTFLMEMLEAPHQLA

SEQ ID NO: 210701 - protein, 392 aa, Artificial Sequence
  derived and/or modified sequence
MGSPGLPPPAPPGFSGPVSSPQINSTVSLPGGGSGPPEDVKPPVLGVRGLHCPPPPGGPGAGKRLCAICGDRSSGKHYGVYSCEGCKGFFKRTIRKDLTYSCRDNKDCTVDKRQRNRCQYCRYQKCLATGMKREAVQEERQRGKDKDGDGEGAGGAPEEMPVDRILEAELAVEQKSDQGVEGPGGTGAPSPNDPVTNICQAADKQLFTLVEWAKRIPHFSSLPLDDQVILLRAGWNELLIASFSHRSIDVRDGILLATGLHVHRNSAHSAGVGAIFDRVLTELVSKMRDMRMDKTELGCLRAIILFNPDAKGLSNPSEVEVLREKVYASLETYCKQKYPEQQGRFAKLLLRLPALRSIGLKCLEHLFFFKLIGDTPIDTFLMEMLEAPHQLA

SEQ ID NO: 210702 - protein, 389 aa, Artificial Sequence
  derived and/or modified sequence
MGSPGLPPPAPPGFSGPVSSPQINSTVSLPGGGSGPPEDVKPPVLGVRGLHCPPPPGGPGAGKRLCAICGDRSSGKHYGVYSCEGCKGFFKRTIRKDLTYSCRDNKDCTVDKRQRNRCQYCRYQKCLATGMKREAVQEERQRGKDKDGDGEGAGGAPEEMPVDRILEAELAVEQKSDQGGSQHISKSPNDPVTNICQAADKQLFTLVEWAKRIPHFSSLPLDDQVILLRAGWNELLIASFSHRSIDVRDGILLATGLHVHRNSAHSAGVGAIFDRVLTELVSKMRDMRMDKTELGCLRAIILFNPDAKGLSNPSEVEVLREKVYASLETYCKQKYPEQQGRFAKLLLRLPALRSIGLKCLEHLFFFKLIGDTPIDTFLMEMLEAPHQLA

SEQ ID NO: 210703 - DNA, 2892 bp, Artificial Sequence
  derived and/or modified sequence
caaagatggctgccacattggcgctgtcattttggtactgagcagagcgacgggcttaattcgacccaatccaggccagagtctttctctcaggggcttcctcgtgctcagctaatcctccgatcaatccttgggaatccctgggacctcttcggtatccctactctcagccagggatcatgtcttgggccgctcgcccgcccttcctccctcagcggcatgccgcagggcagtgtgggccggtgggggtgcgaaaagaaatgcattgtggggtcgcgtcccggtggcggcggcgacggccctggctggatcccgcagcggcggcggcggcggcggtggcaggcggagaacaacaaaccccggagccggagccaggggaggctggacgggacgggatgggcgacagcgggcgggactcccgaagcccagacagctcctccccaaatccccttccccagggagtccctcccccttctcctcctgggccacccctacccccttcaacagctccatcccttggaggctctggggccccacccccacccccgatgccaccacccccactgggctctccctttccagtcatcagttcttccatggggtcccctggtctgccccctccagctcccccaggattctccgggcctgtcagcagcccccagattaactcaacagtgtcactccctgggggtgggtctggcccccctgaagatgtgaagccaccagtcttaggggtccggggcctgcactgtccaccccctccaggtggccctggggctggcaaacggctatgtgcaatctgcggggacagaagctcaggcaaacactacggggtttacagctgtgagggttgcaagggcttcttcaaacgcaccatccgcaaagaccttacatactcttgccgggacaacaaagactgcacagtggacaagcgccagcggaaccgctgtcagtactgccgctatcagaagtgcctggccactggcatgaagagggaggcggtacaggaggagcgtcagcggggaaaggacaaggatggggatggggagggggctgggggagcccccgaggagatgcctgtggacaggatcctggaggcagagcttgctgtggaacagaagagtgaccagggcgttgagggtcctgggggaaccgggggtagcggcagcagcccaaatgaccctgtgactaacatctgtcaggcagctgacaaacagctattcacgcttgttgagtgggcgaagaggatcccacacttttcctccttgcctctggatgatcaggtcatattgctgcgggcaggctggaatgaactcctcattgcctccttctcacaccgatccattgatgttcgagatggcatcctccttgccacaggtcttcacgtgcaccgcaactcagcccattcagcaggagtaggagccatctttgatcgggtgctgacagagctagtgtccaaaatgcgtgacatgaggatggacaagacagagcttggctgcctgagggcaatcattctgtttaatccagatgccaagggcctctccaaccctagtgaggtggaggtcctgcgggagaaagtgtatgcatcactggagacctactgcaaacagaagtaccctgagcagcagggacggtttgccaagctgctgctacgtcttcctgccctccggtccattggccttaagtgtctagagcatctgtttttcttcaagctcattggtgacacccccatcgacaccttcctcatggagatgcttgaggctccccatcaactggcctgagctcagacccagacgtggtgcttctcacactggaggagcacacatccaagagggactccaagccctggggcagggtggggggccatgttcccagaaccttgatggggtgagaagtacagggcagaaccaagaacataaaccctccaagggatctgcttgatatcccaagttggaagggaccccagatacctgtgaggactggttgtctctcttcggtggccttgagtctctgaatttgtcgggttctcccatgatttggggtgatttctcaccctctgtccttcccccagcacaaagcactggccttgcctccaggaccttgcttccttctcatcttgcctcattttgcttcccatctgaagagtggaaatggggaactcccccagaggtggatactggggggcaggcctcccaagctgatggacatgagagtagggccctgacaggccttcctcctctcaaacctggcagatgggggcctctctggaagagggaggggccctgtcactgtccagagtctctttttacacttcacctccttctgcagtcagactgaaatataaaaaaggtggtggtggtggtgaaggggctggtggagatgtaggaaccgatctgctatttttaatttcctgtgaggatagagacttgcagttagactcaaagaagtactgtactttcccaggttgactaagaaatgccagtggtggaggtgggtgtttgggaaaggcagggccctgaaatggcctgtccctagggctctccaagcactagccttcccagcttcccgccgccccccctatctcttcctgtctaacttggggaaggggcctgggctgtgaggacagggcccccacaggggatggtttcacgagtgtagtcccggaggccttccctttacagctctcctccagccctgggcacatagcataggctggggacacaggatcctggcctgagaattgaggggaggtggccagcccgcagaggtggggtgctggggctgcatgatttttgccctgcgtcccttctctttggggctcctttcccctctcatacataaaatcgctttcaaattaaaatcgctgttttctggaaaaaaaaaaaaaaaaaa

SEQ ID NO: 210704 - DNA, 1602 bp, Artificial Sequence
  derived and/or modified sequence
atgtcgtgggctgctcgccccccctttcttccacagcgacacgccgcaggccaatgtggacctgtgggtgttcgcaaggaaatgcactgcggcgtggccagccggtggcggaggcggcggccttggcttgaccctgcggctgccgccgcggcagcagtggctggcggcgagcagcaaactcctgagccagagcccggagaagctggcagagacggaatgggggactccgggcgggattcccgctcgccagattctagttcacctaatcctttgccacagggagtacccccccccagtccgccaggcccacccctcccaccgtccactgccccatccttaggcggttcaggcgctcctccccccccccctatgcccccccccccgttgggcagtccctttcccgtgatctccagtagtatggggagtccagggctgcctcctccagccccccctggtttctccggccctgtatctagcccacagatcaatagcacggtaagcctgcccggcgggggttctggcccccccgaggacgtgaagcctccagttctgggagtgcggggtctgcactgtcccccacccccgggagggcccggtgccggcaagcgtttgtgcgcgatatgcggagaccggagcagcggcaaacactatggggtgtacagctgtgagggttgcaaagggttcttcaagaggaccattcgaaaggatctaacttactcttgtagggacaacaaggattgtacagtggacaagcggcaacgcaaccggtgccaatactgtcgttatcagaagtgcctcgccactggaatgaagagggaggcagtccaggaagaacgccaaagagggaaagataaggacggagatggcgagggggccggaggcgccccagaggagatgcccgtggaccgaatcctggaggccgagctagcagtcgaacagaaatccgatcaaggcgtggaggggccaggtggtactggtggctcaggttcatccccaaatgacccggttaccaatatatgccaggctgccgacaaacaactgttcacgctcgtcgagtgggccaaaagaattccccacttttcttccctccccctggatgaccaggtcatactgctccgggcaggttggaatgagctgctgatcgcttccttcagccatcgttctatcgatgtacgagacggtatattgctggctacagggctccacgtccacaggaattctgcacattcagcaggagtaggggctatctttgatcgggtgctgacagagctcgtctctaagatgcgggatatgcgaatggataagactgaacttggatgcctgcgtgccatcattctgttcaatcccgacgcgaagggcctgagtaacccttccgaagtggaggtgctaagggagaaggtctacgcgtctttagagacttattgtaaacaaaaatatcccgagcaacaaggccgattcgccaaactgctgttacggctgcccgcgctgcgttcaattggactcaaatgtctggagcatctgttcttctttaagctgattggagatacccccattgacacctttttaatggagatgctggaagctccacatcagctcgcctag

SEQ ID NO: 210705 - DNA, 1602 bp, Artificial Sequence
  derived and/or modified sequence
atgtcttgggccgcacgccccccttttctaccccaacgccacgctgctggacagtgcgggccagtcggggttaggaaagagatgcattgcggggtcgccagcaggtggaggagacgccgaccttggctcgacccagccgcagccgcagcagcagcagtggcgggtggagagcaacagactcctgagcctgagcccggcgaagccggcagagatggaatgggcgattcaggacgggattctcgctctcccgattcctcaagcccaaaccctctcccccagggggtccccccaccaagtcccccgggaccacctttgcccccgagcaccgcccctagcctcggagggtctggggccccgcctccaccccctatgcccccccctcccttaggctctccatttcccgtgattagctcatctatgggtagccctgggctgccaccacctgcaccacctggcttttcaggcccagttagctcccctcagattaattctacggtttctctccctggcggcggatcaggtcctcccgaggacgtgaaaccccctgtactgggagtgcgggggctgcattgtcctcccccgcccggaggccctggcgctggcaaacgtctgtgcgctatatgtggggacagatcatcaggtaaacattacggagtgtactcctgcgaagggtgtaaaggcttcttcaaacgtaccatccggaaagatttaacatatagctgtcgagataacaaagactgcaccgtcgacaaaaggcaaagaaaccgctgccagtactgcaggtaccaaaaatgcctagccactgggatgaaaagggaggcagtgcaagaggagcgacaacgcggcaaagacaaggatggagacggagaaggagccggcggcgctccggaagagatgcctgtggatagaatcttggaagctgaacttgctgtggaacagaaaagtgatcagggggtcgagggacctggaggcacagggggctccggctcaagcccaaacgacccagtgacaaacatttgtcaggctgcggacaagcagttatttactctggttgaatgggccaaaaggatcccacacttttcttctctgcctctggacgatcaggtaatcctattacgagctgggtggaatgagctgctgattgcttccttctcacaccgtagcatcgacgtgagggacggaatactcttggctacaggactgcatgtccaccgcaatagtgcacattccgccggtgtcggggccatcttcgatcgtgtactgaccgagctcgtgagtaagatgagggacatgcggatggacaaaactgagcttgggtgtttgcgtgccatcatattgttcaacccagacgcaaaagggctgtccaacccctccgaggtcgaagtcttgcgcgaaaaagtgtatgcaagcttggagacctactgcaagcaaaaatacccagaacaacagggtcgctttgcaaagcttctcctccggctcccagccctgagaagtattgggcttaaatgtttggaacacttgttcttcttcaaactaataggggacacccccatagacactttcctgatggaaatgcttgaggcgccccatcagttagcctag

SEQ ID NO: 210706 - DNA, 1602 bp, Artificial Sequence
  derived and/or modified sequence
atgtcgtgggccgcgaggcctccattcctcccacagcgccacgcagcgggacaatgtggtccagtcggagtgaggaaggagatgcattgcggcgtcgcatcccggtggaggaggcgacggccttggcttgacccggctgccgcggccgccgcggctgtggccgggggcgagcagcagacccccgaaccagagccgggtgaggcaggccgggatggaatgggtgattccggccgggattcccggtccccagactcctcttctccgaacccattgccccaaggcgtaccaccaccctctccgcccggacctccattgcccccttccacagcacctagccttggtgggtctggcgctccgccgcctccacccatgccgcctcctccactgggaagtccatttcctgtgatctcaagttcaatgggctctcctggcctgccaccccctgctccaccaggcttttctggccctgtgagctccccccagatcaatagcactgtgtcgctgccaggtggtggatcagggcccccagaggatgttaagccaccagtactgggcgtaagaggccttcactgtccccccccaccaggggggcccggggccgggaagcgcctctgtgccatttgtggtgatcgctcctccggcaaacattacggcgtctattcttgcgaagggtgtaaagggtttttcaagaggacaatacgaaaggatctcacgtatagttgtcgggacaacaaagattgcaccgtcgataagcgacagcgtaaccgctgccagtactgccgctatcaaaaatgcctggctacggggatgaaaagggaggctgtgcaggaagagcggcagcggggaaaagataaggatggcgacggggagggcgccggtggcgcacctgaggaaatgccggtggatagaatcttggaggctgaattagcggttgaacagaaatccgaccaaggagtggagggaccaggcggtaccggagggtccggatcctccccaaacgatcctgtaacaaacatttgtcaagctgcagacaagcagctgtttacattggtggagtgggccaagcgcattccccatttctcctctctcccgctggatgatcaagtgatcttactgagggccggttggaacgagttactgattgcatcgttttcccatcgtagcatcgacgtaagagacgggatactgctcgccacaggcctacatgtccaccggaatagcgcccatagtgcaggtgtcggagcaatctttgacagagtgctgactgagctggtttctaagatgcgagatatgcggatggacaaaacagagctcggatgcctgcgcgcaattatcctgttcaatcctgatgcgaagggcctctccaacccaagcgaggttgaggtactacgagaaaaagtatacgcttcccttgagacttattgtaagcagaagtatccagaacagcagggcaggtttgccaaattgctcttgcgcctacctgccctgcggtcaataggccttaagtgccttgagcatcttttcttctttaaactgatcggcgacaccccaatcgatactttcctcatggagatgctggaagcgccacatcagctagcctag

SEQ ID NO: 210707 - DNA, 1602 bp, Artificial Sequence
  derived and/or modified sequence
atgagctgggcagccagacctcccttcctgccacagagacacgccgctgggcagtgcgggccagttggcgtgcgaaaagagatgcactgtggagtggccagcagatggaggcgaaggcgtccctggctagaccccgctgcagcagccgctgccgcagtggcaggcggagagcagcagacccccgaacctgagcccggggaagccggccgagatggtatgggagatagtggacgggacagtcggtctccggacagctcctctcctaatccgctgccacagggggtgccccctccgagcccccctgggccacctctgcctcccagcacggctccttcattggggggaagcggcgcgcctccaccaccgccaatgccgccacctccgctggggagcccattccccgtgatctcctcttctatgggaagtccgggtctccccccccctgccccacccgggttctcgggaccagttagttccccccaaatcaattcgacggtgtctcttccaggtggcggaagcgggccacccgaggacgtaaagccccccgtccttggtgtgagaggactccactgtccacccccaccgggaggaccgggcgcaggaaaaaggctgtgtgccatatgcggggataggtcttcagggaagcattatggggtgtactcctgtgaaggctgcaagggtttctttaaacgcacaattaggaaagacctcacttattcttgccgcgacaataaggattgcaccgttgacaaacgccaaagaaacaggtgtcaatactgtaggtatcagaaatgcttagctaccgggatgaagcgtgaggccgtgcaggaggaacggcagcgggggaaagacaaagatggagacggggaaggggccggaggagcgcctgaagagatgcccgtggaccgcatcctggaagctgagttggctgttgaacagaagtccgatcaaggcgttgagggccctggtggcactggtggtagtggaagttcccccaatgatcccgtgactaacatctgccaggccgcagacaaacagctattcactctcgtggaatgggctaagcggataccccactttagctctctgcccctcgacgatcaggttattctcctgagggccggttggaatgagcttcttatagctagcttctctcaccgaagcattgatgttcgcgatggtatcctgctagccacgggcctgcacgtgcacagaaattcggcgcattcagctggagtcggtgcaatctttgaccgcgtgcttacagagctggtgtccaagatgagagatatgagaatggacaaaactgagttaggttgcctaagggcaattattctgttcaaccccgacgccaagggtctgagtaacccttctgaggtagaggtgcttcgggaaaaggtgtatgcatccctggaaacttactgcaagcaaaagtatcctgagcaacagggtcgattcgccaagctattattacggttgcctgctctgagaagcatcggcctcaaatgtctggaacacctctttttcttcaagctgatcggagacacaccaatcgacacattcctaatggagatgcttgaagccccccaccagttagcatag

SEQ ID NO: 210708 - DNA, 1602 bp, Artificial Sequence
  derived and/or modified sequence
atgtcatgggcggcacgtccacctttcttgcctcagcgccatgccgcgggacaatgcggacctgtgggcgtcagaaaagagatgcactgcggagtagcttcccgttggcgcaggcgtaggccatggctcgacccagctgccgccgccgccgcagcggttgccgggggagagcagcaaacgcctgaaccagaaccaggagaggccgggcgcgatggaatgggggactccggaagggactcccgctcacccgatagtagtagccccaatcccctcccacagggggtcccgcccccatcgcctccaggacctcccctgcctcccagcactgcgccttccttaggtggatctggggccccccctcctcctcctatgcctccgccacccttaggttcccctttcccagtaatctccagcagcatgggcagtccaggacttcccccccctgcccctcccggctttagcgggcctgtgtcttctcctcagatcaacagcactgtgtctctgcccggggggggttcaggacctcccgaagatgtgaagcccccggtcctcggtgtacgcggactacactgcccacccccacctggcggaccaggggccggcaagcggctgtgtgccatttgtggtgaccgctcctccggtaagcactatggcgtgtactcttgtgaggggtgtaaaggcttttttaaaagaacaatccggaaagacctgacttacagctgccgggacaataaagactgtactgttgacaaaaggcagcgcaataggtgccagtattgtcggtatcagaagtgtctggccacaggaatgaagagagaggcagtgcaagaagagcggcagagagggaaggacaaggatggcgacggtgagggggccggcggggcccctgaagagatgccagtggaccggatactcgaagccgagctggctgtcgagcagaaaagcgatcaaggagttgagggaccaggaggtacaggcggctcaggatccagccccaacgatccggtcaccaatatttgccaggctgcagacaaacagctctttaccttggtcgaatgggccaagcggattccacacttctccagtttaccccttgacgatcaggtgatcctgctgagggcaggttggaacgaattgctaatcgcgtcttttagccataggtcaatcgacgtgcgcgacggtatccttctcgctacaggtctgcacgtccaccgcaacagcgcccacagcgcaggagttggggctatcttcgatagggtgttgacagagctcgtatccaagatgagggacatgcgcatggataaaacagaactgggctgcctgcgcgcaattattctgttcaaccccgacgccaaagggttaagcaacccttccgaggtcgaggtcctaagggagaaagtgtatgctagtcttgagacatactgtaagcagaagtacccggagcagcaggggaggttcgctaaattgcttctacggctaccagcccttagaagcatcggattaaagtgcctcgagcacttgttttttttcaagttaattggagacacacctatcgacacgttcctcatggaaatgttggaggccccccatcagctggcctag

SEQ ID NO: 210709 - DNA, 1602 bp, Artificial Sequence
  derived and/or modified sequence
atgtcttgggcagcccgacctccatttctccctcaacgtcacgccgctggtcagtgcggcccagtaggggttaggaaagagatgcactgcggagtcgccagccgctggagacgcagacgcccctggctggaccccgcagctgcagctgctgctgctgtggcagggggagaacaacagaccccggagcccgagcccggggaggctgggagagacggcatgggggacagcggacgggactctcgctcccccgactccagcagtcccaatccccttccccagggcgtgcctcccccatccccccctggacctcccctgccaccttcaacagccccttcccttggaggttctggagccccccccccccctcccatgccacctccccctctcggctctcctttccccgtcatatcatcttcgatgggcagcccaggccttcctccgccagcaccgcccgggttctcaggccctgtttcttctccgcaaatcaattctaccgtgtccctgcctgggggcggatctggccccccagaggatgttaagcccccagttcttggggtgcgcggtctccactgcccccctcctcctggcggacccggcgccggcaagaggctctgcgcaatttgtggagacagaagctcggggaagcactacggtgtgtacagctgtgagggttgtaagggcttttttaagcgaacgatcagaaaggatttgacctattcatgcagagacaataaagactgcaccgtcgataaacgtcagcgcaatagatgccagtactgccggtaccagaagtgccttgcgactgggatgaagcgcgaggctgtgcaggaagaacgccaacgagggaaggacaaagacggagatggcgagggcgcaggaggcgcgcccgaggaaatgcctgtggacaggattttagaggcagagttggcggtggagcagaaaagtgaccagggagtcgaggggcccggaggcacgggcgggtcaggaagctcacccaacgaccctgtaacgaacatctgccaggctgccgacaaacagttgttcactctagtagaatgggccaaacgcattccccacttttccagcctcccactggacgatcaggttatccttcttagagccggatggaatgagctactgattgcaagcttctcgcaccgaagcatagatgtaagggacgggattctgttggctacaggcctgcatgtgcatcgaaactcagctcactctgccggggtcggggcaattttcgaccgcgttctaacggagttagtgtctaagatgcgagatatgcggatggacaaaactgaactcggatgtttacgcgccatcatcctttttaaccctgacgctaaaggattgtctaatccatccgaggtcgaggtgctgcgtgaaaaagtctatgcatctttagaaacttactgtaagcagaaatatcctgagcagcaaggtcgattcgccaagcttttactgcggctgcccgctctgagatccataggcttgaagtgtcttgagcacctgttcttctttaagcttataggcgataccccaattgatacattcctgatggagatgttggaggcaccgcaccaactcgcctag

SEQ ID NO: 210710 - DNA, 1179 bp, Artificial Sequence
  derived and/or modified sequence
atgggttctcctggcctcccacctcctgcccctcctggcttctctgggccagtatccagccctcagattaacagcactgtttcactcccaggcggaggaagtggccccccagaggacgtcaaaccccctgtccttggcgtccgcggccttcattgcccgcctccacccggtggccccggcgccggcaagcgcttgtgtgccatatgcggagatcggtctagtggtaagcactacggggtatattcttgtgaagggtgcaagggattctttaaaagaacgattcgcaaggatctgacctacagctgcagggataataaagattgtactgtggacaagaggcagagaaacaggtgccagtactgcaggtatcagaagtgcctagctacaggcatgaaacgcgaagctgtgcaggaggaaaggcagagaggcaaggacaaggatggagacggagagggagccggtggtgcccccgaggagatgccggttgacaggattttagaggcagaattagccgtggagcagaagtctgaccagggcgtggagggtcccggcgggaccggagccccatcgcccaacgacccagtgactaacatctgccaggctgcggataagcagctgtttaccctcgtggagtgggccaaacgtattccacacttcagtagtctgcccttagatgatcaggtcatattactgcgagctggctggaatgaactgctgatagcatccttctctcataggtcaatcgacgtgcgcgatggaatcctactggccactggactccacgttcataggaatagtgctcactcagctggcgttggggcaatttttgatcgtgtcctaacagaactggtctctaagatgagagacatgagaatggacaaaactgagttgggttgcctcagggcaattatccttttcaaccccgacgctaagggcctttctaacccatctgaagtggaagtgcttcgcgagaaggtttatgcttccctcgaaacctactgtaagcagaagtatcctgaacagcaaggaaggtttgcaaaattactactgcggttgcctgcgttacggagtatcggactgaagtgtctcgagcacttgtttttcttcaagctgatcggagacactccaatcgacacattcctaatggaaatgctcgaggcgcctcaccagttagcgtag

SEQ ID NO: 210711 - DNA, 1170 bp, Artificial Sequence
  derived and/or modified sequence
atgggctctccagggcttccgccccccgccccgccagggttctcgggaccagtttctagcccgcagatcaactcaaccgtatcgctacctgggggcgggtccggacctcccgaggacgtgaagcctcctgttcttggcgttcgggggctccattgcccaccccccccaggagggcctggcgcgggtaagaggttgtgcgcaatttgtggcgaccggagcagcggaaagcattatggcgtctattcttgtgaggggtgcaaaggatttttcaaaagaactattcgtaaagatctcacctactcctgtcgggataacaaggattgcacggtggataagagacagaggaatcgctgccaatactgccgctatcagaaatgcctggcgactggcatgaagagggaggccgtgcaggaggaaagacagcgagggaaagataaggacggtgatggcgaaggggcaggaggcgcacctgaggaaatgccagtggatcgaatccttgaggctgaattggccgtcgagcagaagagtgaccaagggggctctcagcatatttcgaaatctcctaatgatcctgtcactaatatctgtcaagctgcggataaacagttgttcaccttggttgagtgggctaaacgtattccacatttttcctccctccctcttgacgaccaggtgatcttgcttcgggcaggttggaacgagctgctgatagcttcttttagtcaccgctcgattgacgtgcgcgacggaattctgttagctactggtctccacgtccaccgtaactcagcacactccgcaggcgtgggggctatcttcgaccgagtcctgaccgagcttgtttccaagatgagagatatgcgaatggacaaaacagaactcggctgtttacgggctatcattctatttaaccccgatgccaaaggcttaagcaacccatccgaggtcgaagtgttacgcgaaaaggtgtacgcctcattggaaacatattgtaaacaaaagtatccggagcaacaaggcagatttgctaagctgctgctaaggctgcctgctttgaggtccattggtctcaagtgtctggagcacctgttcttcttcaagctcatcggcgatacccccattgatacctttctgatggagatgctggaagcgcctcatcagctggcctag

SEQ ID NO: 210712 - DNA, 1179 bp, Artificial Sequence
  derived and/or modified sequence
atgggcagcccaggtctgccaccccccgctccccccgggttttccgggcccgtcagctcaccccagataaattcaacagtgtcgctgccaggcgggggcagtggcccccctgaagacgtaaaacctccagtcttgggggtacgtgggctgcactgccctcctcccccaggagggcctggagccggcaagaggttgtgcgcgatttgtggagaccggtcttctggaaagcactacggtgtatacagctgtgaagggtgtaagggcttcttcaaaaggaccatccggaaagacttgacctattcttgccgggataataaagattgtacagttgataaacgccagcgaaatagatgtcagtactgcaggtatcaaaaatgccttgcaaccggcatgaagcgggaagctgtgcaggaggaacgacagagaggaaaagataaagatggggacggagaaggcgccggcggagcgcccgaagaaatgccagtcgaccggatccttgaggctgagctggcggtggaacagaagtccgaccagggtgtggagggcccaggaggaacaggtgccccgtcgcccaacgatccagttactaatatttgccaggctgcagacaagcagttattcacgttggtggagtgggcaaaacgtatcccccacttctcaagcttacctcttgacgaccaggtgattctgctccgggcaggctggaatgaattgctgatcgcttcattctcccacagaagtatagacgtgagggacgggatcctactcgcaacaggactgcacgtccataggaacagcgcacattctgccggggtcggcgcaatcttcgacagagtcttgaccgagctcgtgtcaaaaatgcgggatatgcggatggataagacagaattggggtgtttacgggccattatcctgttcaaccccgatgcgaaaggactcagcaatcctagcgaggtggaggtgctgagggagaaagtgtatgcatccctggagacctactgcaaacagaagtaccctgagcagcagggccgctttgccaagcttctgcttaggcttcctgcactgcgctctattggtcttaagtgtctcgaacacttgttcttttttaaactgataggagacacccccatcgataccttcctcatggagatgctggaagctccccaccaactggcatag

SEQ ID NO: 210713 - DNA, 1170 bp, Artificial Sequence
  derived and/or modified sequence
atgggaagccccgggctgccacctcccgctccgcccggattcagcggacctgtgagctctccacagatcaactcaactgtgtctctgccagggggcggatccgggcccccggaggatgtgaagccacccgtgttaggcgtgaggggcctgcattgtcccccgccccccggaggccctggcgctggaaaacggttatgtgcgatttgcggggacaggtcaagcggcaaacattacggggtttactcttgcgagggctgcaagggcttcttcaagaggacgatccgcaaggaccttacatattcctgtcgcgacaataaggactgtactgtggacaagcgccagagaaacaggtgccagtattgccggtatcagaaatgcctcgcaaccggcatgaagagagaagcagtgcaggaagaaaggcagagggggaaggacaaagacggtgacggtgagggcgcggggggcgcaccagaggaaatgcccgttgaccgcatcctagaggctgagctggcggtcgaacaaaagtccgatcagggcggaagtcagcacatttccaagagcccgaatgatcccgtgacaaacatttgtcaggccgccgataagcagctgttcaccctggttgagtgggcgaagcggatacctcatttttcctctctaccgttagacgaccaggtgattttgctgcgggcaggatggaacgagctcctgattgcttctttttcacaccgtagcatcgatgttagggacggtatcttgctcgctacaggcctgcacgttcacagaaacagcgctcactctgccggcgtgggggccatcttcgaccgtgtgctgacagaactagtgagtaagatgcgcgatatgcggatggacaaaactgagcttgggtgtctgcgtgccataatccttttcaaccccgatgctaagggactcagtaatccttcagaagttgaagtactgcgcgagaaagtgtacgcatcgctagagacctactgcaagcagaagtatcctgagcagcagggacgcttcgccaagctcttgctgcggctgccggccttgcgcagcattgggctgaaatgtctagagcacctcttttttttcaaactgattggggacactcctattgacacatttttgatggagatgttggaagcccctcaccaattagcctag

SEQ ID NO: 210714 - DNA, 1170 bp, Artificial Sequence
  derived and/or modified sequence
atgggcagccctgggcttccccccccagcccccccgggattttctggcccagtctcctccccccagataaactccacagtatctttgcccggaggcggttcaggcccgccagaagacgtgaaaccaccagttctgggggtgaggggattgcactgccccccacccccaggcggccccggggcaggtaagcgtctgtgcgccatttgcggagaccgctcatctggcaaacattacggagtgtacagttgcgaggggtgcaaggggtttttcaagcgaacgatccgtaaagacctgacttactcttgccgggacaataaagactgcacagtcgataagagacagcgcaatcgatgtcaatattgccggtaccagaaatgtctggccactggcatgaaaagggaagcagtacaagaggagcggcagcgtggcaaggacaaggacggggacggcgagggcgccggcggagcacccgaagaaatgcctgtcgatcgtattctggaagctgagctggcagtggagcagaaatctgatcaggggggaagccaacacatttctaagtccccgaacgaccccgtaactaacatttgtcaggcggccgacaaacagttattcactctggtagagtgggctaaacgaattccccacttttctagcctgccccttgatgatcaggtgattctcctgagagccggctggaatgaacttttaatagcctcattctcccatagatcaatcgatgtgagggacgggattctactggccacaggcctacatgtccacaggaactccgcgcactctgcgggagtgggggctatctttgacagggtgcttactgagttagtgagtaagatgcgcgacatgagaatggataagacagaactgggatgccttcgcgccatcattctcttcaaccctgatgccaaagggctctccaacccatctgaggtggaagtcctgcgggagaaagtgtatgcctcactggaaacctactgtaaacagaaataccccgaacagcagggacggttcgccaagttgctgctgcggctgcccgccttgcggtccataggcttaaagtgtttggagcacctttttttttttaagctcataggagacacgccgattgatacattcctgatggagatgctggaggccccacatcagctcgcctag

SEQ ID NO: 210715 - DNA, 1179 bp, Artificial Sequence
  derived and/or modified sequence
atgggcagtcccggcttaccccctcccgcacccccgggctttagcggcccagtgtctagtcctcagataaacagcactgtgtcattgcctgggggcggctctggtcctccagaggatgtgaagcctcccgtgctgggcgttcgaggtctgcattgtcctcctcctccagggggtccaggcgccggtaaacgattgtgcgcaatctgcggggacagaagttcgggcaaacattacggggtatacagctgtgaaggatgtaaaggctttttcaaaagaacgatccgcaaggatctgacctatagttgtagagacaataaggactgcaccgtggacaaaaggcaacgcaatcggtgtcaatactgtagataccagaagtgtcttgctacagggatgaaaagggaggccgttcaggaagagcgacagagaggcaaggacaaagacggagacggagaaggcgcagggggagccccagaagaaatgccagtggatcgcatcctggaggccgaattagccgtcgaacagaagtcggatcagggcgtcgagggaccaggggggaccggggcgccctctccaaacgacccagtgaccaatatctgtcaggctgcagacaaacagctcttcacgctggtggagtgggcaaaacggatccctcatttcagttccctcccactagatgatcaggtgatactgctgcgggccggttggaacgaacttctcatagcttctttttctcaccggtcaatcgatgtgagggacgggatcctactggctacaggccttcacgtgcatcgcaattctgcccactctgccggcgtcggcgcaatcttcgaccgggtgcttaccgagctggtctcgaaaatgcgcgacatgcggatggataaaaccgagctcggctgtctgagggctattatcctgttcaacccagatgccaaggggctttcgaacccaagcgaagtggaggttctgagagaaaaggtctatgcttcgctagaaacttattgcaagcaaaaataccccgagcagcaggggagattcgcgaagctactgctgcgactacctgcccttcggagcatcgggctcaagtgtctggagcatctgttcttttttaagctcatcggggacactcccatagatacttttttaatggagatgctcgaggccccccatcagctcgcctag

SEQ ID NO: 210716 - DNA, 1179 bp, Artificial Sequence
  derived and/or modified sequence
atgggcagccccgggttaccacccccagcacctccaggtttcagcgggcctgttagttcaccccagatcaatagcacagtcagcctgcctggagggggaagcggaccaccagaagacgtgaaacctccagtccttggcgttcggggcttacactgccctccacccccgggaggaccaggagccggaaaacgcctgtgcgcaatctgcggcgataggagtagtgggaaacattatggcgtttactcttgtgagggatgtaaggggttctttaaacgcacgattcgcaaggacctcacatattcctgcagagacaacaaagattgcaccgttgacaaaagacaaagaaacagatgtcaatattgcagataccagaagtgcctagctaccggcatgaagagggaggcagtgcaagaagagaggcagaggggcaaggataaggacggggatggcgagggggccgggggggccccagaggagatgccagtggaccgcatcctggaggcggaattggctgtggagcagaaaagtgaccagggcgtggagggaccaggtggcactggggccccgtcacctaatgaccccgtcacaaacatatgccaagctgccgataagcagctttttaccctggtagagtgggccaagaggataccccatttttccagtctgcctctggacgatcaggtcattcttctcagagccggatggaacgagctgctgatagccagcttctctcaccggtctatcgatgtccgggacggaatcctgctcgcaacaggcctgcacgtgcatagaaactccgcgcacagcgcgggtgtcggcgccatctttgatagggtccttaccgagctggtctccaagatgcgcgacatgcgaatggacaagactgagctggggtgccttcgtgcaataatactgttcaaccccgacgccaaagggttgtcgaatccaagcgaggtggaggtgctgagggaaaaggtgtatgcttctctcgagacttattgcaaacagaagtaccctgaacagcaggggcggtttgctaaactactgttgcggctcccggccctccggagtatcggactcaaatgcctcgaacatctcttttttttcaagttaattggggacacgcctatcgatacctttctcatggaaatgctcgaagccccccaccagttggcttag

SEQ ID NO: 210717 - DNA, 1179 bp, Artificial Sequence
  derived and/or modified sequence
atgggaagtccaggcctaccccctccagccccccccgggttctcaggccctgtgtcctcaccccaaattaactctaccgtaagcctgcccggagggggttcagggccgccagaggacgtgaagccccctgtgctcggcgtaagaggcctgcactgtcctcccccacccggcggacccggcgctggaaagcgcttgtgtgccatttgcggtgaccgcagctcagggaaacactacggtgtgtacagctgtgagggctgcaagggattcttcaagaggacgatcagaaaggatctaacatattcctgccgtgataacaaggactgtacagttgataagcgccaacgcaataggtgtcagtattgccgctatcagaagtgcctggctactggtatgaagcgcgaggcagtgcaggaagaaaggcagcgcggcaaggacaaggacggcgacggggagggggcaggcggcgccccagaagagatgccagtggatcggatcctcgaggctgaactcgccgttgaacagaagtcagaccagggtgtggaaggacccggagggaccggcgcgcccagccccaatgatcctgtgacgaacatttgtcaggccgccgacaagcaattattcacgctggttgaatgggccaagcggatacctcacttttcctctctccctctggacgaccaggtcatcctgttgcgcgcaggctggaatgagctgctgattgcctctttctcacacagatcaatcgatgtccgcgatggaatcctgctggccacgggtcttcacgtgcacaggaattccgcacattcagccggcgtgggagccatctttgaccgggtgctgacagagctagtttccaagatgcgagacatgaggatggataagacagaactgggctgtttgcgagctatcattctgttcaacccagacgcaaagggcctgagcaacccttctgaagtggaagtgctgcgtgaaaaagtctacgctagcttagaaacttactgtaagcagaagtatccagaacagcaggggagattcgctaagctactccttcggttgcctgccctgcggagtattggccttaaatgtctcgagcacctttttttcttcaagctgatcggtgatacacctatcgacaccttcttgatggaaatgctcgaggccccccaccagctagcctag

SEQ ID NO: 210718 - DNA, 1170 bp, Artificial Sequence
  derived and/or modified sequence
atggggtctcctggactgccccctccagccccacctggtttctccggtccggtgtccagtccccagatcaactctacagtgagcctgcctggcggcgggtcggggcctccggaagatgttaaaccccccgtgctcggcgtgagaggcttgcactgtccccccccacccggaggcccgggagccggcaagcggctatgcgccatctgtggggataggagtagtgggaagcactatggtgtttactcctgcgaagggtgtaaaggattctttaagagaacaatccgcaaagatctgacctacagctgtcgggacaataaagactgtacagtagataaacgtcagagaaaccgatgccagtactgtaggtaccagaaatgtctggctaccggaatgaaacgcgaggccgttcaggaagagagacagaggggcaaagataaggacggggatggcgaaggcgccggaggggcccctgaggagatgccagttgacaggattttggaagccgagctggctgtggagcagaagtcagaccagggagggtcacagcatattagcaagagtcccaatgatcccgtcaccaatatctgccaggcagccgacaaacagctcttcacattggtggagtgggccaagcgcatcccccactttagctctctgccgctggacgaccaggtgatcttgctgagagcgggctggaatgaattactgatcgcaagtttcagccaccgctccattgatgtgagggatggcattctgttggccacagggctccacgtgcaccgaaactcagctcattccgcgggcgtgggggccatttttgacagggtcctgacagaactggtgagtaaaatgcgcgatatgagaatggacaaaacagagttaggctgtttgagggccataattctgttcaatcctgacgccaaaggccttagcaacccttctgaggtcgaggtgctcagggaaaaggtgtatgcttccctggaaacatactgcaagcaaaagtacccggaacagcagggaaggtttgcaaagctgctgctccgacttcccgcactgcgcagcatcggcctcaagtgtctggaacatctgttctttttcaagcttatcggggacacccccatcgacacattcctgatggagatgctcgaggccccacatcagctcgcttag

SEQ ID NO: 210719 - DNA, 1170 bp, Artificial Sequence
  derived and/or modified sequence
atgggttcacctggcctgcctcctcccgccccacctggatttagcggcccggtgtcctcaccccagatcaatagcacagttagtctgccaggagggggtagcggcccccctgaagacgttaagccacctgtactcggcgtccgcggattacactgccctcctccacccggaggaccgggcgccgggaaacgcctttgcgcgatctgtggtgacagatctagcgggaaacactacggggtttattcttgcgagggatgcaagggctttttcaaacgcacaatccgtaaagacttgacctactcatgcagagacaataaggactgtactgttgataagcgacaacgcaaccgttgtcagtactgtagataccagaaatgtcttgcaactggtatgaagcgagaggccgtgcaggaggagcgccaaagaggtaaggacaaagacggcgacggcgagggcgccggcggagcaccagaggaaatgcccgtcgaccgcatactcgaggcggagctcgccgtggagcagaaatccgaccaaggaggttctcagcacatatctaaatcgccgaacgaccccgtgacgaatatatgccaggccgccgataaacagttgtttacactcgtcgaatgggcgaagcggattccccatttcagctctctccccctggatgaccaggtcatcttgctaagggcaggctggaacgaactactgatcgcaagtttttcccatcgctctatcgacgttcgagacgggatcctgctggctaccggactgcacgttcacagaaattctgcacattcagctggagtgggtgccatattcgatagggttttgaccgagcttgtgagcaaaatgcgggatatgcgtatggataagactgagctgggctgtctacgagctattattcttttcaaccccgatgcgaaaggtctgtcgaatcccagtgaggtcgaagttctgcgggagaaagtgtatgcgtcgttagagacctactgcaagcagaagtacccggaacagcagggcagatttgctaagttgctcctcagactaccagctctacggtccattgggttaaaatgcttggaacacctgtttttcttcaaactcattggagacactcccattgacacattcttgatggagatgctcgaagcacctcaccagctggcgtag

SEQ ID NO: 210720 - DNA, 1602 bp, Artificial Sequence
  derived and/or modified sequence
atgtcctgggccgcccggccccccttcctgccccagagacatgctgctggccagtgtggccctgtgggcgtgaggaaggagatgcactgcggcgtggccagccgctggaggagaagaagaccctggctggaccctgctgctgctgctgctgctgctgtggccggcggggagcagcagaccccagagcctgagcctggagaggccggcagagatggcatgggagacagcggccgggacagccgcagcccagacagcagcagccccaaccccctgccccagggcgtgcccccacccagccccccaggcccccccctgccccccagcacagcccccagcctgggcggcagcggggcccctcctcctccacccatgcctcctccacccctgggcagccccttccctgtgatcagcagctccatgggcagccctggcctgcccccaccagcccctcctggcttcagcggccctgtgagcagcccccagatcaacagcacagtgtccctgcccggcggcggcagcggccccccagaagatgtgaagccccctgtgctgggcgtgcggggcctgcactgccccccacctcctgggggccctggggccggcaagaggctgtgtgccatctgtggggacaggagcagcggcaagcactatggagtgtacagctgtgagggctgcaagggcttcttcaagaggaccatcaggaaggacctgacctacagctgccgggacaacaaggactgcaccgtggacaagaggcagaggaaccgctgccagtactgccgctaccagaagtgcctggccaccggcatgaagcgggaggccgtgcaggaggagcggcagaggggcaaggacaaggatggagatggagagggcgctgggggcgcccctgaggagatgcctgtggaccgcatcctggaggccgagctggccgtggagcagaagagtgaccagggcgtggagggccctgggggcactggaggcagcggcagcagccccaatgaccctgtgaccaacatctgccaggccgctgacaagcagctgttcaccctggtggagtgggccaagaggatcccccacttcagcagcctgcccctggatgaccaggtgatcctgctgcgggccggctggaatgagctgctgattgccagcttcagccacaggagcattgatgtgagagatggcatcctgctggccaccggcctgcacgtgcacagaaattctgcccacagcgctggggtgggcgccatctttgacagagtgctgacagagctggtgtccaagatgagggacatgaggatggacaagacagagctgggctgcctgcgggccatcatcctcttcaacccagatgccaagggcctgagcaaccccagcgaggtggaggtgctgcgggagaaggtgtatgccagcctggagacctactgcaagcagaagtacccagagcagcagggccgctttgccaagctgctgctgcggctgcctgccctgcggagcatcggcctgaagtgcctggagcacctgttcttcttcaagctgattggagacacccccatcgacaccttcctgatggagatgctggaggccccccaccagctggcctag

SEQ ID NO: 210721 - DNA, 1179 bp, Artificial Sequence
  derived and/or modified sequence
atgggcagccctggcctgcccccaccagcccctcctggcttcagcggccctgtgagcagcccccagatcaacagcacagtgtccctgcccggcggcggcagcggccccccagaagatgtgaagccccctgtgctgggcgtgcggggcctgcactgccccccacctcctgggggccctggagctgggaagaggctgtgtgccatctgtggggacaggagcagcggcaagcactacggcgtgtacagctgtgagggctgcaagggcttcttcaagaggaccatcaggaaggacctgacctacagctgccgggacaacaaggactgcaccgtggacaagaggcagaggaaccgctgccagtactgccgctaccagaagtgcctggccaccggcatgaagcgggaggccgtgcaggaggagcggcagaggggcaaggacaaggatggagatggagagggcgccggcggggcccctgaggagatgcctgtggaccgcatcctggaggccgagctggccgtggagcagaagagtgaccagggcgtggagggccctgggggcaccggggcccccagccccaatgaccctgtgaccaacatctgccaggccgctgacaagcagctgttcaccctggtggagtgggccaagaggatcccccacttcagcagcctgcccctggatgaccaggtgatcctgctgcgggccggctggaatgagctgctgattgccagcttcagccacaggagcattgatgtgagagatggcatcctgctggccaccggcctgcacgtgcacaggaacagcgcccacagcgctggggtgggcgccatctttgacagagtgctgacagagctggtgtccaagatgagggacatgaggatggacaagacagagctgggctgcctgcgggccatcatcctcttcaacccagatgccaagggcctgagcaaccccagcgaggtggaggtgctgcgggagaaggtgtatgccagcctggagacctactgcaagcagaagtacccagagcagcagggccgctttgccaagctgctgctgcggctgcctgccctgcggagcatcggcctgaagtgcctggagcacctgttcttcttcaagctgattggagacacccccatcgacaccttcctgatggagatgctggaggccccccaccagctggcctag

SEQ ID NO: 210722 - DNA, 1170 bp, Artificial Sequence
  derived and/or modified sequence
atgggcagccctggcctgcccccaccagcccctcctggcttcagcggccctgtgagcagcccccagatcaacagcacagtgtccctgcccggcggcggcagcggccccccagaagatgtgaagccccctgtgctgggcgtgcggggcctgcactgccccccacctcctgggggccctggagctgggaagaggctgtgtgccatctgtggggacaggagcagcggcaagcactacggcgtgtacagctgtgagggctgcaagggcttcttcaagaggaccatcaggaaggacctgacctacagctgccgggacaacaaggactgcaccgtggacaagaggcagaggaaccgctgccagtactgccgctaccagaagtgcctggccaccggcatgaagcgggaggccgtgcaggaggagcggcagaggggcaaggacaaggatggagatggagagggcgccggcggggcccctgaggagatgcctgtggaccgcatcctggaggccgagctggccgtggagcagaagagtgaccagggcggcagccagcacatcagcaagagccccaatgaccctgtgaccaacatctgccaggccgctgacaagcagctgttcaccctggtggagtgggccaagaggatcccccacttcagcagcctgcccctggatgaccaggtgatcctgctgcgggccggctggaatgagctgctgattgccagcttcagccacaggagcattgatgtgagagatggcatcctgctggccaccggcctgcacgtgcacagaaattctgcccacagcgctggggtgggcgccatctttgacagagtgctgacagagctggtgtccaagatgagggacatgaggatggacaagacagagctgggctgcctgcgggccatcatcctcttcaacccagatgccaagggcctgagcaaccccagcgaggtggaggtgctgcgggagaaggtgtatgccagcctggagacctactgcaagcagaagtacccagagcagcagggccgctttgccaagctgctgctgcggctgcctgccctgcggagcatcggcctgaagtgcctggagcacctgttcttcttcaagctgattggagacacccccatcgacaccttcctgatggagatgctggaggccccccaccagctggcctag

SEQ ID NO: 210723 - DNA, 1602 bp, Artificial Sequence
  derived and/or modified sequence
atgagctgggccgcccggccccccttcctgccccagcggcacgccgccgggcagtgcggacccgtgggagtgagaaaagagatgcactgcggggtggcatccaggtggagaaggagacgaccttggctcgatcccgctgccgcagctgccgctgcagtagccggcggagaacagcagactcctgaaccagaaccaggtgaggcgggtcgcgacggaatgggtgactctgggcgagacagccgcagccccgactcctctagtccaaatcctctaccccagggtgttcctccgccgagtcccccagggccccctctgcccccctctactgccccctcactggggggctcgggcgcccccccaccaccacccatgcctcccccccccctgggaagtccattccctgtaattagctcctccatgggcagtccaggactgcccccgcccgctccccccggcttcagcggcccagtgtcctctccgcagattaatagcacggtctctctgccaggaggtggatctgggccacctgaggatgtgaaaccacccgtgttgggggtgcgcggtctccactgtcccccaccaccaggtggcccaggggctggaaaacgactgtgtgcgatatgtggtgacaggagctccggcaaacactacggagtgtattcatgcgaggggtgtaaggggttcttcaagcgcactatcagaaaggacctaacgtattcatgcagagacaataaggactgtaccgttgacaaacgccagagaaaccgatgtcagtattgccggtaccaaaaatgcctggcaaccgggatgaagcgtgaggcagttcaggaggaacgacaaaggggcaaggacaaggatggcgatggagagggggcaggtggggctccagaggaaatgccagtcgatagaattctggaggccgaattagccgtggagcagaagagcgaccaaggtgtggagggccctggcggaacaggaggatccggctcctcgcccaatgacccagtcacaaatatctgtcaagctgctgataagcagctgttcactctggtggagtgggccaaacgtatcccccacttttcctcactacctctagatgatcaagtgattttactgagagccggctggaacgaactcctcattgcctccttcagccacagaagtatcgacgttcgggatggaattttactcgcgactggtctgcacgtccaccgcaacagcgcccattctgcaggggtgggcgcaatcttcgacagagtccttaccgagctggtcagtaaaatgcgggacatgagaatggataaaactgagctgggatgcctccgggccattatcctgttcaatccagacgccaagggcctcagcaatccatccgaggtggaggttctgcgggagaaggtgtatgccagtctcgaaacatactgcaaacagaaataccccgagcagcaaggccggtttgcgaaactcctgctccgcctgccagccctcaggagcatcgggctgaaatgcctggaacacttatttttctttaagctgatcggcgacactcctatcgacacgtttctcatggagatgcttgaggccccccaccagctggcatag

SEQ ID NO: 210724 - DNA, 1602 bp, Artificial Sequence
  derived and/or modified sequence
atgagctgggccgcccggccccccttcctgccccagcggcacgccgcaggccaatgcggacccgtgggggtgaggaaagaaatgcattgtggcgtcgccagtagatggcgcaggagaagaccatggctggatcccgcagccgcggcagcagctgccgtggccggcggtgagcagcagacccctgagccagaaccgggtgaggccgggcgggacggcatgggcgattccggccgagatagcaggtctccagattctagtagccctaatcccctgccgcaaggcgtacctcctccatctcctcctggaccccccctccctccttcaacagccccatctttggggggatctggcgccccccccccgcctccaatgcctccccccccgttgggttccccatttcccgtcatcagttcgtccatgggatctcccggcctcccgccacctgctccccccggcttctctggacccgtcagctctccccagattaattcaacagtgtccctgcctggcgggggatcaggtcccccagaggacgtcaaaccccccgttctgggagtcagaggactgcactgtccacccccacccggtggtcccggtgccggtaaaagactctgcgccatatgcggagatcgctccagcgggaagcactatggggtgtacagctgcgaaggctgcaaggggtttttcaagcgcaccatcaggaaggatctgacttactcatgcagggataataaggattgcaccgtggataaaagacaacggaacagatgtcagtattgccggtatcagaaatgtttggccaccggcatgaaacgtgaggcggttcaggaggagcggcagcggggcaaagacaaagacggggatggtgagggcgctggaggagcacctgaagagatgcccgtggatagaatcttggaagctgaactggcggtcgagcaaaaaagcgatcagggggtggagggccccggagggactgggggctctgggtcttcccctaatgatccggttaccaacatctgccaagccgccgacaagcaactgttcaccttagttgagtgggccaagcgaatcccccatttctccagcctgcccctggacgaccaggtgatcttgttgcgagccggatggaacgaattactcatcgccagtttctcacataggtctattgacgtgcgtgacgggatcctgctggccacaggactgcacgtgcacagaaatagcgcccattctgctggagtgggcgcaatattcgatagggtgcttaccgaactcgttagtaagatgcgggacatgcgaatggataagacggaattggggtgtctcagggccataatcctcttcaacccagatgctaagggcttgtcgaatccttccgaggtggaggtcctgagggaaaaggtatatgccagcttagaaacctactgtaaacaaaagtaccccgaacagcagggccgcttcgcgaaacttttactacgactgccagcccttcgctccatcggcctcaaatgtctcgagcacctcttcttttttaagcttatcggagatacacctattgatacctttcttatggagatgcttgaggcaccccaccagctggcgtag

SEQ ID NO: 210725 - DNA, 1602 bp, Artificial Sequence
  derived and/or modified sequence
atgagctgggccgcccggccccccttcctgccccagcggcacgccgcggggcagtgtgggccagttggcgttcggaaagaaatgcactgtggggtcgccagccgctggcgacggcggagaccctggctggaccccgcagctgctgctgcagcagccgtggccggaggcgagcagcagacgcccgagcctgagcccggagaggcagggagggacggaatgggagactccgggcgggatagccggagccctgactctagcagcccgaacccattaccacagggggtacccccccccagtcctcccgggcctccactgcccccatccactgctcccagcctgggaggctccggagctccacctccacctcccatgcccccacccccactcggatcaccatttcctgttatttcctcgtcaatgggcagtccgggcctgccaccacccgccccgccgggcttctccggaccagtgtccagtccccagatcaacagcacagtgtctttgccaggcggtgggtcagggccgccagaagatgtcaagccccctgtgttaggcgtgagggggcttcactgccctcctccaccaggcggccctggcgcgggaaagaggctgtgcgcaatttgcggtgatcgttcatcaggaaagcattatggcgtatactcgtgtgagggctgtaaagggtttttcaaaaggacaattaggaaggacctgacttatagctgcagagataacaaggactgtacagtggataagagacaaaggaatagatgccagtattgccggtatcagaagtgcctcgccactggcatgaaacgcgaagcggtacaggaagagcgccagcgtggaaaggataaggacggagacggggaaggagcaggcggggcacctgaagagatgcctgtggatagaatcctggaggctgaactggccgtggaacaaaagtccgatcagggagtagagggacctggcgggaccgggggttctggttcgagtcccaatgaccctgtgacgaacatttgccaggctgccgataagcagctgttcacattggtggagtgggctaaacggattccgcattttagcagtctacccctcgacgatcaggtgatcctcctaagggcagggtggaacgagctactcatcgcttccttctctcatcgcagcatagatgttcgtgacggcattttacttgccactggactgcacgttcacaggaactccgcccactcagctggagtgggcgccatattcgatagagtactgaccgaattggtctcgaaaatgagagacatgcggatggacaagacagaactgggctgtttgcgggcaattatactctttaacccagatgccaaaggtctatctaacccttctgaggtcgaggttctgcgggagaaggtgtatgcctctcttgagacgtattgtaaacaaaagtacccagaacagcaagggcgcttcgctaagcttctgctgcgcttgccggcactgagatctatcggactgaaatgcctggagcatctgttctttttcaaactgataggggacactccaatagacaccttcttaatggaaatgctcgaggctccacatcagctagcttag

SEQ ID NO: 210726 - DNA, 1602 bp, Artificial Sequence
  derived and/or modified sequence
atgagctgggccgcccggccccccttcctgccccagcggcacgccgcaggccagtgcgggcctgtaggtgtgcgcaaagaaatgcattgtggagtggcgtcgagatggcgccggcggcgtccctggttagatccggccgctgcagcagcagccgcggtcgcaggcggtgagcagcagactcccgaacctgagccaggcgaggccggaagagatgggatgggcgattccggcagagactcacggtcccctgactctagcagtcccaacccattaccacagggagtgccacccccttcccctcccggtcctccactgcctccgtctactgctccttcactgggaggttcaggggcccctccccccccaccgatgccccctccgcccctaggcagtcctttcccagtcatttcatcatctatgggttctcccggcctgcctccccctgcaccccccgggttctccgggccagtcagttcccctcagatcaactcaactgtgtccttgcctggcggcggatcaggccctcctgaggacgtaaaacctcctgtgttgggtgtccggggactccattgtcctccaccacctggcggccctggcgcaggcaagaggctttgcgccatttgtggagatcgctcatcagggaagcactatggggtgtactcctgcgaaggctgcaagggttttttcaagcggactattcgcaaggacctgacatacagctgcagagataataaggattgcactgtggataaaagacaaagaaaccgctgccagtattgtcgttaccaaaagtgcctggcgacagggatgaaacgggaagcagttcaggaggagcggcaacgcgggaaagataaagatggtgatggggagggcgctgggggggctcccgaggagatgccagtggatcgcatccttgaggccgagcttgccgtcgagcagaaatccgaccaaggtgtggaaggaccgggaggaaccggaggtagtgggtccagtccaaatgatccggtcacaaatatctgccaagcagccgataaacagctgtttacgctcgtagagtgggccaagaggatccctcacttcagctcccttccactcgatgatcaggtgattctattaagagcgggatggaacgagctgttgatcgcttccttctcccatagatcaatagacgtcagggacggaatcctccttgcgacaggcctgcacgtccaccgcaactcagctcattccgcgggcgtgggagctatctttgatagggtattaacggaattagtcagcaagatgcgcgatatgcgcatggataaaacagagttgggctgcctgagagcaatcatcctgtttaacccagacgcaaagggcttgtccaaccccagcgaagtggaagtgctccgggagaaggtgtatgcatccctggaaacctactgcaagcaaaagtaccccgagcagcagggtagattcgctaaattactcttgcgcctgccagcactcagatcaatagggctgaagtgccttgagcatctattctttttcaagttaatcggggacacacctatcgatacctttctgatggaaatgctggaggcgccgcaccagctcgcatag

SEQ ID NO: 210727 - DNA, 1602 bp, Artificial Sequence
  derived and/or modified sequence
atgagctgggccgcccggccccccttcctgccccagcggcacgccgccggacaatgtggcccagtaggagtcaggaaagagatgcactgtggagtggctagccgttggaggcgccggcgcccgtggctcgatcctgcagcagctgccgccgctgctgtggctggaggcgagcagcagacaccggagccagaacccggggaggctggaagggacggcatgggggactccggtagggacagtaggtccccagactcatcttcccctaaccccctgccacagggcgtccccccgccgtctccaccggggccccccctcccccctagcacagcgccctcgctgggcggatctggcgcccccccccctccccccatgccacccccacccctcggatctccgttcccagtcatttctagctctatggggtctccaggactcccaccccctgcacccccaggcttctccggaccagtctccagcccccagattaacagtactgtttcccttcctggcggcggcagtgggccaccagaggatgtaaaacctccagtcttaggcgtgcggggactgcattgccccccaccccccggggggcccggggcgggaaagcgactctgcgctatttgcggggataggtctagcggcaaacactatggagtctactcgtgtgaggggtgtaaaggtttctttaaacgaaccattcggaaggacttaacttactcctgtcgagataataaagactgcaccgtggataaacgacagcgtaacaggtgccagtattgtcgataccagaaatgtcttgccaccggtatgaagcgagaggccgtgcaagaagaacgacagaggggcaaagacaaggatggcgatggagagggtgccggtggcgcacccgaagaaatgccagtagaccggatcctggaagctgagctcgccgtagagcagaaatcggatcaaggcgtggagggaccaggtggcaccggtggcagtggttcatcacccaatgaccctgttaccaatatctgccaggccgctgacaagcagctcttcactctggtggaatgggccaagaggattccgcatttctcaagtctgcctctggatgaccaggtaattctattgagagctggctggaacgaactgctcatagcctccttttctcaccgaagtattgatgtgcgagatgggatcctcctggcgaccggtttacacgtgcacaggaatagcgcccatagtgctggcgtgggggccatatttgatcgggtgctgaccgaactcgtgtctaagatgagggacatgcgtatggacaaaaccgagcttgggtgtctgcgggccataatcctattcaatccggatgccaaggggctgtctaaccccagcgaggtcgaagtactgcgagagaaggtgtatgcaagcctggaaacctactgcaaacagaagtatcccgagcagcagggtcggtttgcaaagcttctcttaaggctgcccgccctgaggagcattggactcaagtgcttggaacacctatttttcttcaagttgattggcgatactccgatagacacttttctgatggaaatgttagaggctccacatcagttggcctag

SEQ ID NO: 210728 - DNA, 1602 bp, Artificial Sequence
  derived and/or modified sequence
atgagctgggccgcccggccccccttcctgccccagcggcacgccgccggccagtgcggtcctgtgggggtgcgtaaggagatgcattgcggggtcgccagtcggtggcgtcggagaagaccctggctggatcccgcagccgcagccgctgcagcggttgcgggaggagaacagcaaaccccagaacccgaacccggagaagccggtcgtgacggaatgggggattctggcagagacagccgaagccccgatagctcgagtcctaatcccctgccgcagggtgttccacccccctctcctcctggccctcccttaccaccatccaccgctccatctctgggggggtccggcgcccccccgcctcctcctatgccccccccacccctcggctcaccattcccagtaatttcaagcagcatgggcagcccagggctgccaccgccagctccacccggcttctccgggccagtgtccagccctcagattaacagcaccgtgagcctccctggcggcggctcagggccgcctgaagatgtgaagccaccggtcttgggagtacggggcctgcattgccctcctccgccgggcggcccgggcgcagggaaaagactgtgcgctatttgcggggaccgtagctcaggaaagcactacggcgtttatagctgcgagggatgcaagggttttttcaagagaactattaggaaagatttgacctactcctgtcgagacaataaggattgtaccgttgacaagcggcagcgtaaccgttgtcaatactgtcgctaccagaagtgcctggccactggcatgaagcgagaggcggtacaggaagagcgtcagaggggcaaggacaaggatggcgatggcgagggagctgggggcgcacctgaggagatgcctgtagatcgaatacttgaagccgaattggccgttgagcagaagtccgatcagggtgtggaaggacctggcggcaccggtggaagtggttcatctcctaacgaccccgtgacgaacatttgtcaggccgccgacaagcaactcttcaccctcgtggaatgggctaagcgcattccacacttttcctcccttcctctggacgatcaggtgattcttttgcgtgctgggtggaacgaactgctcatcgcttcctttagccaccgctcgattgatgtgagggacggaattctcctggccacgggcctccatgtacaccgcaactctgctcattcggcaggcgtcggagcaatattcgaccgggtcctgactgaactggtgtccaagatgcgggacatgaggatggacaaaaccgaattaggttgccttagagccattatattattcaatcctgatgctaagggcctgtcaaacccatctgaagtggaagtgctgagagagaaagtatatgcctccctagagacctactgcaaacagaaataccccgaacagcagggaaggttcgctaaactgctgttgagactgccagccctccggtccatcgggctcaagtgtttagagcacctgttcttctttaagcttattggagacacccctattgacacgttcctgatggagatgctagaagccccacaccagttagcctag

SEQ ID NO: 210729 - DNA, 1179 bp, Artificial Sequence
  derived and/or modified sequence
atgggcagccccggcctgcccccccccgccccccccggcttcagcggtcctgtcagttcccctcagataaacagcaccgtgagccttcctggcgggggatctggcccacctgaagacgtgaagccacctgtgcttggcgtccggggcctccactgccctcctccacctggtgggcctggagcagggaagcgactgtgcgcaatctgtggagatcggagttctgggaagcactacggtgtatattcctgtgaggggtgcaagggatttttcaaaaggacaataagaaaagatctaacgtactcgtgtcgcgacaataaagactgtacggtggacaagaggcagaggaacaggtgtcagtattgtcgataccagaaatgtctagcgacaggtatgaagagagaggccgttcaggaagagagacagcgcgggaaagacaaggacggagatggggagggagcaggtggggctcccgaggagatgcctgtcgatagaatccttgaagcagaactcgccgttgaacagaagtcagaccagggggtggaagggccagggggtacgggtgcacctagccctaacgatcctgttaccaatatctgtcaggctgctgataaacagcttttcactcttgttgaatgggctaaacgaatccctcactttagttccttgcccctggacgatcaggtgatcctccttagagcggggtggaatgaattgctgatcgcatcttttagccatcgctctatagatgtgagagatgggattttattggcaaccggactgcatgtgcaccgcaactccgcccacagcgccggcgtcggggccatctttgatagagtactcaccgaacttgtgtccaagatgagagacatgcggatggacaaaaccgagttgggctgcctcagggccattattctcttcaacccagacgcaaaaggactctccaaccccagtgaagtcgaggtgctgcgagaaaaggtctatgcatcactcgagacatactgcaagcagaaatatcccgagcagcagggccggttcgcaaagctgctgctgaggcttcccgcactgagatctattgggctgaagtgtctggagcatctatttttttttaagctgattggagacacccccatcgatactttcctcatggagatgctggaagccccacaccagctggcctag

SEQ ID NO: 210730 - DNA, 1170 bp, Artificial Sequence
  derived and/or modified sequence
atgggcagccccggcctgcccccccccgccccccccggcttcagcgggcccgtgtccagcccccagattaatagtactgtgagtctgccagggggtggtagcgggccccccgaagacgtcaaaccacccgtgctgggtgtgcgtggcctgcattgtccccctccccccggggggcccggtgccggcaaaaggctttgtgccatttgcggggatagaagtagcggcaagcactacggggtttactcctgcgaagggtgtaaaggtttcttcaagcggacaatcagaaaggacctgacatatagttgccgggacaataaggattgcaccgtggacaagaggcagaggaatcgttgccagtactgccggtatcagaagtgtctcgccactggaatgaaaagagaggcagtgcaggaggagcggcagaggggaaaagacaaagacggcgacggcgagggcgccgggggtgcccccgaagaaatgcccgtggatcggatcttggaagcagagctggctgtggaacagaagtccgaccagggaggttctcagcacatcagcaaaagtcccaatgacccagtgactaacatctgtcaggctgctgataagcagcttttcacattagtcgagtgggcaaaacgcatcccccattttagtagtctccccttagacgaccaggtgatcctgctgagagctggatggaatgagcttctcattgcttctttctctcaccgctcaatagacgtacgcgacggcatactgttggccaccggcctgcatgtgcatcgcaactcagcacattcagccggtgtgggggccatcttcgaccgagtcctgactgagctcgtttcaaaaatgagagacatgaggatggataagaccgagttgggctgcttgcgcgctattattctgttcaaccccgatgcaaaagggctcagcaacccatccgaggtagaagttctaagagaaaaagtgtacgcatctttagagacttattgtaagcaaaagtatccggagcagcagggtcgcttcgcaaagctgcttctccgcttgcctgccctgagatccattggccttaaatgcctcgaacacctttttttcttcaaactgatcggtgacactcctattgatacatttctcatggagatgctggaggccccccatcagctcgcctag

SEQ ID NO: 210731 - DNA, 1179 bp, Artificial Sequence
  derived and/or modified sequence
atgggcagccccggcctgcccccccccgccccccccggcttcagcgggcccgtcagtagcccccagatcaactccacagtctcgctgccgggcggggggagtgggccccctgaggacgttaaaccccctgtcttgggggtcagggggctgcattgccctcctcccccgggcggccccggggcaggtaagcgcctctgtgctatctgtggcgataggtcttctggaaagcattatggcgtttacagctgtgaaggatgtaaaggctttttcaaaaggacaattaggaaggatctgacctattcatgccgggataacaaggattgtactgtggacaaaaggcaaaggaatcgatgtcagtattgtcggtatcagaaatgcctggcgaccggcatgaaacgcgaggctgttcaagaagagcggcagcgggggaaggacaaagacggtgacggagaaggagccgggggtgcacctgaagagatgcccgtcgacagaatcctggaagctgagttagcagtggaacaaaagagcgatcaaggagtggaggggcccgggggcacaggagcaccttcccccaatgaccccgtcactaacatatgtcaggccgccgataaacagctctttacacttgtggaatgggctaagcgtatcccccatttttcaagcttgccccttgatgaccaggtcatccttcttcgagctggatggaacgagttacttatagcatccttctcacatagatccatcgacgtacgcgatggtatccttctggccaccggactgcatgtacacaggaatagcgcccatagtgctggcgtgggggctattttcgaccgcgttttaactgagctggtgagcaaaatgcgggatatgaggatggacaaaaccgaattaggatgcctgagagccatcattcttttcaatccagatgccaaggggctgtccaatccgagcgaggtggaagttctgagggagaaggtttatgcttccttagagacctattgtaagcagaaatacccagaacagcagggcaggttcgccaagctgctattaaggcttccagctctgcggtcaatcggactaaaatgcttggagcaccttttcttcttcaagttaattggggacactccgatagacactttcttgatggaaatgcttgaggctcctcaccagcttgcgtag

SEQ ID NO: 210732 - DNA, 1170 bp, Artificial Sequence
  derived and/or modified sequence
atgggcagccccggcctgcccccccccgccccccccggcttcagcggcccagtgtctagcccacagatcaattctacagtgtcactgccgggcggcggctccgggccacctgaagatgttaagccacccgtgttaggagtgcgaggcctccactgcccgcctccgccagggggaccaggggctgggaagcggctgtgtgccatctgtggtgatagatcaagcggaaagcattatggcgtgtactcatgtgagggatgtaaggggttttttaaaagaacaatccgaaaggatttaacgtattcatgccgcgataataaggattgtaccgtggataagcggcagcgcaatcggtgtcagtactgccggtaccagaaatgtcttgcaaccgggatgaaacgggaagccgtacaggaggagcgccagcgaggaaaagataaggacggcgatggcgaaggtgctgggggggcccctgaggagatgccagtcgaccggatattggaagcagagctggctgtggagcagaagagcgatcagggcggaagccagcatatatctaagagtcccaacgaccctgtcacaaacatttgtcaagccgctgataaacagctgttcaccctggtggaatgggctaaaagaatcccgcacttttcgtctctgccactcgatgatcaagttattttgctgcgggcaggctggaatgagctgctaatcgcttcattctcacaccgaagcatcgacgttcgagatggcatcctgttagccaccggtctgcatgtgcataggaactccgcccactccgcgggagttggagccatattcgaccgcgtgttgaccgagctcgtgtctaagatgagggatatgcgaatggataagactgaactgggatgcctcagagccattattctgtttaacccggacgctaagggtctgtccaatccttcagaagtggaagtgctgagagaaaaggtgtacgcaagtctggaaacttattgtaagcagaagtacccagagcagcagggaaggttcgccaagcttctgttgagattgcccgctcttcggtccatcggcctgaagtgtctagagcatctgttctttttcaagctgataggtgacactcctatcgatacgtttttgatggaaatgctggaggccccgcaccagctcgcctag

SEQ ID NO: 210733 - DNA, 1170 bp, Artificial Sequence
  derived and/or modified sequence
atgggcagccccggcctgcccccccccgccccccccggcttcagcggacccgtgtcctccccccagatcaatagtactgtttctctgcccggcggagggagtgggccaccagaggacgtgaaacccccagtactgggcgttcgcggcctccactgtccaccgcccccaggggggcccggtgctggcaagcgcttatgtgcaatctgtggggatcggtctagtggaaaacattatggcgtgtactcttgcgagggctgcaaggggttctttaaaagaaccatacgaaaagatctgacttacagctgtagagataacaaggactgtacggtcgacaagagacagcgcaatcgctgccaatactgtaggtatcagaaatgtctcgccactggaatgaagcgggaagctgtgcaggaagaaaggcaaagggggaaagacaaggatggcgacggcgagggtgccggcggcgcccccgaagagatgcccgtagacagaatcttagaggccgagctggctgttgagcagaagtccgatcaaggggggtcgcagcatatttcaaagtccccaaatgaccctgtgactaacatttgtcaggctgctgataaacagctgttcaccctagtggaatgggccaagcgcatacctcatttcagctccctccctttggacgaccaggtgatcttgctgagagcgggctggaacgagctacttatcgcctcctttagtcacaggtctatcgacgtgcgggacggaattctcttggcaacaggcttacacgtgcaccggaacagcgcgcactccgccggggtgggtgcaattttcgaccgagtcttaaccgaactggtgtccaaaatgcgtgatatgaggatggataagaccgagctaggctgtttacgggcaatcatactgttcaatccggacgctaaaggcctctctaatccctcagaagtggaagtcctaagggagaaagtgtatgctagcctggagacgtattgtaaacagaaataccccgagcagcagggccggtttgcaaaactgttactgcgcctgccggccctgcggagtatcggactgaagtgtctggagcacctgttcttttttaagctgattggcgatactcccatcgacaccttcttgatggagatgctggaagctccccatcaactggcctag

SEQ ID NO: 210734 - DNA, 1179 bp, Artificial Sequence
  derived and/or modified sequence
atgggcagccccggcctgcccccccccgccccccccggcttcagcgggccagtgtcttcgcctcagatcaacagcacagtctccctgcctgggggggggtctgggccccccgaggacgtgaagccacccgtgttgggggtccgcgggctgcactgtcccccacctcctggagggccaggtgccggaaagcggctgtgcgctatttgcggtgacagatcatccggcaaacactacggcgtctatagctgtgagggatgcaagggcttttttaaaagaactattaggaaagatctgacctattcttgtcgagataataaggactgtacagtcgacaagaggcagagaaatagatgtcagtattgcaggtatcagaagtgtttagctacaggaatgaagcgggaagcggtccaggaagaaaggcaacggggtaaagacaaagacggcgatggggagggagccgggggggccccagaggagatgccagtggaccgaatcttagaagccgaactggctgtggagcagaaaagcgaccaaggtgtggagggaccaggagggacgggggccccatcaccaaatgacccagttactaatatttgtcaggccgcggacaagcagctgtttacactcgtcgaatgggcaaaaaggatcccccatttctccagtctgcctcttgacgatcaggtcatcctgctcagggctggctggaatgaactcctgattgccagcttcagccatcggtccattgatgttagggacggaatccttctcgctactggccttcatgtgcaccgaaatagtgcacactcggcaggagtcggcgctatcttcgatagagtgctaactgagttggtcagcaagatgagagatatgaggatggacaaaaccgagctcggatgcctaagagcaatcatactgtttaatcccgatgcaaagggcttatctaatccctctgaggtcgaagtgctcagagagaaggtgtatgcaagcctggagacctattgcaagcaaaagtatcctgagcaacagggcaggttcgcaaaactgctgcttaggttacctgccctccgtagcatcgggctcaaatgtctcgaacaccttttttttttcaagctcattggcgatacccccattgacaccttcctgatggaaatgctcgaagcaccccatcaactcgcatag

SEQ ID NO: 210735 - DNA, 1179 bp, Artificial Sequence
  derived and/or modified sequence
atgggcagccccggcctgcccccccccgccccccccggcttcagcggacccgtttcttcccctcagatcaactccaccgtctccctcccgggcggcggatccgggccgcccgaagacgtgaagccccctgtgctcggagtccgaggtttgcactgtccaccaccccccggtggacccggcgcaggaaaacgcctgtgcgcaatttgtggagaccgctccagcggcaagcattatggagtatattcctgcgaaggatgtaagggattctttaagaggacaatcaggaaagacctcacgtactcttgtcgggataacaaagactgcaccgtcgataagaggcagagaaatcggtgtcagtactgccgctatcagaagtgcctggcgaccgggatgaaaagggaagccgtgcaggaggagaggcagagagggaaagataaagacggcgatggggaaggggccggtggagcgccagaggagatgcctgtggatcggatcctcgaagcagaactggccgtggaacagaaaagtgaccagggggtcgagggcccaggcggaacaggtgctccaagtccaaatgatcctgttactaatatttgccaagctgctgataagcagctcttcacattagtcgaatgggccaaaaggattccgcactttagcagcctccccctcgacgaccaggtaatcctgttgagagccggctggaacgaattgctcattgcctccttcagccacaggtcgatagatgtcagagacggaatcctccttgcaaccggtttacacgtgcaccgcaatagcgcacactcagcaggggtgggcgccatcttcgatcgagttttgaccgagttagtcagtaaaatgagggacatgcgcatggacaagacagagctgggctgtctgcgtgccatcatcttgtttaatccagatgctaaggggctttccaaccccagtgaagtcgaggtgctccgtgaaaaggtgtacgctagcctggaaacttactgtaagcagaaatatcccgagcagcagggacgcttcgctaagctgctacttagactccccgccctccgaagtatcggactcaagtgcctcgagcatttgtttttctttaaactgataggcgacaccccaatcgacacctttctgatggagatgctcgaagccccccaccagctcgcttag

SEQ ID NO: 210736 - DNA, 1179 bp, Artificial Sequence
  derived and/or modified sequence
atgggcagccccggcctgcccccccccgccccccccggcttcagcgggcctgtgtccagtccacagatcaatagcaccgtgagcctaccaggcggtgggtccggccctcctgaagacgtgaaaccgccagtgctgggcgtgaggggcctgcactgtcctccaccacccggtggtcctggagccggaaaaaggctgtgcgcaatctgcggggaccggtctagtggcaagcattatggcgtgtattcgtgcgaggggtgcaaaggatttttcaaacgcaccatcaggaaagaccttacctactcctgtcgagacaacaaggattgcactgtggataagagacaacgtaaccgttgtcagtattgcaggtaccaaaagtgtctggcaacagggatgaagcgcgaggcagttcaggaagaaaggcagagagggaaagacaaggacggagatggagagggtgccggcggggcacctgaggagatgccggtggatcgtattctggaagccgagcttgccgtcgagcaaaagtccgatcagggtgtggagggacctggcggcaccggagcaccatcgcccaacgaccccgtgaccaatatctgccaggcagccgataaacagctgttcaccctggtggaatgggccaagcgaattcctcatttctccagtttgccactggatgatcaggtcattctgctgcgggccgggtggaatgaacttttgattgcctccttctctcaccgctctattgatgtccgggatggcattttactggctacaggtttgcatgttcatcgcaactcagcccactctgccggtgtgggcgcaatttttgaccgcgtgctgacagagttggtctctaagatgagagatatgagaatggacaagaccgagctgggatgcctgcgggccatcattctgtttaatcccgacgctaagggcctgtccaaccctagcgaagtggaggtgctccgggagaaggtgtacgcatcgttggagacatactgcaagcagaaatatcccgaacagcaggggcggttcgcgaagctgctgctgcgccttccagccctccggagtattgggctgaagtgtctggaacatttatttttcttcaaactcataggagatacaccaatcgatacttttctcatggaaatgctggaagccccccaccagttggcttag

SEQ ID NO: 210737 - DNA, 1170 bp, Artificial Sequence
  derived and/or modified sequence
atgggcagccccggcctgcccccccccgccccccccggcttcagcggtccggtgagcagtccccaaatcaacagcacggtcagtctgccgggtggaggaagtggacctcctgaagacgtgaaacctcctgttctgggcgtccgcggcctccactgcccccctcccccagggggacccggcgccggcaaaaggctgtgtgctatctgcggggacagatctagtggaaagcactatggcgtgtatagctgcgagggctgtaaagggttctttaagagaacaattaggaaggatctcacctacagctgccgggacaataaggattgtacggtggacaagcggcagcgcaacaggtgtcagtactgccgctatcagaagtgccttgccacagggatgaaaagagaagctgtccaggaagagcggcagcgcggaaaagacaaagacggagatggcgagggggccggcggggctccagaagagatgccagtagatcgtatcctagaggcagaactggccgtggagcaaaagagcgaccagggtggatcccagcatattagcaaatcacctaatgaccctgtaaccaacatatgtcaagccgctgacaagcagctctttaccttagtggagtgggctaagcggataccccatttctcttccttacctctcgacgaccaagtcatcttgttacgagctgggtggaacgagttgctgatcgcatcctttagccatcggtccatcgatgtgcgtgacggcattcttctggcaaccggattgcatgtccaccgcaactccgcacacagtgccggggtcggggctattttcgaccgagtactgaccgagctggtcagtaagatgcgggacatgagaatggataaaacagagctcggctgtttaagagcaatcattttgtttaatccggatgcaaagggattgagcaatcccagcgaggtggaagtgctgagagagaaggtgtatgctagtcttgagacctattgcaagcagaaatatccagagcagcagggacgctttgctaaactgctgctacgcctccctgcacttcggtcaatcggcctgaagtgcttggagcacctctttttctttaagcttatcggggacacccctatcgacaccttcctcatggagatgctcgaggccccccaccaactggcatag

SEQ ID NO: 210738 - DNA, 1170 bp, Artificial Sequence
  derived and/or modified sequence
atgggcagccccggcctgcccccccccgccccccccggcttcagcggtcctgtctccagcccacaaatcaactctacggtttccctccccggagggggatctggacctcctgaggatgttaagccacccgttctgggcgtacgcggattacactgtccccctccacctgggggccccggcgctgggaagcgactgtgtgctatctgtggtgatcgctcttccggcaagcactacggagtgtatagctgtgagggttgcaaaggattttttaagcggaccatcagaaaagatctgacctacagctgccgagataataaggactgtacagtggacaaaagacagcggaacaggtgtcaatactgtcgttaccagaagtgcctggccaccggtatgaagagagaggctgtgcaagaagaacgacagcgcggtaaggacaaggatggcgatggcgagggggcggggggggcacctgaggagatgcctgtggataggatattggaggcggagctggccgtggagcaaaaatcagatcagggagggtcgcaacacattagtaagtcccccaatgaccccgtcacaaacatctgtcaggcggccgacaagcagctgtttacactggtggaatgggcgaaaagaatcccccacttctcctctctgccgctcgacgaccaggtgatactcttaagagccgggtggaatgagctgctcatcgccagtttctcccaccgaagcattgatgtcagagatggtatcctacttgctacaggtttgcacgtgcatcgaaacagcgcacatagcgcaggcgttggcgcaatctttgaccgagtccttaccgagcttgtgagcaagatgagggacatgcgcatggacaagaccgagctcggctgtctccgtgccatcattctttttaatccagatgccaagggactgtcaaacccttccgaggtggaggtcttgcgggagaaggtgtatgccagccttgagacctactgtaaacagaaatacccagaacagcagggcagattcgccaagctgctgctgcggcttcccgcactacggtcaatcggactgaaatgcctggagcacctcttctttttcaaactgatcggagacactccaatcgacacgttcctgatggaaatgttagaggccccacatcagctggcctag

SEQ ID NO: 210739 - DNA, 1602 bp, Artificial Sequence
  derived and/or modified sequence
atgagctgggccgcaagacccccatttctgccacagcggcacgccgcaggccaatgtggccctgtgggggtccgcaaggagatgcactgtggagtggcatcccgttggaggcgccgtagaccctggttggatcccgctgccgctgccgcagctgcagtggccggaggcgaacagcagactcctgagcctgagcccggagaggccggtcgcgacggcatgggagatagcggtcgggattcaaggtccccagactcttcaagccccaacccgctccctcaaggggtccctccgccttctcccccaggtcctccgcttccccctagcaccgcaccttcattgggcggaagtggggcacctcctccccctcctatgccacctcccccactggggtccccttttcccgtcatcagcagcagtatgggaagtcctgggctgccgcctcccgcaccaccaggtttttcaggtcccgtctcctcccctcagattaattccaccgtgtcccttccaggagggggatccggacctcctgaggatgtgaagcccccagtgctaggggtaaggggcctccactgcccgcctcccccaggtggcccaggggcaggaaagcgactgtgcgctatatgcggggacagatcctcggggaagcactatggtgtgtactcatgcgagggatgcaaagggttttttaaacgcacgatcagaaaggacctgacctacagctgccgggacaataaagattgtaccgtcgacaagcgccaaaggaacagatgtcagtactgcagataccagaaatgcctggctacagggatgaagagagaagccgtccaggaggagaggcagcgcggaaaagacaaggatggggatggagagggagccggtggggcaccggaggagatgccagtggatcgaattctagaggccgagctcgctgtagagcagaagtccgatcagggtgtcgaaggcccaggaggcacaggaggttctggttcctctcccaacgacccagtgactaatatatgtcaggctgccgataagcaactctttacattggtggaatgggccaagaggatccctcacttctcatctcttcccctggatgatcaagttattctgctgcgcgcaggctggaatgagctgcttattgcctctttcagccataggagcatcgatgtaagagatgggattctgctcgccaccggattacatgttcacaggaactccgcccattccgcaggggtgggggctattttcgacagggtcctcacagagctcgtcagtaaaatgcgagatatgagaatggacaagaccgaactgggctgcctgcgagcgatcattctgttcaaccctgacgccaaagggctctcaaatcctagcgaggtggaggtgctccgcgaaaaggtttatgcttccctggaaacttattgtaaacagaaataccctgaacagcaagggaggttcgccaagttgctgttgaggctacccgcactgcggtctattggtcttaaatgtttggagcatctgttcttcttcaagcttatcggggatactccaatagacactttcttgatggaaatgctggaagctcctcatcagctggcctag

SEQ ID NO: 210740 - DNA, 1602 bp, Artificial Sequence
  derived and/or modified sequence
atgtcctgggccgcaaggcctccatttctccctcagaggcatgcggcaggccagtgtggtccagtaggcgtaagaaaagagatgcattgcggtgtcgcctccaggtggagacggaggagaccctggctggacccagccgcagcagcggctgccgcagttgccggaggagaacaacagactccagaacctgaacctggcgaggccggacgtgatgggatgggagacagcggacgggactcgcggtctcccgatagcagctcacccaatcccttaccccagggtgtgcctccaccaagccctccgggaccccctctgcctccatctaccgccccatcactcgggggatcaggggctccccctccccctccaatgcccccacctcctcttggctcgccattccccgtcatttccagtagcatgggaagccctgggttaccacctcctgcaccccctggatttagcgggcctgtgtcaagccctcagatcaactcaaccgtgtcccttcctggcggaggatctgggccacccgaggacgtgaaacctccagttctcggggtcagggggttgcattgccccccacccccaggaggacctggtgccggaaaaaggctatgtgcgatctgcggtgatcgatcatctggcaagcactatggggtgtactcctgtgagggctgcaagggcttttttaagagaacgatacggaaggacctgacctattcctgtcgcgacaataaagattgcacagttgacaaaagacaacggaatcggtgccaatattgcaggtaccaaaagtgcctggcaactggcatgaagagagaggctgtccaggaggaacgccagagagggaaggacaaggatggagatggggagggcgcaggcggagcacccgaggagatgccggtggatcgaattcttgaagccgagcttgcagtggagcagaaatcagatcagggtgtagagggccctggagggacaggtgggtcagggtcatctccaaatgatcccgtcaccaatatttgtcaggccgcagacaagcagctgttcacactcgtggagtgggcaaagcgcattccacacttttcctcacttcctctggacgatcaagtgattctactcagggcaggatggaatgaactgctaattgcgtcttttagccaccgctctatcgatgttagagacggaatccttttggccactggcctgcacgtgcaccgaaattctgctcactctgctggcgtgggtgccatcttcgaccgggtcctcactgaacttgtgtctaaaatgcgagacatgagaatggataagactgaactgggttgtctgcgagcaattatacttttcaacccggacgccaaggggttaagcaatccgtccgaagtggaggtcttgagggaaaaagtgtacgccagtctcgagacttattgcaaacagaagtatcctgagcagcaaggacgattcgccaaactgctcctgaggctgccagccctgcggtctataggactcaagtgtctcgagcacttgttcttttttaaactgattggggatacccccatagacacatttctgatggagatgttggaagcaccccatcagttagcgtag

SEQ ID NO: 210741 - DNA, 1602 bp, Artificial Sequence
  derived and/or modified sequence
atgagctgggcagcaagacccccattcctacctcaaaggcatgccgctggtcaatgcggtccagtgggcgttagaaaggaaatgcattgtggtgtggcctccaggtggcggaggagaagaccttggttggacccagctgcagccgctgcagcagcagtggccggaggtgaacaacagactcctgagccggaaccgggagaggctgggagggatgggatgggggactccgggcgtgactcccgatcccccgactcaagttccccgaacccgctcccccagggggtcccgccaccttcgccacctgggccaccactgcccccatctaccgcaccttcactgggtggctctggcgcaccacctccacctcccatgcccccaccgcctctagggtccccgttccccgtcattagcagttcaatggggtcaccagggctgccccctccagctcctcccggattctcaggacctgttagtagcccgcaaatcaatagtactgtcagcttacccggaggcggttccgggcctcccgaagatgttaagccaccagtactaggtgttaggggcttacactgcccaccaccacccggaggccctggagccggtaaacggttgtgtgctatatgtggggacagatccagcgggaagcattatggagtttactcttgtgaggggtgcaaaggattctttaaacgcactataagaaaagacttgacctatagctgcagggacaacaaagattgtaccgtcgacaagaggcaaaggaaccgatgccagtactgccggtatcagaaatgtctggccaccgggatgaaacgggaagcggtacaggaggaaaggcagaggggtaaggataaggatggggatggggaaggagctggcggtgccccagaggagatgccggttgatcggatccttgaggcggagcttgctgttgagcagaagtctgatcagggcgtggagggaccaggcggtacgggaggtagcgggtcatcacccaacgaccctgtgaccaacatttgtcaggctgccgacaaacaactctttaccttggtggaatgggcgaagcgaatccctcacttttcctctcttcctctggatgaccaggtcatcctgctgagggcaggttggaacgagctgttgatagcttccttttctcaccgttcaattgatgtgcgggacggcatcctccttgcgacagggctgcatgtacatcgaaacagcgctcattcggccggagtcggcgcaatttttgatcgcgttctgacggagttagtgtctaaaatgcgagacatgcgtatggataaaacagaactcggatgtctcagagcgattattctgttcaatcccgacgccaaaggtctttcaaatccctccgaagtggaggtgctccgcgagaaggtctacgcctcattagagacttactgcaagcagaaataccctgaacagcagggcagattcgctaaactgctgctgcggctccccgctctgcgcagcattgggttgaagtgcctagagcatctcttttttttcaaacttatcggagatactccaatcgacacctttctgatggaaatgctagaggccccacatcagttggcttag

SEQ ID NO: 210742 - DNA, 1602 bp, Artificial Sequence
  derived and/or modified sequence
atgtcatgggccgcaaggcctcctttcctgcctcagcggcatgctgcgggacagtgcggaccagtgggggtgcgaaaggaaatgcactgcggtgttgcctcacggtggaggagacgcaggccatggctcgatccagccgctgctgcagccgcagccgtggcgggaggagagcagcagacacccgagcccgagcctggggaggccggaagagacggcatgggcgacagtggtcgggattcccgctccccagacagtagtagtcccaatccgctgccacagggagtgcccccaccttctccgccaggtcccccactgcctccaagtacagccccttcactcggcggaagtggtgctcctcctcccccacctatgcccccaccaccactgggcagtccatttcctgttatcagttccagcatgggatcccccggactgccacccccagctccaccaggtttctcagggccagtatcttctcctcaaatcaatagtacagtttccctacctggtggtgggtctggaccccctgaggacgtcaagcctccagtgctcggagtccggggtctgcactgccctccaccccctggcggacccggagctggcaagaggctgtgtgcgatttgcggggatcggtcctcagggaaacactatggcgtttacagttgcgagggttgcaaaggattctttaaaagaaccatccgcaaagatctcacctatagctgccgcgataataaggactgtacggtggataagagacaacgcaataggtgtcagtactgccgctaccaaaagtgccttgccactgggatgaagagagaagccgtgcaggaggagcgccagagaggcaaggataaggacggcgatggggaaggagctgggggagcaccagaggagatgccagttgacagaattttagaggccgaactggctgtcgagcagaagagcgatcaaggtgtggaaggtcctggaggtaccggtggttccggaagctcacccaacgacccagtgactaatatttgtcaagcagcagataaacagctgttcaccttagtagaatgggctaaacgaataccccattttagctctctgcctctggacgaccaggtgatcctgctgcgcgctggatggaatgagctgctcatagcatctttcagccataggagcattgacgtgagagatgggatcctgctggctacgggactgcacgtccacagaaactctgcacatagtgccggagttggagccatcttcgaccgcgtgctgaccgaacttgtgtcaaagatgagagatatgcggatggacaaaacagagctcggctgtctgcgcgctatcattctgtttaaccctgacgcaaaggggctcagtaaccctagtgaggtcgaagtcctgcgggaaaaggtgtatgcctccctggaaacatattgtaagcaaaagtatcccgagcaacagggccgtttcgcaaagctgctgctgcggctgccagctttgcgctcgatcgggctcaagtgtctggagcacttatttttctttaagctgattggcgacacccccattgacaccttcttaatggagatgctggaagcccctcaccagctagcttag

SEQ ID NO: 210743 - DNA, 1602 bp, Artificial Sequence
  derived and/or modified sequence
atgtcttgggccgctcggcctccttttctgcctcagaggcatgccgcaggacaatgcggtcctgtcggagtgcgcaaagaaatgcactgcggcgttgcctctaggtggcgcaggagacgcccatggttggatccagctgctgctgccgcagctgcagtcgcgggaggtgagcagcagaccccagagccagagcctggcgaggcgggacgtgatggaatgggcgactcaggcagagatagccgcagccctgacagttcaagtccaaatcccctgccccagggagtcccgcctccttcccccccaggccctccactgcccccatcaactgccccatctctcggcggatctggggcaccgcctccccctcctatgcccccaccaccgctggggagccccttcccggtgatttccagctctatgggttcacctggtttgccaccccctgcacctccgggattctctggtcccgtgagctccccacaaatcaacagtacggtgagcctgcctggcggtggctctggccctcctgaagatgtgaagccccctgtgctgggtgtaagggggcttcactgcccacctccgccaggcggacctggagccggtaaacgcctatgtgccatttgcggggacaggtcaagtggcaagcactatggagtgtactcttgcgagggatgtaagggcttctttaagcgcactatccgaaaggatctgacatactcctgcagagataacaaggactgcacagtcgacaagcggcagcgcaacaggtgtcagtattgtcggtatcaaaagtgtctggcaacaggcatgaaacgggaggccgtgcaggaggagcgccagcgcggaaaagacaaggacggtgacggcgaaggcgcaggtggcgctccggaagagatgcccgtagacaggatcttagaggccgaactcgctgtggaacaaaagtctgaccaaggggtggaggggcctggaggtacaggcggatcaggtagttcccctaatgacccagtgaccaatatatgtcaggccgctgataagcaactcttcaccttggtggagtgggcaaagcgcatcccacacttttctagccttcccctggatgaccaggtcatccttcttcgggcaggatggaacgagttgcttatcgcctccttttctcatagatccatcgatgttcgggacggcatactcctggcaacgggcttacatgtgcaccgtaactcggcccactcggctggggtgggggctatctttgatagagttcttaccgagctcgtaagcaagatgcgcgacatgcggatggataaaacggagctgggatgcctgagagccattatcctgttcaaccctgacgccaaaggtttgtccaatcctagcgaagtggaggttctcagagagaaggtatacgcaagcctcgaaacttactgcaaacagaagtatcccgaacagcaggggaggttcgctaagctgctgctgcgtctgcccgctctgcggagcattggacttaaatgcctggagcacctgttcttcttcaagctcatcggtgatacacctatcgatacatttctcatggagatgttggaagctccccatcaactggcctag

SEQ ID NO: 210744 - DNA, 1602 bp, Artificial Sequence
  derived and/or modified sequence
atgtcatgggctgcgagacctcctttcttgccccaaagacatgccgctggtcaatgcgggcctgtgggggtcaggaaagagatgcattgcggggttgcgtcaaggtggcgtagaagacgtccatggctggacccagctgcagccgcagcagcagcggtggccggtggcgagcagcagacgccagaacccgagccaggcgaggcaggcagggatggaatgggcgactctggacgcgattcacgaagtcctgattcaagtagccccaatcccctacctcagggagtgccaccaccatcgcctccaggaccacccttgccaccctctactgccccttcccttggcggatccggtgcccctccacccccacctatgcctccaccaccgttgggaagcccattccctgtaatctctagtagcatgggttccccagggctccccccacccgcaccccctggcttctcagggcctgtgagctctcctcagatcaatagcacagtctctctgcctggcggaggttcggggcctcccgaagacgtaaaaccccctgtgctgggcgttaggggattacattgtcctccgccacctggtgggcctggcgctggaaagaggctctgtgccatctgtggagaccgaagttccggcaagcactatggcgtttattcatgtgagggctgcaagggtttctttaaacgcacaatccggaaggatctgacttattcgtgtcgagacaacaaagactgtactgtggacaagcgccagcgaaaccgatgccagtattgtaggtatcagaagtgcctagctactggcatgaagcgggaggcagtgcaggaggagcggcagcgaggcaaagataaggatggggatggagaaggcgcaggcggagctccggaggagatgccggtggatagaatcctcgaagcagagctagcggtggaacagaaatcggaccagggggtggaaggcccagggggtaccgggggatcgggatcttctcctaatgacccagtgaccaatatatgccaggccgctgataagcaattgtttacactggtagaatgggctaagcgcataccccatttctccagtctccctttggacgaccaggtgattctcctcagagctggatggaatgagttattaattgcatcattcagtcatcggagcatcgacgttagagatggtatcctcctcgctacagggttacacgtacacagaaattcagcccactctgccggagtgggtgctatatttgacagagtgctgactgagctcgtctccaaaatgagagacatgagaatggacaaaacggaactgggatgcctgagggccatcattctgttcaatcctgacgcgaagggcttgtcaaacccgagcgaggtggaggtactccgcgaaaaggtctacgcttctttagaaacatactgcaagcagaagtaccccgagcagcagggacggttcgctaaactcctactaagacttcctgcactgagatccatcggtttgaaatgcctggaacacctttttttttttaaactgatcggagacactcccattgacacattcctcatggaaatgctggaggcccctcaccagctcgcctag

SEQ ID NO: 210745 - DNA, 1179 bp, Artificial Sequence
  derived and/or modified sequence
atgggctccccaggactacctccccctgcaccgcctggatttagtggccctgtaagtagccctcagatcaactcgacagtcagtctcccaggcggagggagcggccctccagaagacgtcaaacctccggtcctgggagtgagaggactacattgccctcctcctcccggaggccctggagctggcaaacgcctctgtgccatctgcggcgatagatcttctggaaagcactatggagtatatagctgtgaaggttgtaagggcttcttcaagcggaccatccggaaagacctaacctactcttgtcgggacaataaggactgtacggtggataaacggcagaggaacaggtgccagtactgtaggtaccagaagtgccttgctaccggaatgaagcgcgaagcagtacaagaagagcgccagagggggaaggacaaggacggggatggcgagggcgctggcggtgcacctgaggaaatgcctgtagaccgcattttagaagcagagctggccgttgaacagaagtcggatcagggtgtggagggcccagggggaacaggagcccctagtcccaatgatccagtcaccaatatctgccaggcagccgacaagcagctgttcaccctggtggaatgggccaagcgaattccgcacttctcaagcctgcctttggacgaccaggttatcctgctgagagccggttggaacgaactcctgatagccagcttcagccacagatcgatcgatgtgagggacggaatcctcttggccaccggattacatgtgcacagaaatagtgctcactctgccggtgtgggcgctattttcgaccgcgtcctgaccgaactggtgtccaaaatgagagacatgcggatggataaaacagaacttggctgcctgagagccatcatcctttttaaccccgatgccaaagggctgtccaacccgtcagaggtggaagttcttagggagaaggtgtacgcaagcctggagacttattgtaaacagaaatatcctgagcaacagggcaggttcgccaagttgcttctccgccttcctgcgttaagatccatcggcctgaagtgtcttgaacatctcttcttcttcaaactgattggagatactccgattgatacattcctgatggagatgctggaagcgcctcaccagctggcatag

SEQ ID NO: 210746 - DNA, 1170 bp, Artificial Sequence
  derived and/or modified sequence
atggggtctcctggactcccaccgcctgccccacctggcttctccggcccagtcagcagcccgcagatcaatagtactgtgtctcttcccggaggaggtagcggtccaccagaggacgtgaagccaccagtactgggtgttcgagggctgcactgccctccccctcccggtggtcctggcgcaggcaaacgtctttgtgctatctgtggcgaccgatctagcggtaagcactacggagtgtatagttgcgaagggtgtaaaggcttctttaagcgcacaattcgcaaggacctgacatatagctgccgggataataaagactgcactgtggataagcggcaacgcaatcggtgccagtactgtcgataccagaaatgtcttgcaacgggcatgaagcgcgaggctgtacaggaggagaggcaacggggaaaagacaaagatggagatggagaaggcgctggaggggctcctgaggaaatgcctgttgacagaattctcgaggcagagctggcggttgagcagaagtctgaccagggaggaagccagcacatttctaaatctcctaatgaccctgttacaaacatttgccaggctgccgataaacagttatttaccctggttgagtgggccaagcgaatcccacacttctcctccctgccattggacgatcaagtcattctgcttcgcgcaggctggaatgagctgctgattgcctctttttcacaccggtctatagatgtgcgtgacggcatcttgctggccaccggcctccacgtgcaccgcaatagtgcacatagcgcgggagtgggagccatctttgaccgcgtactgaccgaactggttagcaagatgcgagacatgagaatggacaaaacagagctgggatgcctgagagccataattcttttcaaccccgacgccaaaggattaagcaacccatcagaggtcgaagtgctcagagagaaagtctacgcctcccttgaaacttactgcaaacagaaataccccgagcagcagggcaggttcgccaagctgttgctacggttgcccgcactcaggtcaatcgggctaaaatgccttgaacatctcttctttttcaaactcatcggagacactccaattgatactttcctcatggagatgttggaggctccccaccagctggcatag

SEQ ID NO: 210747 - DNA, 1179 bp, Artificial Sequence
  derived and/or modified sequence
atgggcagcccaggcctgcccccacccgcaccccctggcttctccggacccgtgtcctccccgcagatcaactcaaccgtgtcattgcccggagggggttccgggccacccgaagatgtgaagccccctgttctcggggtccgcggtctgcactgcccgcctccccctggcggacctggcgctgggaagagactgtgcgcaatatgcggggatcggagctcaggaaaacactatggcgtgtacagttgcgaaggctgcaaggggtttttcaagcggaccataaggaaggacctgacatactcatgcagggacaataaagactgtacagtcgacaagcggcagcggaataggtgtcagtattgccggtaccaaaagtgcctggctaccggtatgaaaagagaagcggtgcaggaggaacggcagcggggaaaggacaaggacggagacggcgaaggggctggcggtgcacccgaggaaatgcccgtggacagaattttagaagccgaattggcggttgagcagaaatcagaccagggagtggaaggtcccggaggcacaggtgcaccaagtcctaatgatccggtcacaaacatctgtcaggcagccgataagcagctgttcacattagtggagtgggccaaacgcatcccacacttctccagcctgcccctcgacgatcaggtgattctcttacgagctggatggaacgagcttttgatagcctctttctcccacagaagcattgacgtgcgagacggtattttactagctacaggattgcacgttcaccggaatagtgcccacagtgcgggagttggggcaatcttcgaccgcgtgctgactgaactggttagcaagatgcgtgacatgcggatggacaagactgaattgggatgcctcagagccattatattgttcaacccagacgcaaagggtctaagtaacccatccgaagttgaggtgctccgcgagaaggtatacgctagcttggagacctattgcaaacagaaatatccagagcagcagggtaggtttgccaaactgctattacggcttccagcattgcggtccatcggtctgaaatgtttagagcatctattctttttcaaactaatcggggatacccccatcgacacttttctcatggagatgttggaagcaccacaccagctagcgtag

SEQ ID NO: 210748 - DNA, 1170 bp, Artificial Sequence
  derived and/or modified sequence
atgggctcccctgggctgccgcctcccgctcctcctggctttagcggtcccgtgtcttcaccccagattaattccactgtgagcctgcccggtggtggcagtggacctccggaggacgtgaaaccacccgtcctgggagtgagaggcctacattgccctcctcctccgggagggcctggtgccggtaagcgcctttgcgctatctgcggcgacagatcctcaggcaagcattacggggtttactcctgcgagggctgcaagggattctttaagagaaccatacggaaggacctgacatacagctgtcgtgacaacaaggattgcaccgttgacaaacggcagcggaacaggtgccagtattgtaggtatcaaaagtgcctggccacgggaatgaagcgcgaggccgtgcaggaagagcggcagcgcggaaaggacaaggacggagatggggaaggcgcaggaggagcacctgaggagatgcccgttgaccgcattctggaggccgaactcgccgttgagcagaagagtgaccagggcggttcacagcacatcagcaaatctcctaacgatcctgttaccaatatctgtcaggccgcagataaacagttgttcaccctagtcgagtgggccaagcggataccccatttcagttcactcccattagacgaccaggtaatccttcttcgggctggatggaatgagctactcatcgcatccttttcccatcgttcgatcgatgttcgcgacggaattctgctggcaaccgggcttcatgtccaccgcaacagtgctcatagtgccggtgtgggagctatttttgatcgggtcctgactgagctcgtgagcaagatgcgggacatgaggatggacaaaaccgagctgggatgtcttagggcaatcattctgttcaatccagatgctaaggggcttagcaacccctcagaggtggaggtcctgcgcgagaaagtttatgcctccttagaaacctactgtaaacaaaaatatcctgagcagcagggaagatttgccaagttactgctgcgtctgcctgcattgcggtccatcggcctgaagtgtctagagcatctcttcttttttaaattgatcggcgatactccgattgacaccttcctcatggagatgctggaggctccacaccagctggcttag

SEQ ID NO: 210749 - DNA, 1170 bp, Artificial Sequence
  derived and/or modified sequence
atgggaagccccggtcttccccctcccgcaccccctggattcagtgggcctgtaagttccccgcaaatcaattctactgtgagcctacctggcggaggttccggaccaccggaagatgttaaaccaccagttctcggggtgcgcggattgcactgccccccaccaccaggaggtccaggggctgggaagcggttatgcgcaatatgcggtgacagaagctctggcaaacactatggggtgtattcttgcgagggctgcaaagggttctttaagaggacaattaggaaggacctaacgtactcttgccgtgacaataaggactgtaccgtcgacaaaagacagcggaatcgttgccagtactgtcggtaccagaaatgcctggctacgggaatgaagcgggaggcagtccaagaggaaaggcaacgaggcaaggataaagacggagatggagagggtgccggaggggctccggaggaaatgcccgtagaccggatattagaagccgagctcgccgtagaacagaaatccgatcaggggggatcccagcatataagtaagtctcctaatgacccagtgacaaatatctgtcaggctgctgataaacagctttttacattagtagagtgggcaaagaggatcccgcattttagctccctgccgctggacgatcaggtgatattgttgcgcgctggatggaatgaattgctgatagcttccttttcacaccgaagtattgatgttcgggacggaatcctgctagcaaccggcctgcatgtccacagaaacagcgctcattccgctggggtgggagccattttcgatagggtcttgacagagctcgtttccaagatgagggacatgcgcatggacaaaaccgagctaggttgcctgagggccatcatcctgttcaatcctgatgcaaaaggcctttctaacccgtccgaagtcgaggtgctccgagaaaaggtgtacgccagcctagagacgtactgcaagcaaaaatacccagagcaacaggggagattcgcaaagctgctgctacggcttcctgctcttcggagcatcggactcaagtgcctcgagcacctgttcttctttaaattgattggggatactcctatcgacacgttcctgatggaaatgctggaggccccacaccaactcgcgtag

SEQ ID NO: 210750 - DNA, 1179 bp, Artificial Sequence
  derived and/or modified sequence
atgggtagtcctggcctcccgcctcccgcaccgccaggcttctccggcccagtatcgagtccacagattaacagtaccgtctccctgcccggaggcggatctggccctcctgaggatgtcaaacctccggtgttgggagtgcgcggacttcattgtccacctcctccaggcggtcccggtgcgggaaagcgtctctgtgccatctgtggggatcggtcatcaggtaagcactatggcgtgtatagctgtgaaggatgcaaaggtttcttcaaaaggactattcggaaagacctaacatacagctgcagggacaacaaggactgcacggtcgataaacgtcagcgcaacagatgccagtactgccgctatcaaaaatgcctagccactggcatgaagagggaagccgtccaggaggagcgccagcgcggaaaggacaaggacggcgacggagaaggtgctggaggggcacccgaggagatgcccgtggaccgcattctggaagccgagctggctgttgaacagaagtcagatcagggggtggagggtcctggagggacaggtgctcccagtcccaacgacccagtcacaaatatctgtcaggcagcagataagcagttattcacattggtcgagtgggccaagagaatcccacatttttcaagtctgcccctggatgatcaggttatactgctgagggccggatggaatgagctccttattgcctctttctcacatcggtccatcgacgttagggatggaatcttgcttgctaccggccttcacgtacaccgcaatagtgcccactcagctggggttggggctatatttgaccgggttctgacagagctggtgagtaagatgagagacatgcgcatggataagacggaattgggctgcctacgggcaataatacttttcaatccagacgccaaagggctctcaaacccctctgaggttgaggtgctccgggaaaaagtctatgcatcactggagacctactgtaagcagaagtaccccgaacagcaaggcagatttgccaagttgttgctgagactccctgctctgcgatcaatcgggttgaagtgcctcgaacatttgtttttttttaaattgatcggggacactcccattgacactttcctgatggagatgctcgaagcgcctcaccagctggcctag

SEQ ID NO: 210751 - DNA, 1179 bp, Artificial Sequence
  derived and/or modified sequence
atggggtcacccggtctgccaccgccagcccctccgggattttctggtcctgtcagttccccacaaatcaacagcacagtatccctgcccggagggggaagtggaccccctgaggatgttaaaccccctgtgctcggtgttagagggttacactgtccaccacctcccggaggcccaggcgcaggaaagagactgtgcgctatttgcggagatagatcttccgggaagcactacggcgtctacagctgcgagggctgtaaaggatttttcaaaaggaccatacgcaaagatcttacttatagttgcagagataacaaagactgcacggtagataagcggcagcgtaacaggtgccagtactgcaggtatcagaagtgcctggctacaggaatgaaacgggaggccgtccaagaagagagacagcggggaaaagacaaagacggtgacggcgagggcgctggcggtgcccctgaggagatgcccgtcgatcgcatcttagaggccgagctcgctgtagagcaaaaatcggatcaaggcgtggaggggcctggcggaaccggtgctcccagccctaacgaccccgtgacgaacatctgtcaggccgctgacaaacagctgtttactctagtagaatgggcaaaacggattccccatttttctagtctgccccttgacgatcaggtgattctgcttcgtgcgggttggaacgagctgctgattgccagtttcagtcataggagtattgatgttagggatggcatactgctggcgactgggctgcacgtccatcgcaactcagctcactcagccggtgtgggggctatctttgacagagtcctgaccgaactcgtaagcaaaatgcgcgatatgaggatggataaaaccgagctaggctgcttgagggcgatcattcttttcaaccctgacgctaagggactgtccaatccttccgaagttgaggtcctaagagaaaaggtttacgcctctctagagacctattgtaagcagaaatacccagagcaacaggggcgttttgcaaaacttctgttacggctgcctgctctgcggagtatcggtctgaaatgtcttgaacacctctttttctttaaacttattggcgatacgcctatcgacacttttttaatggagatgctggaggcccctcaccaactagcctag

SEQ ID NO: 210752 - DNA, 1179 bp, Artificial Sequence
  derived and/or modified sequence
atgggatcccccggtttaccaccgcctgccccaccaggattctcaggccctgtaagctcaccccaaatcaacagtacagtttctcttcctggcggaggatcaggaccacccgaggatgtaaaacctcctgtcctgggtgtgcgaggcttacattgcccgcctccacctggtggcccaggcgctggaaagcgcctatgtgcaatctgcggtgaccgttccagtggtaagcattacggagtatacagctgcgaggggtgcaagggtttcttcaaacgcacaatcaggaaagacctgacatactcctgtagagacaacaaagattgtactgttgataaacgtcaacgcaacagatgccagtactgcagatatcagaagtgtctggctaccgggatgaaaagggaggccgtgcaggaggaaaggcaaagaggcaaagataaggatggagacggggaaggggcaggcggtgcaccggaagagatgccagtggatcggattctggaggcagaacttgcggtggagcagaagtccgaccaaggggttgagggaccgggaggcacaggggctccgtctcccaacgaccctgttacgaacatttgccaagctgccgataagcaacttttcactctggtggaatgggcaaagaggatcccccacttttcatccctacctctggacgatcaagttatcttgctgcgcgcaggatggaacgaattactgattgcctccttttcgcacagaagcatcgatgttcgggatggcatcctcctggctacaggcctgcatgtgcacaggaacagtgctcacagtgctggagtgggagctatctttgaccgcgttctgacagagcttgtttctaaaatgcgcgacatgcggatggataaaacggagttgggatgtctccgggcaataattttgtttaatcctgatgccaaaggattatccaatccttcggaggtagaagtcctgcgagaaaaggtgtatgcctcacttgaaacctactgtaaacaaaaataccccgagcagcagggacgctttgccaagctgcttcttcggttacccgcattgcgaagtatcggcttgaagtgcctagagcacctctttttttttaagcttatcggcgatacaccaatcgacacttttcttatggaaatgttagaggctcctcatcagctggcgtag

SEQ ID NO: 210753 - DNA, 1170 bp, Artificial Sequence
  derived and/or modified sequence
atggggagccctggtctccctcctccagcacctcccggtttcagcgggccagtgtcttccccccaaatcaacagcactgtgagtctgcccggtggcggtagcgggcctccagaggatgtgaaaccaccggtcctgggggtcagagggctgcattgtcctcctccccctggcggtcctggagctggcaaaaggttatgtgctatctgcggagatcgtagctcaggtaagcactacggcgtttacagctgtgagggctgcaagggctttttcaagagaacaatcagaaaggatcttacctactcctgccgcgataataaagattgcactgtcgacaagcgccagcggaatcggtgccaatactgcaggtaccaaaaatgcttagctaccggcatgaagcgcgaggctgtacaagaagagaggcaacgaggaaaggacaaagatggcgacggtgaaggcgctggcggtgcgcctgaagagatgcccgttgatagaatcttggaggcagagttggccgtcgaacagaaaagtgaccaggggggaagccagcatattagtaagtctccaaatgaccccgtaacgaacatttgccaggctgctgacaaacaactgtttacactcgtcgagtgggccaagcgcattcctcacttttctagcctcccacttgacgaccaggtcattttactcagagcaggatggaacgagctattgattgcttccttctcacacaggtccattgacgtcagagatgggattctccttgccacgggcctccacgtccatcgcaactccgcccattcagcgggagtcggcgcaatcttcgatagagttctgacagaactggtgagcaagatgagggatatgcgcatggataaaacggagcttggttgcctgagggccatcattttgttcaatccggatgcaaaggggctgagtaatccttctgaagtggaagtccttcgagaaaaggtctacgcgtctttggaaacatactgtaaacagaaatacccagagcaacaggggagattcgccaaactgctcctgaggctgcccgctctgcggtccattggactcaagtgcctcgagcatctcttctttttcaagctgattggcgacaccccaattgacacatttttgatggagatgctggaggcccctcaccagctggcttag

SEQ ID NO: 210754 - DNA, 1170 bp, Artificial Sequence
  derived and/or modified sequence
atgggaagccccggtttgccaccacccgctcctcctggcttttccggtcccgtgagcagcccgcagatcaattctacagtttctttgccgggaggtggaagcggaccaccagaggatgtcaaacctcccgtgctgggtgtcagaggactgcactgccctccacctccaggcggtcccggagctgggaaacggctgtgcgcaatctgtggggacaggtctagcggcaagcactatggcgtttatagctgcgagggttgcaaggggtttttcaagagaactattaggaaggacttgacttatagctgcagagataataaggattgcactgtagataaacgtcagcgaaatcgatgccagtactgcagatatcagaagtgtttggcaacagggatgaagagggaggctgtgcaggaggagaggcaacgcggtaaggacaaagacggagacggcgaaggggctggcggagcaccggaggagatgccagtggatcgaattctggaggcagagctggccgtggaacaaaagtccgatcaggggggttctcagcacatctcaaaatccccaaacgatcccgtgactaatatctgtcaggcagctgataaacaactgtttacattggtggagtgggcaaaaagaatcccacattttagctcattgcctctcgatgaccaggtcatactgttgcgggcaggctggaatgaactattgatcgcctccttcagtcaccggtccatcgatgtccgcgatggcatcctcttagccaccggactccacgtccaccggaactcggcacactcagcaggggtaggtgctatcttcgacagggtgttgacagaactcgtatccaagatgcgtgatatgagaatggacaagacagagctggggtgtctccgcgctatcattctgttcaaccccgacgccaagggcctgtccaacccttccgaagtagaggtccttcgcgagaaggtttacgcaagtctggagacttattgcaaacaaaagtatcctgagcagcagggaaggttcgcaaaattattgctgcggctacctgcactgcgatctatcgggctgaaatgcctggaacatctttttttcttcaaactgattggagacacccctattgacacctttttgatggagatgcttgaagcccctcaccagctggcgtag

SEQ ID NO: 210755 - DNA, 2908 bp, Artificial Sequence
  derived and/or modified sequence
ggcgggaactcgcgccgagacttcccgtctgtacaaagatggctgccacattggcgctgtcattttggtactgagcagagcgacgggcttaattcgacccaatccaggccagagtctttctctcaggggcttcctcgtgctcagctaatcctccgatcaatccttgggaatccctgggacctcttcggtatccctactctcagccagggatcatgtcttgggccgctcgcccgcccttcctccctcagcggcatgccgcagggcagtgtgggccggtgggggtgcgaaaagaaatgcattgtggggtcgcgtcccggtggcggcggcgacggccctggctggatcccgcagcggcggcggcggcggcggtggcaggcggagaacaacaaaccccggagccggagccaggggaggctggacgggacgggatgggcgacagcgggcgggactcccgaagcccagacagctcctccccaaatccccttccccagggagtccctcccccttctcctcctgggccacccctacccccttcaacagctccatcccttggaggctctggggccccacccccacccccgatgccaccacccccactgggctctccctttccagtcatcagttcttccatggggtcccctggtctgccccctccagctcccccaggattctccgggcctgtcagcagcccccagattaactcaacagtgtcactccctgggggtgggtctggcccccctgaagatgtgaagccaccagtcttaggggtccggggcctgcactgtccaccccctccaggtggccctggggctggcaaacggctatgtgcaatctgcggggacagaagctcaggcaaacactacggggtttacagctgtgagggttgcaagggcttcttcaaacgcaccatccgcaaagaccttacatactcttgccgggacaacaaagactgcacagtggacaagcgccagcggaaccgctgtcagtactgccgctatcagaagtgcctggccactggcatgaagagggaggcggtacaggaggagcgtcagcggggaaaggacaaggatggggatggggagggggctgggggagcccccgaggagatgcctgtggacaggatcctggaggcagagcttgctgtggaacagaagagtgaccagggcgttgagggtcctgggggaaccgggggtagcggcagcagcccaaatgaccctgtgactaacatctgtcaggcagctgacaaacagctattcacgcttgttgagtgggcgaagaggatcccacacttttcctccttgcctctggatgatcaggtcatattgctgcgggcaggctggaatgaactcctcattgcctccttctcacaccgatccattgatgttcgagatggcatcctccttgccacaggtcttcacgtgcaccgcaactcagcccattcagcaggagtaggagccatctttgatcgggtgctgacagagctagtgtccaaaatgcgtgacatgaggatggacaagacagagcttggctgcctgagggcaatcattctgtttaatccagatgccaagggcctctccaaccctagtgaggtggaggtcctgcgggagaaagtgtatgcatcactggagacctactgcaaacagaagtaccctgagcagcagggacggtttgccaagctgctgctacgtcttcctgccctccggtccattggccttaagtgtctagagcatctgtttttcttcaagctcattggtgacacccccatcgacaccttcctcatggagatgcttgaggctccccatcaactggcctgagctcagacccagacgtggtgcttctcacactggaggagcacacatccaagagggactccaagccctggggcagggtggggggccatgttcccagaaccttgatggggtgagaagtacagggcagaaccaagaacataaaccctccaagggatctgcttgatatcccaagttggaagggaccccagatacctgtgaggactggttgtctctcttcggtggccttgagtctctgaatttgtcgggttctcccatgatttggggtgatttctcaccctctgtccttcccccagcacaaagcactggccttgcctccaggaccttgcttccttctcatcttgcctcattttgcttcccatctgaagagtggaaatggggaactcccccagaggtggatactggggggcaggcctcccaagctgatggacatgagagtagggccctgacaggccttcctcctctcaaacctggcagatgggggcctctctggaagagggaggggccctgtcactgtccagagtctctttttacacttcacctccttctgcagtcagactgaaatataaaaaaggtggtggtggtggtgaaggggctggtggagatgtaggaaccgatctgctatttttaatttcctgtgaggatagagacttgcagttagactcaaagaagtactgtactttcccaggttgactaagaaatgccagtggtggaggtgggtgtttgggaaaggcagggccctgaaatggcctgtccctagggctctccaagcactagccttcccagcttcccgccgccccccctatctcttcctgtctaacttggggaaggggcctgggctgtgaggacagggcccccacaggggatggtttcacgagtgtagtcccggaggccttccctttacagctctcctccagccctgggcacatagcataggctggggacacaggatcctggcctgagaattgaggggaggtggccagcccgcagaggtggggtgctggggctgcatgatttttgccctgcgtcccttctctttggggctcctttcccctctcatacataaaatcgctttcaaattaaaatcgctgttttctgga

SEQ ID NO: 210756 - DNA, 2909 bp, Artificial Sequence
  derived and/or modified sequence
ggcgggaactcgcgccgagacttcccgtctgtacaaagatggctgccacattggcgctgtcattttggtactgagcagagcgacgggcttaattcgacccaatccaggccagagtctttctctcaggggcttcctcgtgctcagctaatcctccgatcaatccttgggaatccctgggacctcttcggtatccctactctcagccagggatcatgtcttgggccgctcgcccgcccttcctccctcagcggcatgccgcagggcagtgtgggccggtgggggtgcgaaaagaaatgcattgtggggtcgcgtcccggtggcggcggcgacggccctggctggatcccgcagcggcggcggcggcggcggtggcaggcggagaacaacaaaccccggagccggagccaggggaggctggacgggacgggatgggcgacagcgggcgggactcccgaagcccagacagctcctccccaaatccccttccccagggagtccctcccccttctcctcctgggccacccctacccccttcaacagctccatcccttggaggctctggggccccacccccacccccgatgccaccacccccactgggctctccctttccagtcatcagttcttccatggggtcccctggtctgccccctccagctcccccaggattctccgggcctgtcagcagcccccagattaactcaacagtgtcactccctgggggtgggtctggcccccctgaagatgtgaagccaccagtcttaggggtccggggcctgcactgtccaccccctccaggtggccctggggctggcaaacggctatgtgcaatctgcggggacagaagctcaggcaaacactacggggtttacagctgtgagggttgcaagggcttcttcaaacgcaccatccgcaaagaccttacatactcttgccgggacaacaaagactgcacagtggacaagcgccagcggaaccgctgtcagtactgccgctatcagaagtgcctggccactggcatgaagagggaggcggtacaggaggagcgtcagcggggaaaggacaaggatggggatggggagggggctgggggagcccccgaggagatgcctgtggacaggatcctggaggcagagcttgctgtggaacagaagagtgaccagggcgttgagggtcctgggggaaccgggggtagcggcagcagcccaaatgaccctgtgactaacatctgtcaggcagctgacaaacagctattcacgcttgttgagtgggcgaagaggatcccacacttttcctccttgcctctggatgatcaggtcatattgctgcgggcaggctggaatgaactcctcattgcctccttttcacaccgatccattgatgttcgagatggcatcctccttgccacaggtcttcacgtgcaccgcaactcagcccattcagcaggagtaggagccatctttgatcgggtgctgacagagctagtgtccaaaatgcgtgacatgaggatggacaagacagagcttggctgcctgagggcaatcattctgtttaatccagatgccaagggcctctccaaccctagtgaggtggaggtcctgcgggagaaagtgtatgcatcactggagacctactgcaaacagaagtaccctgagcagcagggacggtttgccaagctgctgctacgtcttcctgccctccggtccattggccttaagtgtctagagcatctgtttttcttcaagctcattggtgacacccccatcgacaccttcctcatggagatgcttgaggctccccatcaactggcctgagctcagacccagacgtggtgcttctcacactggaggagcacacatccaagagggactccaagccctggggcagggtggggggccatgttcccagaaccttgatggggtgagaagtacagggcagaaccaagaacataaaccctccaagggatctgcttgatatcccaagttggaagggaccccagatacctgtgaggactggttgtctctcttcggtggccttgagtctctgaatttgtcggggtctcccatgatttggggtgatttctcaccctctgtccttcccccagcacaaagcactggccttgcctccaggaccttgcttccttctcatcttgcctcattttgcttcccatctgaagagtggaaatggggatctcccccagaggtggatactggggggcaggcctcccaagctgatggacatgagagtagggccctgacaggccttcctcctctcaaacctggcagatgggggcctctctggaagagggaggggccctgtcactgtccagagtctctttttacacttcacctccttctgcagtcagactgaaatataaaaaaggtggtggtggtggtgaaggggctggtggagatgtaggaaccgatctgctatttttaatttcctgtgaggatagagacttgcagttagactcaaagaagtactgtactttcccaggttgactaagaaatgccagtggtggaggtgggtgtttgggaaaggcagggccctgaaatggcctgtccctagggctctccaagcactagccttcccagcttcccgccgcccccccccatctcttcctgtctaacttggggaaggggcctgggctgtgaggacagggcccccacaggggatggtttcacgagtgtagtcccggaggccttccctttacagctctcctccagccctgggcacatagcataggctggggacacaggatcctggcctgagaattgaggggaggtggccagcccgcagaggtggggtgctggggctgcatgatttttgccctgcgtcccttctctttggggctcctttcccctctcatacataaaatcgctttcaaattaaaatcgctgttttctgga

SEQ ID NO: 210757 - DNA, 2908 bp, Artificial Sequence
  derived and/or modified sequence
ggcgggaactcgcgccgagacttcccgtctgtacaaagatggctgccacattggcgctgtcattttggtactgagcagagcgacgggcttaattcgacccaatccaggccagagtctttctctcaggggcttcctcgtgctcagctaatcctccgatcaatccttgggaatccctgggacctcttcggtatccctactctcagccagggatcatgtcttgggccgctcgcccgcccttcctccctcagcggcatgccgcagggcagtgtgggccggtgggggtgcgaaaagaaatgcattgtggggtcgcgtcccggtggcggcggcgacggccctggctggatcccgcagcggcggcggcggcggcggtggcaggcggagaacaacaaaccccggagccggagccaggggaggctggacgggacgggatgggcgacagcgggcgggactcccgaagcccagacagctcctccccaaatccccttccccagggagtccctcccccttctcctcctgggccacccctacccccttcaacagctccatcccttggaggctctggggccccacccccacccccgatgccaccacccccactgggctctccctttccagtcatcagttcttccatggggtcccctggtctgccccctccagctcccccaggattctccgggcctgtcagcagcccccagattaactcaacagtgtcactccctgggggtgggtctggcccccctgaagatgtgaagccaccagtcttaggggtccggggcctgcactgtccaccccctccaggtggccctggggctggcaaacggctatgtgcaatctgcggggacagaagctcaggcaaacactacggggtttacagctgtgagggttgcaagggcttcttcaaacgcaccatccgcaaagaccttacatactcttgccgggacaacaaagactgcacagtggacaagcgccagcggaaccgctgtcagtactgccgctatcagaagtgcctggccactggcatgaagagggaggcggtacaggaggagcgtcagcggggaaaggacaaggatggggatggggagggggctgggggagcccccgaggagatgcctgtggacaggatcctggaggcagagcttgctgtggaacagaagagtgaccagggcgttgagggtcctgggggaaccgggggtagcggcagcagcccaaatgaccctgtgactaacatctgtcaggcagctgacaaacagctattcacgcttgttgagtgggcgaagaggatcccacacttttcctccttgcctctggatgatcaggtcatattgctgcgggcaggctggaatgaactcctcattgcctccttttcacaccgatccattgatgttcgagatggcatcctccttgccacaggtcttcacgtgcaccgcaactcagcccattcagcaggagtaggagccatctttgatcgggtgctgacagagctagtgtccaaaatgcgtgacatgaggatggacaagacagagcttggctgcctgagggcaatcattctgtttaatccagatgccaagggcctctccaaccctagtgaggtggaggtcctgcgggagaaagtgtatgcatcactggagacctactgcaaacagaagtaccctgagcagcagggacggtttgccaagctgctgctacgtcttcctgccctccggtccattggccttaagtgtctagagcatctgtttttcttcaagctcattggtgacacccccatcgacaccttcctcatggagatgcttgaggctccccatcaactggcctgagctcagacccagacgtggtgcttctcacactggaggagcacacatccaagagggactccaagccctggggcagggtggggggccatgttcccagaaccttgatggggtgagaagtacagggcagaaccaagaacataaaccctccaagggatctgcttgatatcccaagttggaagggaccccagatacctgtgaggactggttgtctctcttcggtggccttgagtctctgaatttgtcggggtctcccatgatttggggtgatttctcaccctctgtccttcccccagcacaaagcactggccttgcctccaggaccttgcttccttctcatcttgcctcattttgcttcccatctgaagagtggaaatggggatctcccccagaggtggatactggggggcaggcctcccaagctgatggacatgagagtagggccctgacaggccttcctcctctcaaacctggcagatgggggcctctctggaagagggaggggccctgtcactgtccagagtctctttttacacttcacctccttctgcagtcagactgaaatataaaaaaggtggtggtggtggtgaaggggctggtggagatgtaggaaccgatctgctatttttaatttcctgtgaggatagagacttgcagttagactcaaagaagtactgtactttcccaggttgactaagaaatgccagtggtggaggtgggtgtttgggaaaggcagggccctgaaatggcctgtccctagggctctccaagcactagccttcccagcttcccgccgccccccccatctcttcctgtctaacttggggaaggggcctgggctgtgaggacagggcccccacaggggatggtttcacgagtgtagtcccggaggccttccctttacagctctcctccagccctgggcacatagcataggctggggacacaggatcctggcctgagaattgaggggaggtggccagcccgcagaggtggggtgctggggctgcatgatttttgccctgcgtcccttctctttggggctcctttcccctctcatacataaaatcgctttcaaattaaaatcgctgttttctgga

SEQ ID NO: 210758 - DNA, 2894 bp, Artificial Sequence
  derived and/or modified sequence
ggcgggaactcgcgccgagacttcccgtctgtacaaagatggctgccacattggcgctgtcattttggtactgagcagagcgacgggcttaattcgacccaatccaggccagagtctttctctcaggggcttcctcgtgctcagctaatcctccgatcaatccttgggaatccctgggacctcttcggtatccctactctcagccagggatcatgtcttgggccgctcgcccgcccttcctccctcagcggcatgccgcagggcagtgtgggccggtgggggtgcgaaaagaaatgcattgtggggtcgcgtcccggtggcggcggcgacggccctggctggatcccgcagcggcggcggcggcggcggtggcaggcggagaacaacaaaccccggagccggagccaggggaggctggacgggacgggatgggcgacagcgggcgggactcccgaagcccagacagctcctccccaaatccccttccccagggagtccctcccccttctcctcctgggccacccctacccccttcaacagctccatcccttggaggctctggggccccacccccacccccgatgccaccacccccactgggctctccctttccagtcatcagttcttccatggggtcccctggtctgccccctccagctcccccaggattctccgggcctgtcagcagcccccagattaactcaacagtgtcactccctgggggtgggtctggcccccctgaagatgtgaagccaccagtcttaggggtccggggcctgcactgtccaccccctccaggtggccctggggctggcaaacggctatgtgcaatctgcggggacagaagctcaggcaaacactacggggtttacagctgtgagggttgcaagggcttcttcaaacgcaccatccgcaaagaccttacatactcttgccgggacaacaaagactgcacagtggacaagcgccagcggaaccgctgtcagtactgccgctatcagaagtgcctggccactggcatgaagagggaggcggtacaggaggagcgtcagcggggaaaggacaaggatggggatggggagggggctgggggagcccccgaggagatgcctgtggacaggatcctggaggcagagcttgctgtggaacagaagagtgaccagggcgttgagggtcctgggggaaccgggggtagcggcagcagcccaaatgaccctgtgactaacatctgtcaggcagctgacaaacagctattcacgcttgttgagtgggcgaagaggatcccacacttttcctccttgcctctggatgatcaggtcatattgctgcgggcaggctggaatgaactcctcattgcctccttttcacaccgatccattgatgttcgagatggcatcctccttgccacaggtcttcacgtgcaccgcaactcagcccattcagcaggagtaggagccatctttgatcgggtgctgacagagctagtgtccaaaatgcgtgacatgaggatggacaagacagagcttggctgcctgagggcaatcattctgtttaatccagatgccaagggcctctccaaccctagtgaggtggaggtcctgcgggagaaagtgtatgcatcactggagacctactgcaaacagaagtaccctgagcagcagggacggtttgccaagctgctgctacgtcttcctgccctccggtccattggccttaagtgtctagagcatctgtttttcttcaagctcattggtgacacccccatcgacaccttcctcatggagatgcttgaggctccccatcaactggcctgagctcagacccagacgtggtgcttctcacactggaggagcacacatccaagagggactccaagccctggggcagggtggggggccatgttcccagaaccttgatggggtgagaagtacagggcagaaccaagaacataaaccctccaagggatctgcttgatatcccaagttggaagggaccccagatacctgtgaggactggttgtctctcttcggtggccttgagtctctgaatttgtcggggtctcccatgatttggggtgatttctcaccctctgtccttcccccagcacaaagcactggccttgcctccaggaccttgcttccttctcatcttgcctcattttgcttcccatctgaagagtggaaatggggatctcccccagaggtggatactggggggcaggcctcccaagctgatggacatgagagtagggccctgacaggccttcctcctctcaaacctggcagatgggggcctctctggaagagggaggggccctgtcactgtccagagtctctttttacacttcacctccttctgcagtcagactgaaatataaaaaaggtggtggtggtggtgaaggggctggtggagatgtaggaaccgatctgctatttttaatttcctgtgaggatagagacttgcagttagactcaaagaagtactgtactttcccaggttgactaagaaatgccagtggtggaggtgggtgtttgggaaaggcagggccctgaaatggcctgtccctagggctctccaagcactagccttcccagcttcccgccgcccccccccatctcttcctgtctaacttggggaaggggcctgggctgtgaggacagggcccccacaggggatggtttcacgagtgtagtcccggaggccttccctttacagctctcctccagccctgggcacatagcataggctggggacacaggatcctggcctgagaattgaggggaggtggccagcccgcagaggtggggtgctggggctgcatgatttttgccctgcgtcccttctctttggggctcctttcccctctcatacataaaatcgctttcaaattaaaa

SEQ ID NO: 210759 - DNA, 2908 bp, Artificial Sequence
  derived and/or modified sequence
ggcgggaactcgcgccgagacttcccgtctgtacaaagatggctgccacattggcgctgtcattttggtactgagcagagcgacgggcttaattcgacccaatccaggccagagtctttctctcaggggcttcctcgtgctcagctaatcctccgatcaatccttgggaatccctgggacctcttcggtatccctactctcagccagggatcatgtcttgggccgctcgcccgcccttcctccctcagcggcatgccgcagggcagtgtgggccggtgggggtgcgaaaagaaatgcattgtggggtcgcgtcccggtggcggcggcgacggccctggctggatcccgcagcggcggcggcggcggcggtggcaggcggagaacaacaaaccccggagccggagccaggggaggctggacgggacgggatgggcgacagcgggcgggactcccgaagcccagacagctcctccccaaatccccttccccagggagtccctcccccttctcctcctgggccacccctacccccttcaacagctccatcccttggaggctctggggccccacccccacccccgatgccaccacccccactgggctctccctttccagtcatcagttcttccatggggtcccctggtctgccccctccagctcccccaggattctccgggcctgtcagcagcccccagattaactcaacagtgtcactccctgggggtgggtctggcccccctgaagatgtgaagccaccagtcttaggggtccggggcctgcactgtccaccccctccaggtggccctggggctggcaaacggctatgtgcaatctgcggggacagaagctcaggcaaacactacggggtttacagctgtgagggttgcaagggcttcttcaaacgcaccatccgcaaagaccttacatactcttgccgggacaacaaagactgcacagtggacaagcgccagcggaaccgctgtcagtactgccgctatcagaagtgcctggccactggcatgaagagggaggcggtacaggaggagcgtcagcggggaaaggacaaggatggggatggggagggggctgggggagcccccgaggagatgcctgtggacaggatcctggaggcagagcttgctgtggaacagaagagtgaccagggcgttgagggtcctgggggaaccgggggtagcggcagcagcccaaatgaccctgtgactaacatctgtcaggcagctgacaaacagctattcacgcttgttgagtgggcgaagaggatcccacacttttcctccttgcctctggatgatcaggtcatattgctgcgggcaggctggaatgaactcctcattgcctccttttcacaccgatccattgatgttcgagatggcatcctccttgccacaggtcttcacgtgcaccgcaactcagcccattcagcaggagtaggagccatctttgatcgggtgctgacagagctagtgtccaaaatgcgtgacatgaggatggacaagacagagcttggctgcctgagggcaatcattctgtttaatccagatgccaagggcctctccaaccctagtgaggtggaggtcctgcgggagaaagtgtatgcatcactggagacctactgcaaacagaagtaccctgagcagcagggacggtttgccaagctgctgctacgtcttcctgccctccggtccattggccttaagtgtctagagcatctgtttttcttcaagctcattggtgacacccccatcgacaccttcctcatggagatgcttgaggctccccatcaactggcctgagctcagacccagacgtggtgcttctcacactggaggagcacacatccaagagggactccaagccctggggcagggtggggggccatgttcccagaaccttgatggggtgagaagtacagggcagaaccaagaacataaaccctccaagggatctgcttgatatcccaagttggaagggaccccagatacctgtgaggactggttgtctctcttcggtggccttgagtctctgaatttgtcggggtctcccatgatttggggtgatttctcaccctctgtccttcccccagcacaaagcactggccttgcctccaggaccttgcttccttctcatcttgcctcattttgcttcccatctgaagagtggaaatggggaactcccccagaggtggatactggggggcaggcctcccaagctgatggacatgagagtagggccctgacaggccttcctcctctcaaacctggcagatgggggcctctctggaagagggaggggccctgtcactgtccagagtctctttttacacttcacctccttctgcagtcagactgaaatataaaaaaggtggtggtggtggtgaaggggctggtggagatgtaggaaccgatctgctatttttaatttcctgtgaggatagagacttgcagttagactcaaagaagtactgtactttcccaggttgactaagaaatgccagtggtggaggtgggtgtttgggaaaggcagggccctgaaatggcctgtccctagggctctccaagcactagccttcccagcttcccgccgccccccccatctcttcctgtctaacttggggaaggggcctgggctgtgaggacagggcccccacaggggatggtttcacgagtgtagtcccggaggccttccctttacagctctcctccagccctgggcacatagcataggctggggacacaggatcctggcctgagaattgaggggaggtggccagcccgcagaggtggggtgctggggctgcatgatttttgccctgcgtcccttctctttggggctcctttcccctctcatacataaaatcgctttcaaattaaaatcgctgttttctgga

SEQ ID NO: 210760 - DNA, 2869 bp, Artificial Sequence
  derived and/or modified sequence
caaagatggctgccacattggcgctgtcattttggtactgagcagagcgacgggcttaattcgacccaatccaggccagagtctttctctcaggggcttcctcgtgctcagctaatcctccgatcaatccttgggaatccctgggacctcttcggtatccctactctcagccagggatcatgtcttgggccgctcgcccgcccttcctccctcagcggcatgccgcagggcagtgtgggccggtgggggtgcgaaaagaaatgcattgtggggtcgcgtcccggtggcggcggcgacggccctggctggatcccgcagcggcggcggcggcggcggtggcaggcggagaacaacaaaccccggagccggagccaggggaggctggacgggacgggatgggcgacagcgggcgggactcccgaagcccagacagctcctccccaaatccccttccccagggagtccctcccccttctcctcctgggccacccctacccccttcaacagctccatcccttggaggctctggggccccacccccacccccgatgccaccacccccactgggctctccctttccagtcatcagttcttccatggggtcccctggtctgccccctccagctcccccaggattctccgggcctgtcagcagcccccagattaactcaacagtgtcactccctgggggtgggtctggcccccctgaagatgtgaagccaccagtcttaggggtccggggcctgcactgtccaccccctccaggtggccctggggctggcaaacggctatgtgcaatctgcggggacagaagctcaggcaaacactacggggtttacagctgtgagggttgcaagggcttcttcaaacgcaccatccgcaaagaccttacatactcttgccgggacaacaaagactgcacagtggacaagcgccagcggaaccgctgtcagtactgccgctatcagaagtgcctggccactggcatgaagagggaggcggtacaggaggagcgtcagcggggaaaggacaaggatggggatggggagggggctgggggagcccccgaggagatgcctgtggacaggatcctggaggcagagcttgctgtggaacagaagagtgaccagggcgttgagggtcctgggggaaccggggctccttctccaaatgaccctgtgactaacatctgtcaggcagctgacaaacagctattcacgcttgttgagtgggcgaagaggatcccacacttttcctccttgcctctggatgatcaggtcatattgctgcgggcaggctggaatgaactcctcattgcctccttttcacaccgatccattgatgttcgagatggcatcctccttgccacaggtcttcacgtgcaccgcaactcagcccattcagcaggagtaggagccatctttgatcgggtgctgacagagctagtgtccaaaatgcgtgacatgaggatggacaagacagagcttggctgcctgagggcaatcattctgtttaatccagatgccaagggcctctccaaccctagtgaggtggaggtcctgcgggagaaagtgtatgcatcactggagacctactgcaaacagaagtaccctgagcagcagggacggtttgccaagctgctgctacgtcttcctgccctccggtccattggccttaagtgtctagagcatctgtttttcttcaagctcattggtgacacccccatcgacaccttcctcatggagatgcttgaggctccccatcaactggcctgagctcagacccagacgtggtgcttctcacactggaggagcacacatccaagagggactccaagccctggggcagggtggggggccatgttcccagaaccttgatggggtgagaagtacagggcagaaccaagaacataaaccctccaagggatctgcttgatatcccaagttggaagggaccccagatacctgtgaggactggttgtctctcttcggtggccttgagtctctgaatttgtcggggtctcccatgatttggggtgatttctcaccctctgtccttcccccagcacaaagcactggccttgcctccaggaccttgcttccttctcatcttgcctcattttgcttcccatctgaagagtggaaatggggatctcccccagaggtggatactggggggcaggcctcccaagctgatggacatgagagtagggccctgacaggccttcctcctctcaaacctggcagatgggggcctctctggaagagggaggggccctgtcactgtccagagtctctttttacacttcacctccttctgcagtcagactgaaatataaaaaaggtggtggtggtggtgaaggggctggtggagatgtaggaaccgatctgctatttttaatttcctgtgaggatagagacttgcagttagactcaaagaagtactgtactttcccaggttgactaagaaatgccagtggtggaggtgggtgtttgggaaaggcagggccctgaaatggcctgtccctagggctctccaagcactagccttcccagcttcccgccgcccccccccatctcttcctgtctaacttggggaaggggcctgggctgtgaggacagggcccccacaggggatggtttcacgagtgtagtcccggaggccttccctttacagctctcctccagccctgggcacatagcataggctggggacacaggatcctggcctgagaattgaggggaggtggccagcccgcagaggtggggtgctggggctgcatgatttttgccctgcgtcccttctctttggggctcctttcccctctcatacataaaatcgctttcaaattaaaatcgctgttttctgg

SEQ ID NO: 210761 - DNA, 2859 bp, Artificial Sequence
  derived and/or modified sequence
caaagatggctgccacattggcgctgtcattttggtactgagcagagcgacgggcttaattcgacccaatccaggccagagtctttctctcaggggcttcctcgtgctcagctaatcctccgatcaatccttgggaatccctgggacctcttcggtatccctactctcagccagggatcatgtcttgggccgctcgcccgcccttcctccctcagcggcatgccgcagggcagtgtgggccggtgggggtgcgaaaagaaatgcattgtggggtcgcgtcccggtggcggcggcgacggccctggctggatcccgcagcggcggcggcggcggcggtggcaggcggagaacaacaaaccccggagccggagccaggggaggctggacgggacgggatgggcgacagcgggcgggactcccgaagcccagacagctcctccccaaatccccttccccagggagtccctcccccttctcctcctgggccacccctacccccttcaacagctccatcccttggaggctctggggccccacccccacccccgatgccaccacccccactgggctctccctttccagtcatcagttcttccatggggtcccctggtctgccccctccagctcccccaggattctccgggcctgtcagcagcccccagattaactcaacagtgtcactccctgggggtgggtctggcccccctgaagatgtgaagccaccagtcttaggggtccggggcctgcactgtccaccccctccaggtggccctggggctggcaaacggctatgtgcaatctgcggggacagaagctcaggcaaacactacggggtttacagctgtgagggttgcaagggcttcttcaaacgcaccatccgcaaagaccttacatactcttgccgggacaacaaagactgcacagtggacaagcgccagcggaaccgctgtcagtactgccgctatcagaagtgcctggccactggcatgaagagggaggcggtacaggaggagcgtcagcggggaaaggacaaggatggggatggggagggggctgggggagcccccgaggagatgcctgtggacaggatcctggaggcagagcttgctgtggaacagaagagtgaccaggggggctcccagcatatctcaaaatctccaaatgaccctgtgactaacatctgtcaggcagctgacaaacagctattcacgcttgttgagtgggcgaagaggatcccacacttttcctccttgcctctggatgatcaggtcatattgctgcgggcaggctggaatgaactcctcattgcctccttctcacaccgatccattgatgttcgagatggcatcctccttgccacaggtcttcacgtgcaccgcaactcagcccattcagcaggagtaggagccatctttgatcgggtgctgacagagctagtgtccaaaatgcgtgacatgaggatggacaagacagagcttggctgcctgagggcaatcattctgtttaatccagatgccaagggcctctccaaccctagtgaggtggaggtcctgcgggagaaagtgtatgcatcactggagacctactgcaaacagaagtaccctgagcagcagggacggtttgccaagctgctgctacgtcttcctgccctccggtccattggccttaagtgtctagagcatctgtttttcttcaagctcattggtgacacccccatcgacaccttcctcatggagatgcttgaggctccccatcaactggcctgagctcagacccagacgtggtgcttctcacactggaggagcacacatccaagagggactccaagccctggggcagggtggggggccatgttcccagaaccttgatggggtgagaagtacagggcagaaccaagaacataaaccctccaagggatctgcttgatatcccaagttggaagggaccccagatacctgtgaggactggttgtctctcttcggtggccttgagtctctgaatttgtcgggttctcccatgatttggggtgatttctcaccctctgtccttcccccagcacaaagcactggccttgcctccaggaccttgcttccttctcatcttgcctcattttgcttcccatctgaagagtggaaatggggaactcccccagaggtggatactggggggcaggcctcccaagctgatggacatgagagtagggccctgacaggccttcctcctctcaaacctggcagatgggggcctctctggaagagggaggggccctgtcactgtccagagtctctttttacacttcacctccttctgcagtcagactgaaatataaaaaaggtggtggtggtggtgaaggggctggtggagatgtaggaaccgatctgctatttttaatttcctgtgaggatagagacttgcagttagactcaaagaagtactgtactttcccaggttgactaagaaatgccagtggtggaggtgggtgtttgggaaaggcagggccctgaaatggcctgtccctagggctctccaagcactagccttcccagcttcccgccgccccccctatctcttcctgtctaacttggggaaggggcctgggctgtgaggacagggcccccacaggggatggtttcacgagtgtagtcccggaggccttccctttacagctctcctccagccctgggcacatagcataggctggggacacaggatcctggcctgagaattgaggggaggtggccagcccgcagaggtggggtgctggggctgcatgatttttgccctgcgtcccttctctttggggctcctttcccctctcatacataaaatcgctttcaaattaaaatcgctgttttctgg

SEQ ID NO: 210762 - DNA, 2868 bp, Artificial Sequence
  derived and/or modified sequence
caaagatggctgccacattggcgctgtcattttggtactgagcagagcgacgggcttaattcgacccaatccaggccagagtctttctctcaggggcttcctcgtgctcagctaatcctccgatcaatccttgggaatccctgggacctcttcggtatccctactctcagccagggatcatgtcttgggccgctcgcccgcccttcctccctcagcggcatgccgcagggcagtgtgggccggtgggggtgcgaaaagaaatgcattgtggggtcgcgtcccggtggcggcggcgacggccctggctggatcccgcagcggcggcggcggcggcggtggcaggcggagaacaacaaaccccggagccggagccaggggaggctggacgggacgggatgggcgacagcgggcgggactcccgaagcccagacagctcctccccaaatccccttccccagggagtccctcccccttctcctcctgggccacccctacccccttcaacagctccatcccttggaggctctggggccccacccccacccccgatgccaccacccccactgggctctccctttccagtcatcagttcttccatggggtcccctggtctgccccctccagctcccccaggattctccgggcctgtcagcagcccccagattaactcaacagtgtcactccctgggggtgggtctggcccccctgaagatgtgaagccaccagtcttaggggtccggggcctgcactgtccaccccctccaggtggccctggggctggcaaacggctatgtgcaatctgcggggacagaagctcaggcaaacactacggggtttacagctgtgagggttgcaagggcttcttcaaacgcaccatccgcaaagaccttacatactcttgccgggacaacaaagactgcacagtggacaagcgccagcggaaccgctgtcagtactgccgctatcagaagtgcctggccactggcatgaagagggaggcggtacaggaggagcgtcagcggggaaaggacaaggatggggatggggagggggctgggggagcccccgaggagatgcctgtggacaggatcctggaggcagagcttgctgtggaacagaagagtgaccagggcgttgagggtcctgggggaaccggggctccttctccaaatgaccctgtgactaacatctgtcaggcagctgacaaacagctattcacgcttgttgagtgggcgaagaggatcccacacttttcctccttgcctctggatgatcaggtcatattgctgcgggcaggctggaatgaactcctcattgcctccttctcacaccgatccattgatgttcgagatggcatcctccttgccacaggtcttcacgtgcaccgcaactcagcccattcagcaggagtaggagccatctttgatcgggtgctgacagagctagtgtccaaaatgcgtgacatgaggatggacaagacagagcttggctgcctgagggcaatcattctgtttaatccagatgccaagggcctctccaaccctagtgaggtggaggtcctgcgggagaaagtgtatgcatcactggagacctactgcaaacagaagtaccctgagcagcagggacggtttgccaagctgctgctacgtcttcctgccctccggtccattggccttaagtgtctagagcatctgtttttcttcaagctcattggtgacacccccatcgacaccttcctcatggagatgcttgaggctccccatcaactggcctgagctcagacccagacgtggtgcttctcacactggaggagcacacatccaagagggactccaagccctggggcagggtggggggccatgttcccagaaccttgatggggtgagaagtacagggcagaaccaagaacataaaccctccaagggatctgcttgatatcccaagttggaagggaccccagatacctgtgaggactggttgtctctcttcggtggccttgagtctctgaatttgtcgggttctcccatgatttggggtgatttctcaccctctgtccttcccccagcacaaagcactggccttgcctccaggaccttgcttccttctcatcttgcctcattttgcttcccatctgaagagtggaaatggggaactcccccagaggtggatactggggggcaggcctcccaagctgatggacatgagagtagggccctgacaggccttcctcctctcaaacctggcagatgggggcctctctggaagagggaggggccctgtcactgtccagagtctctttttacacttcacctccttctgcagtcagactgaaatataaaaaaggtggtggtggtggtgaaggggctggtggagatgtaggaaccgatctgctatttttaatttcctgtgaggatagagacttgcagttagactcaaagaagtactgtactttcccaggttgactaagaaatgccagtggtggaggtgggtgtttgggaaaggcagggccctgaaatggcctgtccctagggctctccaagcactagccttcccagcttcccgccgccccccctatctcttcctgtctaacttggggaaggggcctgggctgtgaggacagggcccccacaggggatggtttcacgagtgtagtcccggaggccttccctttacagctctcctccagccctgggcacatagcataggctggggacacaggatcctggcctgagaattgaggggaggtggccagcccgcagaggtggggtgctggggctgcatgatttttgccctgcgtcccttctctttggggctcctttcccctctcatacataaaatcgctttcaaattaaaatcgctgttttctgg

SEQ ID NO: 210763 - DNA, 2859 bp, Artificial Sequence
  derived and/or modified sequence
caaagatggctgccacattggcgctgtcattttggtactgagcagagcgacgggcttaattcgacccaatccaggccagagtctttctctcaggggcttcctcgtgctcagctaatcctccgatcaatccttgggaatccctgggacctcttcggtatccctactctcagccagggatcatgtcttgggccgctcgcccgcccttcctccctcagcggcatgccgcagggcagtgtgggccggtgggggtgcgaaaagaaatgcattgtggggtcgcgtcccggtggcggcggcgacggccctggctggatcccgcagcggcggcggcggcggcggtggcaggcggagaacaacaaaccccggagccggagccaggggaggctggacgggacgggatgggcgacagcgggcgggactcccgaagcccagacagctcctccccaaatccccttccccagggagtccctcccccttctcctcctgggccacccctacccccttcaacagctccatcccttggaggctctggggccccacccccacccccgatgccaccacccccactgggctctccctttccagtcatcagttcttccatggggtcccctggtctgccccctccagctcccccaggattctccgggcctgtcagcagcccccagattaactcaacagtgtcactccctgggggtgggtctggcccccctgaagatgtgaagccaccagtcttaggggtccggggcctgcactgtccaccccctccaggtggccctggggctggcaaacggctatgtgcaatctgcggggacagaagctcaggcaaacactacggggtttacagctgtgagggttgcaagggcttcttcaaacgcaccatccgcaaagaccttacatactcttgccgggacaacaaagactgcacagtggacaagcgccagcggaaccgctgtcagtactgccgctatcagaagtgcctggccactggcatgaagagggaggcggtacaggaggagcgtcagcggggaaaggacaaggatggggatggggagggggctgggggagcccccgaggagatgcctgtggacaggatcctggaggcagagcttgctgtggaacagaagagtgaccaggggggctcccagcatatctcaaaatctccaaatgaccctgtgactaacatctgtcaggcagctgacaaacagctattcacgcttgttgagtgggcgaagaggatcccacacttttcctccttgcctctggatgatcaggtcatattgctgcgggcaggctggaatgaactcctcattgcctccttttcacaccgatccattgatgttcgagatggcatcctccttgccacaggtcttcacgtgcaccgcaactcagcccattcagcaggagtaggagccatctttgatcgggtgctgacagagctagtgtccaaaatgcgtgacatgaggatggacaagacagagcttggctgcctgagggcaatcattctgtttaatccagatgccaagggcctctccaaccctagtgaggtggaggtcctgcgggagaaagtgtatgcatcactggagacctactgcaaacagaagtaccctgagcagcagggacggtttgccaagctgctgctacgtcttcctgccctccggtccattggccttaagtgtctagagcatctgtttttcttcaagctcattggtgacacccccatcgacaccttcctcatggagatgcttgaggctccccatcaactggcctgagctcagacccagacgtggtgcttctcacactggaggagcacacatccaagagggactccaagccctggggcagggtggggggccatgttcccagaaccttgatggggtgagaagtacagggcagaaccaagaacataaaccctccaagggatctgcttgatatcccaagttggaagggaccccagatacctgtgaggactggttgtctctcttcggtggccttgagtctctgaatttgtcggggtctcccatgatttggggtgatttctcaccctctgtccttcccccagcacaaagcactggccttgcctccaggaccttgcttccttctcatcttgcctcattttgcttcccatctgaagagtggaaatggggatctcccccagaggtggatactggggggcaggcctcccaagctgatggacatgagagtagggccctgacaggccttcctcctctcaaacctggcagatgggggcctctctggaagagggaggggccctgtcactgtccagagtctctttttacacttcacctccttctgcagtcagactgaaatataaaaaaggtggtggtggtggtgaaggggctggtggagatgtaggaaccgatctgctatttttaatttcctgtgaggatagagacttgcagttagactcaaagaagtactgtactttcccaggttgactaagaaatgccagtggtggaggtgggtgtttgggaaaggcagggccctgaaatggcctgtccctagggctctccaagcactagccttcccagcttcccgccgccccccccatctcttcctgtctaacttggggaaggggcctgggctgtgaggacagggcccccacaggggatggtttcacgagtgtagtcccggaggccttccctttacagctctcctccagccctgggcacatagcataggctggggacacaggatcctggcctgagaattgaggggaggtggccagcccgcagaggtggggtgctggggctgcatgatttttgccctgcgtcccttctctttggggctcctttcccctctcatacataaaatcgctttcaaattaaaatcgctgttttctgg

SEQ ID NO: 210764 - DNA, 2860 bp, Artificial Sequence
  derived and/or modified sequence
caaagatggctgccacattggcgctgtcattttggtactgagcagagcgacgggcttaattcgacccaatccaggccagagtctttctctcaggggcttcctcgtgctcagctaatcctccgatcaatccttgggaatccctgggacctcttcggtatccctactctcagccagggatcatgtcttgggccgctcgcccgcccttcctccctcagcggcatgccgcagggcagtgtgggccggtgggggtgcgaaaagaaatgcattgtggggtcgcgtcccggtggcggcggcgacggccctggctggatcccgcagcggcggcggcggcggcggtggcaggcggagaacaacaaaccccggagccggagccaggggaggctggacgggacgggatgggcgacagcgggcgggactcccgaagcccagacagctcctccccaaatccccttccccagggagtccctcccccttctcctcctgggccacccctacccccttcaacagctccatcccttggaggctctggggccccacccccacccccgatgccaccacccccactgggctctccctttccagtcatcagttcttccatggggtcccctggtctgccccctccagctcccccaggattctccgggcctgtcagcagcccccagattaactcaacagtgtcactccctgggggtgggtctggcccccctgaagatgtgaagccaccagtcttaggggtccggggcctgcactgtccaccccctccaggtggccctggggctggcaaacggctatgtgcaatctgcggggacagaagctcaggcaaacactacggggtttacagctgtgagggttgcaagggcttcttcaaacgcaccatccgcaaagaccttacatactcttgccgggacaacaaagactgcacagtggacaagcgccagcggaaccgctgtcagtactgccgctatcagaagtgcctggccactggcatgaagagggaggcggtacaggaggagcgtcagcggggaaaggacaaggatggggatggggagggggctgggggagcccccgaggagatgcctgtggacaggatcctggaggcagagcttgctgtggaacagaagagtgaccaggggggctcccagcatatctcaaaatctccaaatgaccctgtgactaacatctgtcaggcagctgacaaacagctattcacgcttgttgagtgggcgaagaggatcccacacttttcctccttgcctctggatgatcaggtcatattgctgcgggcaggctggaatgaactcctcattgcctccttttcacaccgatccattgatgttcgagatggcatcctccttgccacaggtcttcacgtgcaccgcaactcagcccattcagcaggagtaggagccatctttgatcgggtgctgacagagctagtgtccaaaatgcgtgacatgaggatggacaagacagagcttggctgcctgagggcaatcattctgtttaatccagatgccaagggcctctccaaccctagtgaggtggaggtcctgcgggagaaagtgtatgcatcactggagacctactgcaaacagaagtaccctgagcagcagggacggtttgccaagctgctgctacgtcttcctgccctccggtccattggccttaagtgtctagagcatctgtttttcttcaagctcattggtgacacccccatcgacaccttcctcatggagatgcttgaggctccccatcaactggcctgagctcagacccagacgtggtgcttctcacactggaggagcacacatccaagagggactccaagccctggggcagggtggggggccatgttcccagaaccttgatggggtgagaagtacagggcagaaccaagaacataaaccctccaagggatctgcttgatatcccaagttggaagggaccccagatacctgtgaggactggttgtctctcttcggtggccttgagtctctgaatttgtcggggtctcccatgatttggggtgatttctcaccctctgtccttcccccagcacaaagcactggccttgcctccaggaccttgcttccttctcatcttgcctcattttgcttcccatctgaagagtggaaatggggatctcccccagaggtggatactggggggcaggcctcccaagctgatggacatgagagtagggccctgacaggccttcctcctctcaaacctggcagatgggggcctctctggaagagggaggggccctgtcactgtccagagtctctttttacacttcacctccttctgcagtcagactgaaatataaaaaaggtggtggtggtggtgaaggggctggtggagatgtaggaaccgatctgctatttttaatttcctgtgaggatagagacttgcagttagactcaaagaagtactgtactttcccaggttgactaagaaatgccagtggtggaggtgggtgtttgggaaaggcagggccctgaaatggcctgtccctagggctctccaagcactagccttcccagcttcccgccgcccccccccatctcttcctgtctaacttggggaaggggcctgggctgtgaggacagggcccccacaggggatggtttcacgagtgtagtcccggaggccttccctttacagctctcctccagccctgggcacatagcataggctggggacacaggatcctggcctgagaattgaggggaggtggccagcccgcagaggtggggtgctggggctgcatgatttttgccctgcgtcccttctctttggggctcctttcccctctcatacataaaatcgctttcaaattaaaatcgctgttttctgg

SEQ ID NO: 210765 - DNA, 2868 bp, Artificial Sequence
  derived and/or modified sequence
caaagatggctgccacattggcgctgtcattttggtactgagcagagcgacgggcttaattcgacccaatccaggccagagtctttctctcaggggcttcctcgtgctcagctaatcctccgatcaatccttgggaatccctgggacctcttcggtatccctactctcagccagggatcatgtcttgggccgctcgcccgcccttcctccctcagcggcatgccgcagggcagtgtgggccggtgggggtgcgaaaagaaatgcattgtggggtcgcgtcccggtggcggcggcgacggccctggctggatcccgcagcggcggcggcggcggcggtggcaggcggagaacaacaaaccccggagccggagccaggggaggctggacgggacgggatgggcgacagcgggcgggactcccgaagcccagacagctcctccccaaatccccttccccagggagtccctcccccttctcctcctgggccacccctacccccttcaacagctccatcccttggaggctctggggccccacccccacccccgatgccaccacccccactgggctctccctttccagtcatcagttcttccatggggtcccctggtctgccccctccagctcccccaggattctccgggcctgtcagcagcccccagattaactcaacagtgtcactccctgggggtgggtctggcccccctgaagatgtgaagccaccagtcttaggggtccggggcctgcactgtccaccccctccaggtggccctggggctggcaaacggctatgtgcaatctgcggggacagaagctcaggcaaacactacggggtttacagctgtgagggttgcaagggcttcttcaaacgcaccatccgcaaagaccttacatactcttgccgggacaacaaagactgcacagtggacaagcgccagcggaaccgctgtcagtactgccgctatcagaagtgcctggccactggcatgaagagggaggcggtacaggaggagcgtcagcggggaaaggacaaggatggggatggggagggggctgggggagcccccgaggagatgcctgtggacaggatcctggaggcagagcttgctgtggaacagaagagtgaccagggcgttgagggtcctgggggaaccggggctccttctccaaatgaccctgtgactaacatctgtcaggcagctgacaaacagctattcacgcttgttgagtgggcgaagaggatcccacacttttcctccttgcctctggatgatcaggtcatattgctgcgggcaggctggaatgaactcctcattgcctccttttcacaccgatccattgatgttcgagatggcatcctccttgccacaggtcttcacgtgcaccgcaactcagcccattcagcaggagtaggagccatctttgatcgggtgctgacagagctagtgtccaaaatgcgtgacatgaggatggacaagacagagcttggctgcctgagggcaatcattctgtttaatccagatgccaagggcctctccaaccctagtgaggtggaggtcctgcgggagaaagtgtatgcatcactggagacctactgcaaacagaagtaccctgagcagcagggacggtttgccaagctgctgctacgtcttcctgccctccggtccattggccttaagtgtctagagcatctgtttttcttcaagctcattggtgacacccccatcgacaccttcctcatggagatgcttgaggctccccatcaactggcctgagctcagacccagacgtggtgcttctcacactggaggagcacacatccaagagggactccaagccctggggcagggtggggggccatgttcccagaaccttgatggggtgagaagtacagggcagaaccaagaacataaaccctccaagggatctgcttgatatcccaagttggaagggaccccagatacctgtgaggactggttgtctctcttcggtggccttgagtctctgaatttgtcggggtctcccatgatttggggtgatttctcaccctctgtccttcccccagcacaaagcactggccttgcctccaggaccttgcttccttctcatcttgcctcattttgcttcccatctgaagagtggaaatggggatctcccccagaggtggatactggggggcaggcctcccaagctgatggacatgagagtagggccctgacaggccttcctcctctcaaacctggcagatgggggcctctctggaagagggaggggccctgtcactgtccagagtctctttttacacttcacctccttctgcagtcagactgaaatataaaaaaggtggtggtggtggtgaaggggctggtggagatgtaggaaccgatctgctatttttaatttcctgtgaggatagagacttgcagttagactcaaagaagtactgtactttcccaggttgactaagaaatgccagtggtggaggtgggtgtttgggaaaggcagggccctgaaatggcctgtccctagggctctccaagcactagccttcccagcttcccgccgccccccccatctcttcctgtctaacttggggaaggggcctgggctgtgaggacagggcccccacaggggatggtttcacgagtgtagtcccggaggccttccctttacagctctcctccagccctgggcacatagcataggctggggacacaggatcctggcctgagaattgaggggaggtggccagcccgcagaggtggggtgctggggctgcatgatttttgccctgcgtcccttctctttggggctcctttcccctctcatacataaaatcgctttcaaattaaaatcgctgttttctgg

SEQ ID NO: 210766 - DNA, 2868 bp, Artificial Sequence
  derived and/or modified sequence
caaagatggctgccacattggcgctgtcattttggtactgagcagagcgacgggcttaattcgacccaatccaggccagagtctttctctcaggggcttcctcgtgctcagctaatcctccgatcaatccttgggaatccctgggacctcttcggtatccctactctcagccagggatcatgtcttgggccgctcgcccgcccttcctccctcagcggcatgccgcagggcagtgtgggccggtgggggtgcgaaaagaaatgcattgtggggtcgcgtcccggtggcggcggcgacggccctggctggatcccgcagcggcggcggcggcggcggtggcaggcggagaacaacaaaccccggagccggagccaggggaggctggacgggacgggatgggcgacagcgggcgggactcccgaagcccagacagctcctccccaaatccccttccccagggagtccctcccccttctcctcctgggccacccctacccccttcaacagctccatcccttggaggctctggggccccacccccacccccgatgccaccacccccactgggctctccctttccagtcatcagttcttccatggggtcccctggtctgccccctccagctcccccaggattctccgggcctgtcagcagcccccagattaactcaacagtgtcactccctgggggtgggtctggcccccctgaagatgtgaagccaccagtcttaggggtccggggcctgcactgtccaccccctccaggtggccctggggctggcaaacggctatgtgcaatctgcggggacagaagctcaggcaaacactacggggtttacagctgtgagggttgcaagggcttcttcaaacgcaccatccgcaaagaccttacatactcttgccgggacaacaaagactgcacagtggacaagcgccagcggaaccgctgtcagtactgccgctatcagaagtgcctggccactggcatgaagagggaggcggtacaggaggagcgtcagcggggaaaggacaaggatggggatggggagggggctgggggagcccccgaggagatgcctgtggacaggatcctggaggcagagcttgctgtggaacagaagagtgaccagggcgttgagggtcctgggggaaccggggctccttctccaaatgaccctgtgactaacatctgtcaggcagctgacaaacagctattcacgcttgttgagtgggcgaagaggatcccacacttttcctccttgcctctggatgatcaggtcatattgctgcgggcaggctggaatgaactcctcattgcctccttttcacaccgatccattgatgttcgagatggcatcctccttgccacaggtcttcacgtgcaccgcaactcagcccattcagcaggagtaggagccatctttgatcgggtgctgacagagctagtgtccaaaatgcgtgacatgaggatggacaagacagagcttggctgcctgagggcaatcattctgtttaatccagatgccaagggcctctccaaccctagtgaggtggaggtcctgcgggagaaagtgtatgcatcactggagacctactgcaaacagaagtaccctgagcagcagggacggtttgccaagctgctgctacgtcttcctgccctccggtccattggccttaagtgtctagagcatctgtttttcttcaagctcattggtgacacccccatcgacaccttcctcatggagatgcttgaggctccccatcaactggcctgagctcagacccagacgtggtgcttctcacactggaggagcacacatccaagagggactccaagccctggggcagggtggggggccatgttcccagaaccttgatggggtgagaagtacagggcagaaccaagaacataaaccctccaagggatctgcttgatatcccaagttggaagggaccccagatacctgtgaggactggttgtctctcttcggtggccttgagtctctgaatttgtcggggtctcccatgatttggggtgatttctcaccctctgtccttcccccagcacaaagcactggccttgcctccaggaccttgcttccttctcatcttgcctcattttgcttcccatctgaagagtggaaatggggaactcccccagaggtggatactggggggcaggcctcccaagctgatggacatgagagtagggccctgacaggccttcctcctctcaaacctggcagatgggggcctctctggaagagggaggggccctgtcactgtccagagtctctttttacacttcacctccttctgcagtcagactgaaatataaaaaaggtggtggtggtggtgaaggggctggtggagatgtaggaaccgatctgctatttttaatttcctgtgaggatagagacttgcagttagactcaaagaagtactgtactttcccaggttgactaagaaatgccagtggtggaggtgggtgtttgggaaaggcagggccctgaaatggcctgtccctagggctctccaagcactagccttcccagcttcccgccgccccccccatctcttcctgtctaacttggggaaggggcctgggctgtgaggacagggcccccacaggggatggtttcacgagtgtagtcccggaggccttccctttacagctctcctccagccctgggcacatagcataggctggggacacaggatcctggcctgagaattgaggggaggtggccagcccgcagaggtggggtgctggggctgcatgatttttgccctgcgtcccttctctttggggctcctttcccctctcatacataaaatcgctttcaaattaaaatcgctgttttctgg

SEQ ID NO: 210767 - DNA, 2859 bp, Artificial Sequence
  derived and/or modified sequence
caaagatggctgccacattggcgctgtcattttggtactgagcagagcgacgggcttaattcgacccaatccaggccagagtctttctctcaggggcttcctcgtgctcagctaatcctccgatcaatccttgggaatccctgggacctcttcggtatccctactctcagccagggatcatgtcttgggccgctcgcccgcccttcctccctcagcggcatgccgcagggcagtgtgggccggtgggggtgcgaaaagaaatgcattgtggggtcgcgtcccggtggcggcggcgacggccctggctggatcccgcagcggcggcggcggcggcggtggcaggcggagaacaacaaaccccggagccggagccaggggaggctggacgggacgggatgggcgacagcgggcgggactcccgaagcccagacagctcctccccaaatccccttccccagggagtccctcccccttctcctcctgggccacccctacccccttcaacagctccatcccttggaggctctggggccccacccccacccccgatgccaccacccccactgggctctccctttccagtcatcagttcttccatggggtcccctggtctgccccctccagctcccccaggattctccgggcctgtcagcagcccccagattaactcaacagtgtcactccctgggggtgggtctggcccccctgaagatgtgaagccaccagtcttaggggtccggggcctgcactgtccaccccctccaggtggccctggggctggcaaacggctatgtgcaatctgcggggacagaagctcaggcaaacactacggggtttacagctgtgagggttgcaagggcttcttcaaacgcaccatccgcaaagaccttacatactcttgccgggacaacaaagactgcacagtggacaagcgccagcggaaccgctgtcagtactgccgctatcagaagtgcctggccactggcatgaagagggaggcggtacaggaggagcgtcagcggggaaaggacaaggatggggatggggagggggctgggggagcccccgaggagatgcctgtggacaggatcctggaggcagagcttgctgtggaacagaagagtgaccaggggggctcccagcatatctcaaaatctccaaatgaccctgtgactaacatctgtcaggcagctgacaaacagctattcacgcttgttgagtgggcgaagaggatcccacacttttcctccttgcctctggatgatcaggtcatattgctgcgggcaggctggaatgaactcctcattgcctccttttcacaccgatccattgatgttcgagatggcatcctccttgccacaggtcttcacgtgcaccgcaactcagcccattcagcaggagtaggagccatctttgatcgggtgctgacagagctagtgtccaaaatgcgtgacatgaggatggacaagacagagcttggctgcctgagggcaatcattctgtttaatccagatgccaagggcctctccaaccctagtgaggtggaggtcctgcgggagaaagtgtatgcatcactggagacctactgcaaacagaagtaccctgagcagcagggacggtttgccaagctgctgctacgtcttcctgccctccggtccattggccttaagtgtctagagcatctgtttttcttcaagctcattggtgacacccccatcgacaccttcctcatggagatgcttgaggctccccatcaactggcctgagctcagacccagacgtggtgcttctcacactggaggagcacacatccaagagggactccaagccctggggcagggtggggggccatgttcccagaaccttgatggggtgagaagtacagggcagaaccaagaacataaaccctccaagggatctgcttgatatcccaagttggaagggaccccagatacctgtgaggactggttgtctctcttcggtggccttgagtctctgaatttgtcggggtctcccatgatttggggtgatttctcaccctctgtccttcccccagcacaaagcactggccttgcctccaggaccttgcttccttctcatcttgcctcattttgcttcccatctgaagagtggaaatggggaactcccccagaggtggatactggggggcaggcctcccaagctgatggacatgagagtagggccctgacaggccttcctcctctcaaacctggcagatgggggcctctctggaagagggaggggccctgtcactgtccagagtctctttttacacttcacctccttctgcagtcagactgaaatataaaaaaggtggtggtggtggtgaaggggctggtggagatgtaggaaccgatctgctatttttaatttcctgtgaggatagagacttgcagttagactcaaagaagtactgtactttcccaggttgactaagaaatgccagtggtggaggtgggtgtttgggaaaggcagggccctgaaatggcctgtccctagggctctccaagcactagccttcccagcttcccgccgccccccccatctcttcctgtctaacttggggaaggggcctgggctgtgaggacagggcccccacaggggatggtttcacgagtgtagtcccggaggccttccctttacagctctcctccagccctgggcacatagcataggctggggacacaggatcctggcctgagaattgaggggaggtggccagcccgcagaggtggggtgctggggctgcatgatttttgccctgcgtcccttctctttggggctcctttcccctctcatacataaaatcgctttcaaattaaaatcgctgttttctgg

SEQ ID NO: 210768 - DNA, 1602 bp, Artificial Sequence
  derived and/or modified sequence
atgagctgggccgccagaccccccttcctgccccagagacacgccgccggccagtgcggccccgtgggcgtgagaaaggagatgcactgcggcgtggccagcagatggagaagaagaagaccctggctggaccccgccgccgccgccgccgccgccgtggccggcggcgagcagcagacccccgagcccgagcccggcgaggccggcagagacggcatgggcgacagcggcagagacagcagaagccccgacagcagcagccccaaccccctgccccagggcgtgcccccccccagcccccccggcccccccctgccccccagcaccgcccccagcctgggcggcagcggcgcccccccccccccccccatgccccccccccccctgggcagccccttccccgtgatcagcagcagcatgggcagccccggcctgcccccccccgccccccccggcttcagcggccccgtgagcagcccccagatcaacagcaccgtgagcctgcccggcggcggcagcggcccccccgaggacgtgaagccccccgtgctgggcgtgagaggcctgcactgcccccccccccccggcggccccggcgccggcaagagactgtgcgccatctgcggcgacagaagcagcggcaagcactacggcgtgtacagctgcgagggctgcaagggcttcttcaagagaaccatcagaaaggacctgacctacagctgcagagacaacaaggactgcaccgtggacaagagacagagaaacagatgccagtactgcagataccagaagtgcctggccaccggcatgaagagagaggccgtgcaggaggagagacagagaggcaaggacaaggacggcgacggcgagggcgccggcggcgcccccgaggagatgcccgtggacagaatcctggaggccgagctggccgtggagcagaagagcgaccagggcgtggagggccccggcggcaccggcggcagcggcagcagccccaacgaccccgtgaccaacatctgccaggccgccgacaagcagctgttcaccctggtggagtgggccaagagaatcccccacttcagcagcctgcccctggacgaccaggtgatcctgctgagagccggctggaacgagctgctgatcgccagcttcagccacagaagcatcgacgtgagagacggcatcctgctggccaccggcctgcacgtgcacagaaacagcgcccacagcgccggcgtgggcgccatcttcgacagagtgctgaccgagctggtgagcaagatgagagacatgagaatggacaagaccgagctgggctgcctgagagccatcatcctgttcaaccccgacgccaagggcctgagcaaccccagcgaggtggaggtgctgagagagaaggtgtacgccagcctggagacctactgcaagcagaagtaccccgagcagcagggcagattcgccaagctgctgctgagactgcccgccctgagaagcatcggcctgaagtgcctggagcacctgttcttcttcaagctgatcggcgacacccccatcgacaccttcctgatggagatgctggaggccccccaccagctggcctag

SEQ ID NO: 210769 - DNA, 1179 bp, Artificial Sequence
  derived and/or modified sequence
atgggcagccccggcctgcccccccccgccccccccggcttcagcggccccgtgagcagcccccagatcaacagcaccgtgagcctgcccggcggcggcagcggcccccccgaggacgtgaagccccccgtgctgggcgtgagaggcctgcactgcccccccccccccggcggccccggcgccggcaagagactgtgcgccatctgcggcgacagaagcagcggcaagcactacggcgtgtacagctgcgagggctgcaagggcttcttcaagagaaccatcagaaaggacctgacctacagctgcagagacaacaaggactgcaccgtggacaagagacagagaaacagatgccagtactgcagataccagaagtgcctggccaccggcatgaagagagaggccgtgcaggaggagagacagagaggcaaggacaaggacggcgacggcgagggcgccggcggcgcccccgaggagatgcccgtggacagaatcctggaggccgagctggccgtggagcagaagagcgaccagggcgtggagggccccggcggcaccggcgcccccagccccaacgaccccgtgaccaacatctgccaggccgccgacaagcagctgttcaccctggtggagtgggccaagagaatcccccacttcagcagcctgcccctggacgaccaggtgatcctgctgagagccggctggaacgagctgctgatcgccagcttcagccacagaagcatcgacgtgagagacggcatcctgctggccaccggcctgcacgtgcacagaaacagcgcccacagcgccggcgtgggcgccatcttcgacagagtgctgaccgagctggtgagcaagatgagagacatgagaatggacaagaccgagctgggctgcctgagagccatcatcctgttcaaccccgacgccaagggcctgagcaaccccagcgaggtggaggtgctgagagagaaggtgtacgccagcctggagacctactgcaagcagaagtaccccgagcagcagggcagattcgccaagctgctgctgagactgcccgccctgagaagcatcggcctgaagtgcctggagcacctgttcttcttcaagctgatcggcgacacccccatcgacaccttcctgatggagatgctggaggccccccaccagctggcctag

SEQ ID NO: 210770 - DNA, 1170 bp, Artificial Sequence
  derived and/or modified sequence
atgggcagccccggcctgcccccccccgccccccccggcttcagcggccccgtgagcagcccccagatcaacagcaccgtgagcctgcccggcggcggcagcggcccccccgaggacgtgaagccccccgtgctgggcgtgagaggcctgcactgcccccccccccccggcggccccggcgccggcaagagactgtgcgccatctgcggcgacagaagcagcggcaagcactacggcgtgtacagctgcgagggctgcaagggcttcttcaagagaaccatcagaaaggacctgacctacagctgcagagacaacaaggactgcaccgtggacaagagacagagaaacagatgccagtactgcagataccagaagtgcctggccaccggcatgaagagagaggccgtgcaggaggagagacagagaggcaaggacaaggacggcgacggcgagggcgccggcggcgcccccgaggagatgcccgtggacagaatcctggaggccgagctggccgtggagcagaagagcgaccagggcggcagccagcacatcagcaagagccccaacgaccccgtgaccaacatctgccaggccgccgacaagcagctgttcaccctggtggagtgggccaagagaatcccccacttcagcagcctgcccctggacgaccaggtgatcctgctgagagccggctggaacgagctgctgatcgccagcttcagccacagaagcatcgacgtgagagacggcatcctgctggccaccggcctgcacgtgcacagaaacagcgcccacagcgccggcgtgggcgccatcttcgacagagtgctgaccgagctggtgagcaagatgagagacatgagaatggacaagaccgagctgggctgcctgagagccatcatcctgttcaaccccgacgccaagggcctgagcaaccccagcgaggtggaggtgctgagagagaaggtgtacgccagcctggagacctactgcaagcagaagtaccccgagcagcagggcagattcgccaagctgctgctgagactgcccgccctgagaagcatcggcctgaagtgcctggagcacctgttcttcttcaagctgatcggcgacacccccatcgacaccttcctgatggagatgctggaggccccccaccagctggcctag

SEQ ID NO: 210771 - protein, 556 aa, Artificial Sequence
  derived and/or modified sequence
MPSFDEALQRVGEFGRFQRRVFLLLCLTGVTFAFLFVGVVFLGTQPDHYWCRGPSAAALAERCGWSPEEEWNRTAPASRGPEPPERRGRCQRYLLEAANDSASATSALSCADPLAAFPNRSAPLVPCRGGWRYAQAHSTIVSEFDLVCVNAWMLDLTQAILNLGFLTGAFTLGYAADRYGRIVIYLLSCLGVGVTGVVVAFAPNFPVFVIFRFLQGVFGKGTWMTCYVIVTEIVGSKQRRIVGIVIQMFFTLGIIILPGIAYFIPNWQGIQLAITLPSFLFLLYYWVVPESPRWLITRKKGDKALQILRRIAKCNGKYLSSNYSEITVTDEEVSNPSFLDLVRTPQMRKCTLILMFAWFTSAVVYQGLVMRLGIIGGNLYIDFFISGVVELPGALLILLTIERLGRRLPFAASNIVAGVACLVTAFLPEGIAWLRTTVATLGRLGITMAFEIVYLVNSELYPTTLRNFGVSLCSGLCDFGGIIAPFLLFRLAAVWLELPLIIFGILASICGGLVMLLPETKGIALPETVDDVEKLGSPHSCKCGRNKKTPVSRSHL

SEQ ID NO: 210772 - protein, 557 aa, Artificial Sequence [sequence omitted]

SEQ ID NO: 210773 - DNA, 1671 bp, Artificial Sequence
  derived and/or modified sequence
atgcccagcttcgacgaggccctgcagagagtgggcgagttcggcagattccagagaagagtgttcctgctgctgtgcctgaccggcgtgaccttcgccttcctgttcgtgggcgtggtgttcctgggcacccagcccgaccactactggtgcagaggccccagcgccgccgccctggccgagagatgcggctggagccccgaggaggagtggaacagaaccgcccccgccagcagaggccccgagccccccgagagaagaggcagatgccagagatacctgctggaggccgccaacgacagcgccagcgccaccagcgccctgagctgcgccgaccccctggccgccttccccaacagaagcgcccccctggtgccctgcagaggcggctggagatacgcccaggcccacagcaccatcgtgagcgagttcgacctggtgtgcgtgaacgcctggatgctggacctgacccaggccatcctgaacctgggcttcctgaccggcgccttcaccctgggctacgccgccgacagatacggcagaatcgtgatctacctgctgagctgcctgggcgtgggcgtgaccggcgtggtggtggccttcgcccccaacttccccgtgttcgtgatcttcagattcctgcagggcgtgttcggcaagggcacctggatgacctgctacgtgatcgtgaccgagatcgtgggcagcaagcagagaagaatcgtgggcatcgtgatccagatgttcttcaccctgggcatcatcatcctgcccggcatcgcctacttcatccccaactggcagggcatccagctggccatcaccctgcccagcttcctgttcctgctgtactactgggtggtgcccgagagccccagatggctgatcaccagaaagaagggcgacaaggccctgcagatcctgagaagaatcgccaagtgcaacggcaagtacctgagcagcaactacagcgagatcaccgtgaccgacgaggaggtgagcaaccccagcttcctggacctggtgagaaccccccagatgagaaagtgcaccctgatcctgatgttcgcctggttcaccagcgccgtggtgtaccagggcctggtgatgagactgggcatcatcggcggcaacctgtacatcgacttcttcatcagcggcgtggtggagctgcccggcgccctgctgatcctgctgaccatcgagagactgggcagaagactgcccttcgccgccagcaacatcgtggccggcgtggcctgcctggtgaccgccttcctgcccgagggcatcgcctggctgagaaccaccgtggccaccctgggcagactgggcatcaccatggccttcgagatcgtgtacctggtgaacagcgagctgtaccccaccaccctgagaaacttcggcgtgagcctgtgcagcggcctgtgcgacttcggcggcatcatcgcccccttcctgctgttcagactggccgccgtgtggctggagctgcccctgatcatcttcggcatcctggccagcatctgcggcggcctggtgatgctgctgcccgagaccaagggcatcgccctgcccgagaccgtggacgacgtggagaagctgggcagcccccacagctgcaagtgcggcagaaacaagaagacccccgtgagcagaagccacctgtag

SEQ ID NO: 210774 - DNA, 1674 bp, Artificial Sequence
  derived and/or modified sequence
atgcccagcttcgacgaggccctgcagagagtgggcgagttcggcagattccagagaagagtgttcctgctgctgtgcctgaccggcgtgaccttcgccttcctgttcgtgggcgtggtgttcctgggcacccagcccgaccactactggtgcagaggccccagcgccgccgccctggccgagagatgcggctggagccccgaggaggagtggaacagaaccgcccccgccagcagaggccccgagccccccgagagaagaggcagatgccagagatacctgctggaggccgccaacgacagcgccagcgccaccagcgccctgagctgcgccgaccccctggccgccttccccaacagaagcgcccccctggtgccctgcagaggcggctggagatacgcccaggcccacagcaccatcgtgagcgagttcgacctggtgtgcgtgaacgcctggatgctggacctgacccaggccatcctgaacctgggcttcctgaccggcgccttcaccctgggctacgccgccgacagatacggcagaatcgtgatctacctgctgagctgcctgggcgtgggcgtgaccggcgtggtggtggccttcgcccccaacttccccgtgttcgtgatcttcagattcctgcagggcgtgttcggcaagggcacctggatgacctgctacgtgatcgtgaccgagatcgtgggcagcaagcagagaagaatcgtgggcatcgtgatccagatgttcttcaccctgggcatcatcatcctgcccggcatcgcctacttcatccccaactggcagggcatccagctggccatcaccctgcccagcttcctgttcctgctgtactactgggtggtgcccgagagccccagatggctgatcaccagaaagaagggcgacaaggccctgcagatcctgagaagaatcgccaagtgcaacggcaagtacctgagcagcaactacagcgagatcaccgtgaccgacgaggaggtgagcaaccccagcttcctggacctggtgagaaccccccagatgagaaagtgcaccctgatcctgatgttcgcctggttcaccagcgccgtggtgtaccagggcctggtgatgagactgggcatcatcggcggcaacctgtacatcgacttcttcatcagcggcgtggtggagctgcccggcgccctgctgatcctgctgaccatcgagagactgggcagaagactgcccttcgccgccagcaacatcgtggccggcgtggcctgcctggtgaccgccttcctgcccgaggccggcatcgcctggctgagaaccaccgtggccaccctgggcagactgggcatcaccatggccttcgagatcgtgtacctggtgaacagcgagctgtaccccaccaccctgagaaacttcggcgtgagcctgtgcagcggcctgtgcgacttcggcggcatcatcgcccccttcctgctgttcagactggccgccgtgtggctggagctgcccctgatcatcttcggcatcctggccagcatctgcggcggcctggtgatgctgctgcccgagaccaagggcatcgccctgcccgagaccgtggacgacgtggagaagctgggcagcccccacagctgcaagtgcggcagaaacaagaagacccccgtgagcagaagccacctgtag

SEQ ID NO: 210775 - DNA, 1671 bp, Artificial Sequence
  derived and/or modified sequence
atgccgagtttcgatgaggcactgcaaagggtgggtgaatttgggcgattccaacggcgggtgttcctcttgctgtgtctcaccggggtgaccttcgccttcctcttcgtgggcgtagtttttctcgggacacagcccgaccattactggtgcaggggccccagcgccgctgcacttgccgaaagatgtggttggagtccagaggaggagtggaatcggaccgcccccgcttcaaggggacctgagccgcccgagcggcgcggcaggtgccagaggtatctgctggaagccgcaaatgactccgccagcgcaactagtgccctttcatgtgcggatcccctggccgcgttccccaaccgttcagcacctctagtcccttgccgcggcggctggcggtacgcccaggcccactcaactatcgtttccgagttcgatctcgtgtgcgtgaacgcctggatgcttgacttgacccaggccatcctcaacttgggcttcttgactggagcctttacccttggctatgctgccgacaggtacggacgtatcgtcatctatctcctgagctgtctgggcgtcggtgtgactggagtggtagtggcctttgcccctaactttcctgtgtttgtgatcttccgttttctccaaggggtttttggaaaagggacatggatgacttgctacgtcatcgttacggaaatagttggcagcaaacagcgtagaattgttggtatagtaatccagatgttttttactctgggcatcatcattctccctggaatcgcctattttatccccaactggcaaggaatccagctggcaattacgttgccatcgttcctgttcctgctctactactgggtcgtgcctgaatcgcccaggtggctgattactagaaagaagggggacaaagccttacagatccttcgccgaatagcaaaatgtaatgggaagtacctgagtagcaattacagcgaaataactgtcacagatgaggaagtcagtaatccttcatttctcgacttagttagaacacctcagatgcggaagtgtacactgattcttatgttcgcctggtttacaagtgcagtcgtttatcaaggcctggtgatgagactgggcattatcgggggcaatttgtacattgacttctttatatcaggcgtagtagaattaccaggggcactgctgattctgctaactatcgagcgtctcggaagacgcctgcccttcgccgcttctaatatcgtagccggtgtggcctgtttagtgactgcctttctgcctgaagggatcgcctggctgcgcaccactgtagccactctcggccgattaggcataaccatggccttcgagatcgtgtatttggtcaattccgagctgtacccaaccaccctgcgcaattttggggtctctctgtgtagtggcttgtgcgatttcggaggcataatcgctcctttcctcctgtttagactggccgcagtgtggctggaactaccactgatcatctttggcattctagcgagcatctgcggcgggctagtcatgctgttacctgaaacaaaagggatcgcactccctgaaaccgttgacgacgtcgaaaaactcggaagtccgcatagctgtaaatgcggaaggaacaaaaaaacaccggtgtctcggtctcacctctag

SEQ ID NO: 210776 - DNA, 1674 bp, Artificial Sequence
  derived and/or modified sequence
atgcccagtttcgacgaagccttgcagcgcgtgggggagtttgggcggtttcaacggcgcgtgttcctcctcctgtgtctaaccggagtgaccttcgcatttctttttgtcggggtggtttttttggggacacagcccgaccactactggtgtcgcggaccctccgctgcggcactcgcagagcgatgtggctggagtcccgaagaagagtggaataggacggctccagcttccagggggcccgagccacccgagcggcggggccgctgtcaaagatacctgctcgaggccgccaatgactctgcgagcgcaacctccgctctgtcttgcgcagacccactcgcagcatttcccaacaggagcgcacctcttgtgccatgcaggggaggttggcgctatgcacaagctcatagcaccattgtcagcgagttcgatctggtatgtgttaacgcctggatgttggacctcacccaggctattttgaatcttggtttcctgacgggtgccttcaccctcggatacgctgcagatagatatggccggatcgtaatctatctactaagttgtttaggagtcggagtcactggggttgttgtcgcttttgctcccaactttccagtgtttgtgatatttcgattcctgcagggcgtcttcggcaaaggaacatggatgacctgctacgtgatcgtcacggagatcgttggaagtaagcaacgcaggatagtcggtatcgtcattcagatgttctttacgcttggcataatcatcctgcccggtatcgcctatttcatccctaattggcaggggatacagctcgcaatcacactgccctcattcctgtttttgctttattactgggtggtgccagaatcacctcgctggctgatcacacggaagaaaggcgataaagctctccagattttgaggcgcatagctaagtgcaatgggaaatacctcagctcaaattacagcgagataactgtaacagatgaggaagttagcaatccctccttcttggacctggtgaggaccccgcagatgagaaaatgtacgctgattctgatgttcgcatggtttacgagtgcggtggtttatcagggcctggttatgcggctcggcatcattggcggcaatttgtatatcgacttctttatatcaggcgttgtcgaactacccggggctctgctaatcctgctgacgatcgaacggttgggtcgtcggctgcccttcgcagcaagcaatattgtggctggggttgcctgtctggtgacggccttcttaccggaggccgggattgcctggttgcgaactaccgttgctacattaggcaggctgggcattaccatggcgttcgaaatagtttacttagtcaacagcgaactgtaccccaccacactgcgcaactttggcgtctctctgtgctctggactgtgcgatttcgggggtattatcgccccgttccttcttttccgactcgccgctgtgtggttagagctgccgctcatcatttttggtatactggcgtccatctgcggtggcctcgtaatgctgctgcccgaaaccaagggcatagcccttcccgagacagttgacgacgttgagaagttgggatcacctcactcgtgtaagtgcggaaggaacaagaaaactcccgtttccaggtcacacctgtag

SEQ ID NO: 210777 - DNA, 1671 bp, Artificial Sequence
  derived and/or modified sequence
atgcccagctttgatgaggccctgcagagggtgggggagtttggccgcttccagaggagggtcttcctgctgctgtgcctgactggagtgacctttgccttcctgtttgtgggcgtggtgttcctgggcacccagcctgaccactactggtgccggggccccagcgctgctgccctggccgagcgctgtggctggagccctgaggaggagtggaacagaacagccccagccagccggggccctgagcccccagagcggcggggccgctgccagcgctacctgctggaggccgccaatgattctgccagcgccaccagcgccctgagctgtgccgaccccctggccgccttccccaacagaagtgcccccctggtgccctgccggggcggctggaggtatgcccaggcccacagcaccatcgtgtctgaatttgacctggtgtgtgtgaatgcctggatgctggacctgacccaggccatcctgaacctgggcttcctgactggagccttcaccctgggctatgctgctgacagatatggccgcatcgtcatctacctgctgagctgcctgggcgtgggcgtgactggagtggtggtggcctttgcccccaacttccctgtgtttgtgatcttccgcttcctgcagggcgtgtttgggaagggcacctggatgacctgctacgtgattgtgacagaaattgtgggcagcaagcagaggagaattgtgggcatcgtcatccagatgttcttcaccctgggcatcatcatcctgcccggcatcgcctacttcatccccaactggcagggcatccagctggccatcaccctgcccagcttcctgttcctgctgtactactgggtggtgcctgagagcccccgctggctgatcaccaggaagaagggggacaaggccctgcagatcctgcggagaattgccaagtgcaatggcaagtacctgagcagcaactacagcgagatcaccgtgacagatgaggaggtgagcaaccccagcttcctggacctggtgaggaccccccagatgaggaagtgcaccctcatcctgatgtttgcctggttcaccagcgctgtggtgtaccagggcctggtgatgaggctgggcatcattggaggcaacctgtacatcgacttcttcatcagcggcgtggtggagctgcccggggccctgctgatcctgctgaccatcgagcggctgggccggcggctgccctttgctgccagcaacatcgtggccggcgtggcctgcctggtgacagccttcctgcctgagggcatcgcctggctgcggaccaccgtggccaccctgggccgcctgggcatcaccatggcctttgagatcgtgtacctggtgaacagcgagctgtaccccaccaccctgaggaactttggagtgtccctgtgcagcggcctgtgtgactttggaggcatcatcgcccccttcctgctcttccggctggccgctgtgtggctggagctgcccctcatcatcttcggcatcctggccagcatctgtggcggcctggtgatgctgctgcctgagaccaagggcatcgccctgcctgagaccgtggatgatgtggagaagctgggcagcccccacagctgcaagtgtggcaggaacaagaagacccctgtgagccgcagccacctgtag

SEQ ID NO: 210778 - DNA, 1674 bp, Artificial Sequence
  derived and/or modified sequence
atgcccagctttgatgaggccctgcagagggtgggggagtttggccgcttccagaggagggtcttcctgctgctgtgcctgactggagtgacctttgccttcctgtttgtgggcgtggtgttcctgggcacccagcctgaccactactggtgccggggccccagcgctgctgccctggccgagcgctgtggctggagccctgaggaggagtggaacagaacagccccagccagccggggccctgagcccccagagcggcggggccgctgccagcgctacctgctggaggccgccaatgattctgccagcgccaccagcgccctgagctgtgccgaccccctggccgccttccccaacagaagtgcccccctggtgccctgccggggcggctggaggtatgcccaggcccacagcaccatcgtgtctgaatttgacctggtgtgtgtgaatgcctggatgctggacctgacccaggccatcctgaacctgggcttcctgactggagccttcaccctgggctatgctgctgacagatatggccgcatcgtcatctacctgctgagctgcctgggcgtgggcgtgactggagtggtggtggcctttgcccccaacttccctgtgtttgtgatcttccgcttcctgcagggcgtgtttgggaagggcacctggatgacctgctacgtgattgtgacagaaattgtgggcagcaagcagaggagaattgtgggcatcgtcatccagatgttcttcaccctgggcatcatcatcctgcccggcatcgcctacttcatccccaactggcagggcatccagctggccatcaccctgcccagcttcctgttcctgctgtactactgggtggtgcctgagagcccccgctggctgatcaccaggaagaagggggacaaggccctgcagatcctgcggagaattgccaagtgcaatggcaagtacctgagcagcaactacagcgagatcaccgtgacagatgaggaggtgagcaaccccagcttcctggacctggtgaggaccccccagatgaggaagtgcaccctcatcctgatgtttgcctggttcaccagcgctgtggtgtaccagggcctggtgatgaggctgggcatcattggaggcaacctgtacatcgacttcttcatcagcggcgtggtggagctgcccggggccctgctgatcctgctgaccatcgagcggctgggccggcggctgccctttgctgccagcaacatcgtggccggcgtggcctgcctggtgacagccttcctgcctgaggccggcatcgcctggctgcggaccaccgtggccaccctgggccgcctgggcatcaccatggcctttgaaattgtgtacctggtgaacagcgagctgtaccccaccaccctgaggaactttggagtgtccctgtgcagcggcctgtgtgactttggaggcatcatcgcccccttcctgctcttccggctggccgctgtgtggctggagctgcccctcatcatcttcggcatcctggccagcatctgtggcggcctggtgatgctgctgcctgagaccaagggcatcgccctgcctgagaccgtggatgatgtggagaagctgggcagcccccacagctgcaagtgtggcaggaacaagaagacccctgtgagccgcagccacctgtag

SEQ ID NO: 210779 - DNA, 1671 bp, Artificial Sequence
  derived and/or modified sequence
atgcccagcttcgacgaggccctgcagcgggtgggcgagttcggccgttttcagcgccgtgtgtttcttctgctgtgtttgaccggcgtcacattcgctttcctgtttgttggggtcgtattcctcggcactcagcccgatcactactggtgccgaggccccagcgcagcagccttagcggagcgatgcggatggagtccggaagaggagtggaatagaaccgctcctgctagccgcgggcccgagccgcctgaacgacgaggacgctgccagcgttacctactcgaagcagccaatgacagtgcaagcgcaacatctgctctgagttgcgctgaccctctagccgccttccctaacagaagtgctcctctagtgccttgtagggggggttggcgttacgctcaggcacattctaccattgtgtcggagtttgacttggtgtgcgtaaacgcctggatgctggatctaacacaggcaatccttaacttggggttcctcaccggcgcttttactcttggctacgctgcagatcgttatggaaggatcgtgatctacttactgtcctgcctgggcgtaggtgtcacaggggtggtcgtagcttttgcacccaattttcctgtttttgtcatattccgcttccttcaaggagtgttcgggaaaggcacgtggatgacctgttatgtgatcgtgactgagatagtgggcagcaaacaaaggcgcatagtcggcattgtgatccagatgttcttcactctgggtattatcattctccctggaattgcctatttcatccccaactggcagggcatccagctcgcaatcaccctcccctctttcctgttcctgctgtactactgggtagtgcctgaaagccccagatggctgatcacccgcaaaaagggagataaggctctacaaattctaaggcgcattgccaaatgtaacggcaagtatcttagctcaaactacagcgagatcacagtgacggacgaggaagtatccaacccatctttccttgacctggtccgcactcctcagatgcgcaaatgcacactgatcctcatgttcgcctggttcacatccgcagtcgtgtatcaggggctggtaatgcgcttaggtatcataggaggcaacctctacatagattttttcattagcggagttgtcgagctgcccggagcactgttgatcttgctgacaatcgagagactcggacggcgcctccccttcgcagcctccaacatcgtcgcaggcgtcgcctgtctggtgactgcctttctccccgaggggattgcttggttacgcacaacggtggcaacgctcgggagactaggaatcactatggcattcgaaatagtgtatttggtgaatagcgaactgtacccaacaaccctcaggaactttggcgtgtctttgtgttccggcctgtgcgatttcgggggcataattgcaccctttcttctgtttagacttgcagctgtgtggctcgagctgcccctaattatctttggaattctggcgagtatttgtggtggccttgttatgctgctaccagagacgaaggggattgctctccccgaaaccgtcgatgacgtggaaaaactgggatctccccacagctgcaagtgcggccgtaacaagaagacacccgtgtctaggtcccacctgtag

SEQ ID NO: 210780 - DNA, 1674 bp, Artificial Sequence
  derived and/or modified sequence
atgcccagcttcgacgaggccctgcagcgggtgggcgagttcggccgatttcagcggcgggtgttcctgttgctgtgtctgacaggcgtgacatttgcctttctattcgtcggggtggtgttcctgggaacacagccggaccattactggtgcagaggtccttcagccgccgcattggccgagcgatgcggatggtcacccgaggaggagtggaatcggacagcaccagcctccagaggacctgaaccgccagaaagacgtggtagatgccagcgatacttactcgaggccgccaacgactccgcgtcggctaccagcgccctctcttgtgcggatcccctcgccgctttcccgaaccgcagtgcacctctcgtgccatgccgaggaggatggcggtacgcccaggcacatagcacaatcgtgtcggagtttgacctggtctgtgttaatgcatggatgctggatttaacccaggctatcctcaatttagggttcctaacgggagccttcaccctgggctatgctgcggacagatatggccggattgtgatatacctcctttcctgtcttggtgttggagtaacaggggtggtggtggcattcgcaccgaatttccccgtgtttgtcatttttagatttctacaaggagtcttcgggaagggaacatggatgacttgttacgtgatcgtcaccgaaatcgtcggaagcaagcagcggcgaattgtgggaattgtgatccagatgtttttcacactcggtatcatcatcttgcctggaatagcttacttcatcccgaactggcagggcattcagctggccattactctccccagctttctctttctgctgtactattgggtggtgcccgagtcccctaggtggcttatcactcgaaagaagggcgataaggcactacaaatcctgagaaggatcgccaaatgtaatggcaagtatttgagctccaactattccgaaattacagtgacagatgaggaagttagcaatccttccttcctggatctagttcgtacccctcagatgcgcaagtgcacactaatcctcatgttcgcttggttcaccagcgccgttgtttaccagggactggtcatgaggttggggatcataggtgggaatctgtatatcgacttctttatcagtggagtggtcgagttacctggggctttgctaatcctcttgacgatagagcggttaggcaggcggctgcccttcgcagcctccaatatcgtcgccggggttgcttgtctcgttactgcctttctccctgaggcagggatcgcatggcttcgcactactgtcgctaccctgggtaggctaggcatcactatggcttttgaaatcgtctatttggtgaactctgaactgtatccaaccacgctacgtaactttggcgtgagcctgtgctccggtctgtgtgacttcggtggaatcatcgctcctttcttgcttttccgcctggccgcagtttggcttgagctccctctcattatctttggcatcctggctagcatttgcggaggattagtcatgctactgccagaaacaaaaggcatcgctctgccagaaacagtggatgacgtagagaaactgggaagcccccattcttgcaagtgcggcagaaataagaaaacccctgtgtctcggtcccatctgtag

SEQ ID NO: 210781 - DNA, 1671 bp, Artificial Sequence
  derived and/or modified sequence
atgcccagttttgacgaggcactgcaacgcgtgggggaattcggacgattccagcgcagagtcttcctcctgctgtgtctgaccggagtgacattcgctttcctgtttgtaggcgttgtgtttctaggaacacaacccgatcactattggtgtcggggtccgagtgccgctgcacttgcagagagatgcggatggtcccccgaggaggaatggaaccgaactgcacccgcatctcggggacccgagcctccggaaaggagaggccgatgccagcggtatttactcgaggcagccaacgatagtgcttcagccacttcggctctgtcttgcgctgatcctcttgccgctttccctaacaggtcagcccctttggtcccgtgcaggggcggatggaggtatgcacaagcccacagtactatcgtgtccgagtttgatctggtttgcgtgaatgcatggatgctagatctcacgcaggctatcctgaacttgggcttcctgacgggcgcattcacattggggtatgccgcagacaggtacggacgaatagttatatacttgttgagttgtctaggtgtgggtgtgaccggtgtggttgttgcatttgccccaaacttccccgtgttcgttatttttcgcttcctgcaaggggtgttcggaaaaggcacctggatgacttgctatgtaatagttacagaaattgtgggaagtaagcagaggcggatagtggggattgtgatccaaatgttttttaccctgggaattatcatcctgcccggaatcgcctacttcatccccaattggcaagggattcaactcgcgattacactgcccagtttcctgttccttctgtattattgggtagtcccggagtcaccacgatggttgattaccagaaagaaaggagacaaagccctgcagatcctccggagaattgctaaatgcaacggtaagtatctgtctagcaactactcagagatcacagtgaccgacgaggaggtgagcaatccctcattcctcgacctggttcgtacgcctcagatgcggaagtgtaccctgatattaatgttcgcctggtttacttcggctgtggtttaccagggtcttgtcatgaggctcggaatcatcggagggaacctgtatatagactttttcatttcgggggtggtagagctgcctggggcactgctcattctgctgaccattgaaagactcggaagacgcctgccgttcgccgcatctaacattgtggccggtgttgcctgtttagtgaccgcattcctgcctgaggggatagcatggcttagaaccacggtcgccaccctggggaggctcggtattactatggctttcgagattgtatacctggtgaacagcgaactctatcccaccacgctacggaactttggagtgtcactctgctctgggttatgtgattttggcggaattatagctccctttctgctcttccgcctggctgccgtgtggctggaactaccccttataatcttcggcatcctggcatccatatgcggcggtttggtcatgttgctgcctgagacaaaaggaattgcgctgcctgagaccgtggatgacgtcgagaaacttggatccccccacagctgcaagtgtggacgcaataagaagaccccagtgagtcgaagccacctctag

SEQ ID NO: 210782 - DNA, 1674 bp, Artificial Sequence
  derived and/or modified sequence
atgccttccttcgatgaggcactccaacgggtgggtgagttcggacggtttcagagacgcgtgttcctattgctttgtctgactggagtaacgttcgcgttcctcttcgtgggggtcgtttttctcggaactcagcccgatcattactggtgtaggggaccttcagcggcagcactcgcggaacgttgtggatggtcacctgaggaggaatggaatcgcaccgcccctgccagccgaggcccagagcctccagaaagacgaggacgctgtcagcggtacctcttagaagcagcaaacgactctgcaagtgccacttccgccctgtcctgtgcagaccccctggccgctttccccaaccggtcagccccactcgttccttgtaggggtggatggcgctatgcccaggcacattccacaattgtatccgagttcgatctagtttgtgtgaatgcctggatgctggacttgacccaagccatcttaaacctgggtttcctcacaggcgcttttacattggggtacgccgcagacaggtatggcaggattgtgatatacttgctatcatgtttgggggtcggggtcactggggtggtggtcgccttcgccccaaatttcccggtcttcgttatttttcgcttcctgcagggggtgttcgggaagggaacttggatgacatgttatgtgatagtaaccgagatcgttggatctaagcagagaagaatagtgggaatcgtgatccaaatgttttttaccctcggaattatcatcttacctggcattgcctatttcattcctaattggcagggcattcagctggctattacactcccctcgttcctgtttttgctgtattactgggttgtgccggaatcacctagatggcttattacccgcaagaaaggggacaaagcactgcagatcctgcgaaggattgctaaatgcaacggcaagtacctgtctagcaactactccgaaattacagttacagatgaggaagtcagcaacccatccttcctggatctcgttcgaacacctcagatgaggaagtgtaccctcatcctgatgttcgcctggttcaccagcgccgtggtttatcagggcctcgtgatgaggctgggcataatcgggggtaatctctatatcgatttctttatctcaggggtggtggagttgcctggcgctctgctaatattgctgaccatagagcggcttggacgaagactgccgtttgcagcctccaacatcgtggctggagtcgcttgtttggtgaccgcttttttaccagaggcaggcatcgcctggctccggacaactgtggccaccctgggcagactcggcatcaccatggcgttcgaaatcgtttacttggtgaactcggagttgtatccaaccactctgaggaactttggcgtatccttatgttcgggactatgtgatttcggcggaattatcgctccgttcctgctgtttagactggccgcagtgtggctggagctccccttgattatcttcggcattcttgcctccatttgtggaggactggttatgctgttgccagaaacgaagggaattgctttaccggaaactgtggatgatgtcgagaagctggggagtcctcatagttgtaaatgcggaaggaacaagaaaacaccagtgagcaggtctcacctgtag

SEQ ID NO: 210783 - DNA, 3348 bp, Artificial Sequence
  derived and/or modified sequence
gcggggggcaggaggagcggctgcggccggcacagcgccagggcgagtgaggcgggtggcgcgggggaggcggcggagtaaagagaggccgccggctgggtccgcgggtcactccgaggcgcgggctgcgggcggcgggcggcgggcgcaccatgccctccttcgacgaggcgctgcagcgggtgggcgagttcgggcgcttccagaggcgcgtgtttttgctgctgtgcctgacgggcgtcaccttcgccttcctcttcgtcggcgtggtcttcctgggcacgcagcccgaccactactggtgccgcgggccaagtgccgcggcgctggccgagcgctgcggctggagcccggaggaggagtggaaccgcacggcgcccgcctcccgcggcccagagccccccgagcgccgcggccgctgccagcgctacctcctggaggcggccaacgacagcgcctccgccactagcgctctcagctgcgcggacccactcgccgccttccccaaccgctcggctccccttgtgccgtgccgcggcggctggcgctacgcccaggcccactccaccatcgtcagcgagtttgaccttgtctgtgtcaatgcgtggatgctggacctcacccaagccatcctgaacctcggcttcctgactggagcattcaccttaggctatgcagcagacaggtatggcaggatcgtcatttacttgctatcctgccttggtgttggcgtcactggggttgtggtggcctttgcaccaaacttccctgtgtttgtgatcttccgcttcctgcaaggtgtatttggaaaggggacgtggatgacttgctacgtgattgtgacagaaatagtaggttcgaaacaaaggaggattgtgggaatcgtgattcaaatgttctttacccttggaatcataattctccctggaattgcctacttcatccccaactggcaaggaatccagttagccatcacgctgcccagctttctcttcctcctttattactgggtggtccctgagtctccccgttggctgattactcggaagaaaggagataaagcattacagatcctgagacgcattgctaagtgcaatgggaaatacctctcatcaaattactcagagatcactgttacagatgaggaagttagtaatccatcctttttagatctggtgagaactccccaaatgaggaaatgcacacttattcttatgtttgcttggttcacaagcgcagtggtgtatcaaggacttgtcatgcgcctgggaattatagggggcaacctctatatagactttttcatctcgggcgtggtggaactgccaggagctctcttgatcttactaaccattgagcgccttggacgacgcctcccctttgcggcaagcaatatagtggcaggggtggcatgccttgtcactgcgttcttaccagaaggaatagcatggttgaggaccacagtggctacattgggaagactagggataaccatggcctttgaaattgtttatttggtaaattcagaattgtacccaacaacattacgaaatttcggagtttcgctctgttcaggtctgtgtgattttgggggaatcatagccccatttctgctctttcggctagcagccgtgtggctagaactacctctgatcatctttggtatcctggcatccatctgtggtggccttgtgatgcttttgcctgaaaccaagggtattgccttgccagagacagtggatgatgtagaaaaacttggcagtccacattcctgtaaatgtggcaggaataagaaaaccccagtttcccgctctcacctttgaggcccccgacaaagacagaaagaaggagctatccaggagctgatcctccttgcaaagctgtgccttgcagagatgcacgtgtgcatttcagctacatcatgccgcgctgttgtaatactgtataaagacctcaatctatccagagtatttttatataatgttggatgagttaggatttgtaatgctgttgaagtttctgggaacacataatatgtagccagtttaacaaagaagctgtcaggtgcacagcccttcctgggtttttttcttgtgttccctgtggtctctgacccattaggctaaagagagacaagagaagcccccaacctgattctcatgacagctccatcaagaatgtgggatgtgccgaccaaggatttgagaaagttgtacagaaatgtgttcatcaaatctggtcaagggactaagctcctagctgaccattcattctgaagattgcatggaggatgaacatctgggaatcctgttaatgagaaggctgaatcacaggcacctgggccaaagggtgtgagcattcatgttctctgctcaccttggtttccgcacaccttcgcaatgtgaacaggtcaggagtccctcccgtccacctcctctgtaacagctggggttccaggcatggtttaggccctgttccagcaataagaaccaatctgctgtacaatctgaggacttggctctgttatttacaaaatgatgctgtggttctgagattatttgggacatttttggctctcctttagtggacacctagagccacagattcccttctttactaaacaaatcccatggattctgatttctgggtcttaggattttaaaagtgaagggatatttttcttatatttgtgagttcagttccgatggtgcccgtggtcaaaagcgaaaaacatggacaattcctattcattcttagcactttgacatgtcttggggaaaagcttacattttaatttaaaagaaagatcaattatatccatgcttaacaggatcagcaggagctttataaatgactttacagagactaataagggatttgatctttctttttttgttatcgaggcttttgaaatgtggaacttgtgtgttctgctttatatgttatattcaatatcttttcagatgcagtctatattttatgctgagttttaaaaatgaaatactttatgcaaacaggcaaaattggtaccaaagggaaacattaaccatgaggaagagcatttttctaaggagaacaggtgacaatatacacatgtgcgctaatcgtaaaatgagcatcttagtctttaaaacacatcagaattgaatacgaataatctatttgtcgatgaaataaacacaactctttgaggatttgagactacattcaccctttattcacagtcacttgcagttttgcttttctctgcatttctctgctgtaagatgactgttgcattgttgaattgtattttgagtggatatttttgtttggtaacaattaaaattttaaatcgtaaaaaatgta

SEQ ID NO: 210784 - DNA, 5627 bp, Artificial Sequence
  derived and/or modified sequence
ctgcgggcggcgggcggcgggcgcaccatgccctccttcgacgaggcgctgcagcgggtgggcgagttcgggcgcttccagaggcgcgtgtttttgctgctgtgcctgacgggcgtcaccttcgccttcctcttcgtcggcgtggtcttcctgggcacgcagcccgaccactactggtgccgcgggccaagtgccgcggcgctggccgagcgctgcggctggagcccggaggaggagtggaaccgcacggcgcccgcctcccgcggcccagagccccccgagcgccgcggccgctgccagcgctacctcctggaggcggccaacgacagcgcctccgccactagcgctctcagctgcgcggacccactcgccgccttccccaaccgctcggctccccttgtgccgtgccgcggcggctggcgctacgcccaggcccactccaccatcgtcagcgagtttgaccttgtctgtgtcaatgcgtggatgctggacctcacccaagccatcctgaacctcggcttcctgactggagcattcaccttaggctatgcagcagacaggtatggcaggatcgtcatttacttgctatcctgccttggtgttggcgtcactggggttgtggtggcctttgcaccaaacttccctgtgtttgtgatcttccgcttcctgcaaggtgtatttggaaaggggacgtggatgacttgctacgtgattgtgacagaaatagtaggttcgaaacaaaggaggattgtgggaatcgtgattcaaatgttctttacccttggaatcataattctccctggaattgcctacttcatccccaactggcaaggaatccagttagccatcacgctgcccagctttctcttcctcctttattactgggtggtccctgagtctccccgttggctgattactcggaagaaaggagataaagcattacagatcctgagacgcattgctaagtgcaatgggaaatacctctcatcaaattactcagagatcactgttacagatgaggaagttagtaatccatcctttttagatctggtgagaactccccaaatgaggaaatgcacacttattcttatgtttgcttggttcacaagcgcagtggtgtatcaaggacttgtcatgcgcctgggaattatagggggcaacctctatatagactttttcatctcgggcgtggtggaactgccaggagctctcttgatcttactaaccattgagcgccttggacgacgcctcccctttgcggcaagcaatatagtggcaggggtggcatgccttgtcactgcgttcttaccagaagcaggaatagcatggttgaggaccacagtggctacattgggaagactagggataaccatggcctttgaaattgtttatttggtaaattcagaattgtacccaacaacattacgaaatttcggagtttcgctctgttcaggtctgtgtgattttgggggaatcatagccccatttctgctctttcggctagcagccgtgtggctagaactacctctgatcatctttggtatcctggcatccatctgtggtggccttgtgatgcttttgcctgaaaccaagggtattgccttgccagagacagtggatgatgtagaaaaacttggcagtccacattcctgtaaatgtggcaggaataagaaaaccccagtttcccgctctcacctttgaggcccccgacaaagacagaaagaaggagctatccaggagctgatcctccttgcaaagctgtgccttgcagagatgcacgtgtgcatttcagctacatcatgccgcgctgttgtaatactgtataaagacctcaatctatccagagtatttttatataatgttggatgagttaggatttgtaatgctgttgaagtttctgggaacacataatatgtagccagtttaacaaagaagctgtcaggtgcacagcccttcctgggtttttttcttgtgttccctgtggtctctgacccattaggctaaagagagacaagagaagcccccaacctgattctcatgacagctccatcaagaatgtgggatgtgccgaccaaggatttgagaaagttgtacagaaatgtgttcatcaaatctggtcaagggactaagctcctagctgaccattcattctgaagattgcatggaggatgaacatctgggaatcctgttaatgagaaggctgaatcacaggcacctgggccaaagggtgtgagcattcatgttctctgctcaccttggtttccgcacaccttcgcaatgtgaacaggtcaggagtccctcccgtccacctcctctgtaacagctggggttccaggcatggtttaggccctgttccagcaataagaaccaatctgctgtacaatctgaggacttggctctgttatttacaaaatgatgctgtggttctgagattatttgggacatttttggctctcctttagtggacacctagagccacagattcccttctttactaaacaaatcccatggattctgatttctgggtcttaggattttaaaagtgaagggatatttttcttatatttgtgagttcagttccgatggtgcccgtggtcaaaagcgaaaaacatggacaattcctattcattcttagcactttgacatgtcttggggaaaagcttacattttaatttaaaagaaagatcaattatatccatgcttaacaggatcagcaggagctttataaatgactttacagagactaataagggatttgatctttctttttttgttatcgaggcttttgaaatgtggaacttgtgtgttctgctttatatgttatattcaatatcttttcagatgcagtctatattttatgctgagttttaaaaatgaaatactttatgcaaacaggcaaaattggtaccaaagggaaacattaaccatgaggaagagcatttttctaaggagaacaggtgacaatatacacatgtgcgctaatcgtaaaatgagcatcttagtctttaaaacacatcagaattgaatacgaataatctatttgtcgatgaaataaacacaactctttgaggatttgagactacattcaccctttattcacagtcacttgcagttttgcttttctctgcatttctctgctgtaagatgactgttgcattgttgaattgtattttgagtggatatttttgtttggtaacaattaaaattttaaatcgtaaaaaatgtacatttgccctttctcttccttctaaacatgtgtctctcccacaggtcattctcctgtgacacgtgtactgcagagtgtttcaaaaccgggcaggcaattagcaatgggaaataagtggtccaccttcaatatttgcttgttgttcatttacatgctcttggcaccaatcctagactcacgtgtgccccagaataacattcagactctcagctggtcttgtgttacacatccatggaccggttcactccatcatatacagctctctgctccgtgtcccctgggctcaagtcaagcagtcggtgacagatttcattcccaataacagaatcggtttgcatgactccccatacatgttgcagctttgaaaacattcatctcagagttaggtataaagacataaaaatgtgtgtcaagccctcgttagctgatgaggtaaatgcatggacaacttcctaggacttctcggctctgccctctgtgaccttgcagcctgctcaggtctttgtgctctgttccttatcaaaaacagcacaaccccctcaatctgcccatttaaaaattggtggagtgaacaaagagcatgaaaatgttgaagaccacaaccaaaatttactcaaatcaaagttaagtacagagtttatttttaacaaatgtcatagctatgtcaccttactacagaatccagcagtcagaaaataacacaaaaaatgccgaggtttggcgtagctggtagctggggacagtgtcttcgtttgattactgccagttatttccagcatgctaaatccctacccacgttccagcctctaggtgagtcagtgcgtcactctgtctcccgtccaattaattatttctcatcactccctcaatccaagtaacaaaccttgaaacacgaacatagacaccaggcttattggggcgtgcacagccaagaccccaagaagtgactccttgtaaaatgtatttgtccttctcaaagcaaaccagaggccctccactgtcaccctaaatagaggtagggaaaaattcatgtgagggttaggctgccagccttttattgtggcatccatctattgtccatatgtatattttcccagtaattgaaattggaaaggaacttatgggcatattactggagcatctgcagtgcttaagtacttagcaaaatctattcagcgaaaccacaccacttagtttctcccaggggtaaaaaaaacccttgtgaatcctgcacacatcccttcctgtgttggtgtttcctttagactggcctagcctgggcatcactgtaaagtatgtgcagttggtctctgtcctgtaccctctacctccttccctgtcggaaaagtcaccactttagtccctggccaccagcacaccccaggagggtgagtggcctgaggtagttacggcacttaaaactcccttgctaccgatctggaactcaagccccaagacatccccttagatgatctgaatacgcattcagggacagatctaggcagtttctaaacaacacttagactggggtctaacgttgacaaatccttctagaatttgcctctttgggactgaagtctaaggggctgagaccaagaagggagagcacaagactaactttggtctcttgaccttttcttaccttgcaactgtcagtgcctccagccaaatgcctagcacagagctcagtggatttgattcttccattcagatactcatagcgattgcacactttattctcaatcacaagaagctggggcttccttgagaaggccagccccaaaggtacctgtgtttaaaagatgaaagaaatggttgctgaacccaaaacatgtttaggaggaaaaccagaagaacagagcagtggcactggacctcctgtctgtccgtgaggctgcagaacacaaggcagctcccaatgccgctggactctctgaccttggagagtgtaaacatcatatatgattctgtgttcctgagatctgggtttaacgatctgggctttgtcatggtgttttacgttcgttgttgtttgtgtactttttgcttttcttttgaaagtatgaaaatgatttttacaatgtaaagagagtctgagaaatgcaattgctattctttttatatactttttcagattttttatatgcttctttactacttacatcataatgcacaattttatatactgattttttcaatcaatgtatatcatgagtttttaaaataatgctacaatcttcataactaatattttaatggggagtgactgcttaattggcatgaggtttccttttgagatgaggaaaatgttctgaaaatatggtgatggttgcacaccattgtgaatgtactgaatgccattcagtggtaccctgcaaaataattaaaatcctaactctta

SEQ ID NO: 210785 - protein, 855 aa, Artificial Sequence [sequence omitted]

SEQ ID NO: 210786 - DNA, 2568 bp, Artificial Sequence
  derived and/or modified sequence
atgggcagcgacagagccagaaagggcggcggcggccccaaggacttcggcgccggcctgaagtacaacagcagacacgagaaggtgaacggcctggaggagggcgtggagttcctgcccgtgaacaacgtgaagaaggtggagaagcacggccccggcagatgggtggtgctggccgccgtgctgatcggcctgctgctggtgctgctgggcatcggcttcctggtgtggcacctgcagtacagagacgtgagagtgcagaaggtgttcaacggctacatgagaatcaccaacgagaacttcgtggacgcctacgagaacagcaacagcaccgagttcgtgagcctggccagcaaggtgaaggacgccctgaagctgctgtacagcggcgtgcccttcctgggcccctaccacaaggagagcgccgtgaccgccttcagcgagggcagcgtgatcgcctactactggagcgagttcagcatcccccagcacctggtggaggaggccgagagagtgatggccgaggagagagtggtgatgctgccccccagagccagaagcctgaagagcttcgtggtgaccagcgtggtggccttccccaccgacagcaagaccgtgcagagaacccaggacaacagctgcagcttcggcctgcacgccagaggcgtggagctgatgagattcaccacccccggcttccccgacagcccctaccccgcccacgccagatgccagtgggccctgagaggcgacgccgacagcgtgctgagcctgaccttcagaagcttcgacctggccagctgcgacgagagaggcagcgacctggtgaccgtgtacaacaccctgagccccatggagccccacgccctggtgcagctgtgcggcacctacccccccagctacaacctgaccttccacagcagccagaacgtgctgctgatcaccctgatcaccaacaccgagagaagacaccccggcttcgaggccaccttcttccagctgcccagaatgagcagctgcggcggcagactgagaaaggcccagggcaccttcaacagcccctactaccccggccactacccccccaacatcgactgcacctggaacatcgaggtgcccaacaaccagcacgtgaaggtgagattcaagttcttctacctgctggagcccggcgtgcccgccggcacctgccccaaggactacgtggagatcaacggcgagaagtactgcggcgagagaagccagttcgtggtgaccagcaacagcaacaagatcaccgtgagattccacagcgaccagagctacaccgacaccggcttcctggccgagtacctgagctacgacagcagcgacccctgccccggccagttcacctgcagaaccggcagatgcatcagaaaggagctgagatgcgacggctgggccgactgcaccgaccacagcgacgagctgaactgcagctgcgacgccggccaccagttcacctgcaagaacaagttctgcaagcccctgttctgggtgtgcgacagcgtgaacgactgcggcgacaacagcgacgagcagggctgcagctgccccgcccagaccttcagatgcagcaacggcaagtgcctgagcaagagccagcagtgcaacggcaaggacgactgcggcgacggcagcgacgaggccagctgccccaaggtgaacgtggtgacctgcaccaagcacacctacagatgcctgaacggcctgtgcctgagcaagggcaaccccgagtgcgacggcaaggaggactgcagcgacggcagcgacgagaaggactgcgactgcggcctgagaagcttcaccagacaggccagagtggtgggcggcaccgacgccgacgagggcgagtggccctggcaggtgagcctgcacgccctgggccagggccacatctgcggcgccagcctgatcagccccaactggctggtgagcgccgcccactgctacatcgacgacagaggcttcagatacagcgaccccacccagtggaccgccttcctgggcctgcacgaccagagccagagaagcgcccccggcgtgcaggagagaagactgaagagaatcatcagccaccccttcttcaacgacttcaccttcgactacgacatcgccctgctggagctggagaagcccgccgagtacagcagcatggtgagacccatctgcctgcccgacgccagccacgtgttccccgccggcaaggccatctgggtgaccggctggggccacacccagtacggcggcaccggcgccctgatcctgcagaagggcgagatcagagtgatcaaccagaccacctgcgagaacctgctgccccagcagatcacccccagaatgatgtgcgtgggcttcctgagcggcggcgtggacagctgccagggcgacagcggcggccccctgagcagcgtggaggccgacggcagaatcttccaggccggcgtggtgagctggggcgacggctgcgcccagagaaacaagcccggcgtgtacaccagactgcccctgttcagagactggatcaaggagaacaccggcgtgtag

SEQ ID NO: 210787 - DNA, 2568 bp, Artificial Sequence
  derived and/or modified sequence
atggggagcgatcgcgcccgcaagggcggtggcgggccgaaagatttcggtgccggattgaagtataatagccggcacgagaaggtcaacggattggaggaaggcgtggagtttctgcccgtgaacaacgtcaaaaaggtcgaaaaacacggccccggtcggtgggtcgtactggccgctgtgctgatagggctgctactcgtcctgctggggatcgggttcttagtgtggcacctgcagtacagagacgttcgggtccagaaagtgtttaacggctatatgcggatcacaaacgagaactttgttgacgcatacgagaacagcaactcaactgagtttgtttctctggctagtaaagtgaaggatgctttgaagctgctgtatagcggcgtgcccttcctaggcccgtatcacaaggagtccgccgtgaccgcattctctgaggggagtgtgattgcctattactggagtgaattctctatcccacaacaccttgtcgaggaggccgaacgggtgatggccgaggagagagtcgtgatgctgccccctagagcacgaagtctaaagtctttcgtggtaaccagcgtggtggctttcccgacagatagtaaaactgttcagcggacacaggataactcctgcagctttggactccacgcccggggcgtggagcttatgagattcaccacgccgggattcccagattcaccataccctgcccacgcaagatgtcagtgggctttgaggggagacgccgattccgtgctctctctcacttttcgttccttcgacttggcctcctgcgacgagagaggctccgacctggtgactgtctataatactctgagtccaatggagccacatgccctcgtgcagctgtgcggcacataccctcccagctacaacctaacatttcattccagccaaaacgtgctgttgatcacactcattaccaatactgagcgccggcatcccggatttgaggctacgtttttccagctcccgcgcatgtcttcatgtggtggtcggctgcgcaaggcgcagggaacattcaatagcccctactacccaggtcattatccccctaacatcgactgtacctggaacattgaagtgcctaacaaccagcacgtaaaggtgcgatttaaatttttctatctgctggagcctggagtgcctgccgggacatgcccaaaggattatgtcgaaatcaatggggaaaaatattgcggtgagaggagccagttcgtggttacctccaacagtaataagataacagtacggtttcatagcgaccagagctataccgatacggggtttctcgccgaatacctctcttacgactcaagcgatccctgccccgggcagtttacctgccgtactggcagatgtattagaaaagagctgcgttgcgatggctgggccgactgtaccgatcactcagacgagctgaattgctcctgtgacgcaggtcaccagttcacctgcaaaaataagttctgtaaacctctattttgggtgtgcgacagcgtgaacgattgcggagacaattccgacgaacagggctgctcatgtcccgcacagactttccgttgcagcaacggaaagtgcctttctaaaagtcagcagtgcaacggaaaagatgactgtggcgatgggtccgacgaggcaagctgccccaaagtgaacgtggtcacctgcacaaaacatacttacagatgcctgaatggactgtgcctgagcaagggcaatccggaatgtgacggaaaggaagactgctcagacggctctgatgagaaggattgcgactgtggccttcggagttttacaaggcaagctcgcgttgtggggggcactgacgcagatgaaggggaatggccgtggcaggtcagcttgcacgcccttggccagggccacatttgcggagcttcactgatcagccctaactggctggtgtcagccgcccattgttacatagatgacagaggcttccgctattcagacccgacacagtggaccgctttcctcggactgcacgatcagtcccagcgaagcgcccccggcgtgcaggaacggcggttgaagcgtattatatctcacccattttttaacgacttcacatttgactacgatatcgcccttctggaactggaaaaacctgctgagtattcttccatggtccgcccgatctgcctccctgatgcatcacacgtgttcccagccggaaaggcgatctgggtgacaggctggggacatacacaatacggcggcacaggagctctgatcttgcaaaaaggagagatccgagtgataaatcagactacctgtgagaatcttctcccacaacagattacaccccgcatgatgtgcgttgggttcctttccgggggagtggacagctgccaaggtgacagcgggggaccgctttccagcgtcgaggccgacggcaggatctttcaggccggagtggtgagctggggtgacggttgcgcgcagcgcaataagcctggagtgtataccaggctgcccctgttcagggactggataaaagagaacacaggcgtgtag

SEQ ID NO: 210788 - DNA, 2568 bp, Artificial Sequence
  derived and/or modified sequence
atgggcagtgaccgggccaggaagggcggcggcggccccaaggactttggagctggcctgaagtacaacagcagacatgagaaggtgaatggcctggaggagggcgtggagttcctgcctgtgaacaacgtgaagaaggtggagaagcacggccctggccgctgggtggtgctggccgctgtgctgattggcctgctgctggtgctgctgggcatcggcttcctggtgtggcacctgcagtacagagatgtgcgggtgcagaaggtgttcaacggctacatgaggatcaccaatgaaaattttgtggatgcctatgagaacagcaacagcacagaatttgtgtccctggccagcaaggtgaaggatgccctgaagctgctgtacagcggcgtgcccttcctgggcccctaccacaaggagagcgctgtgacagccttcagcgagggcagcgtcatcgcctactactggagcgagttcagcatcccccagcacctggtggaggaggccgagcgggtgatggccgaggagcgggtggtgatgctgcccccccgggcccggagcctgaagagctttgtggtgacctctgtggtggccttccccacagacagcaagacagtgcagaggacccaggacaacagctgcagctttggcctgcacgcccggggcgtggagctgatgaggttcaccaccccaggcttcccagacagcccctacccagcccacgcccgctgccagtgggccctgcggggagatgctgacagcgtgctgagcctgaccttccgcagctttgacctggccagctgtgatgagcggggcagtgacctggtgacagtgtacaacaccctgagccccatggagccccacgccctggtgcagctgtgtggcacctacccacccagctacaacctgaccttccacagcagccagaatgtgctgctgatcaccctcatcaccaacacagagcggcggcaccctggctttgaggccaccttcttccagctgcccaggatgagcagctgtggcggccgcctgaggaaggcccagggcaccttcaacagcccctactacccaggccactacccacccaacatcgactgcacctggaacatcgaggtgcccaacaaccagcacgtgaaggtgcgcttcaagttcttctacctgctggagcccggggtgcctgctggcacctgccccaaggactatgtggagatcaatggagagaagtactgtggggagaggagccagtttgtggtgaccagcaacagcaacaagatcaccgtgcgcttccacagcgaccagagctacacagacaccggcttcctggccgagtacctgtcctatgacagcagtgacccctgccccggccagttcacctgcaggacaggccgctgcatcaggaaggagctgcgctgtgatggctgggccgactgcacagaccacagtgatgagctgaactgcagctgtgatgctggccaccagttcacctgcaagaacaagttctgcaagcccctcttctgggtgtgtgacagcgtgaatgactgtggggacaacagtgatgagcagggctgcagctgcccagcccagaccttccgctgcagcaatggcaagtgcctgagcaagagccagcagtgcaatggcaaggatgactgtggagatggcagtgatgaggccagctgccccaaggtgaatgtggtgacctgcaccaagcacacctaccgctgcctgaatggcctgtgcctgagcaagggcaacccagaatgtgatggcaaggaggactgcagtgatggcagtgatgagaaggactgtgactgtggcctgcggagcttcacccggcaggcccgggtggtgggcggcacagatgctgatgaaggagagtggccctggcaggtgtccctgcacgccctgggccagggccacatctgtggggccagcctcatcagccccaactggctggtgtctgctgcccactgctacattgatgaccggggcttccgctacagcgaccccacccagtggacagccttcctgggcctgcatgaccagagccagaggtctgcccctggggtgcaggagcggcggctgaagaggatcatcagccaccccttcttcaatgacttcacctttgattatgacatcgccctgctggagctggagaagccagctgagtacagctccatggtgcggcccatctgcctgcctgatgccagccacgtgtttcctgctgggaaggccatctgggtgacaggctggggccacacccagtatggaggcaccggggccctgatcctgcagaagggggagatccgggtcatcaaccagaccacctgtgagaacctgctgccccagcagatcacccccaggatgatgtgtgtgggcttcctgtctggaggagtggacagctgccagggcgacagcggcggccccctgagctctgtggaggctgatggccgcatcttccaggccggcgtggtgtcctggggagatggctgtgcccagaggaacaagccaggagtgtacacccggctgcccctcttccgggactggatcaaggaaaatactggagtgtag

SEQ ID NO: 210789 - DNA, 2568 bp, Artificial Sequence
  derived and/or modified sequence
atgggcagcgaccgggcccggaagggcggcggcggccccaaggacttcggcgcagggctgaagtacaattcccgccatgagaaagtcaatggactggaggaaggagtcgagtttttgcccgtgaacaacgtgaaaaaagttgagaagcacgggccgggacgctgggttgtattggcagccgtgctgataggcctattattggtgttattgggaatagggttcctcgtatggcacctgcaatatcgggacgtccgcgtgcagaaggtgtttaatggatacatgagaatcaccaatgagaactttgtggatgcctatgaaaattctaatagtactgagttcgtcagccttgccagcaaggtgaaggacgcccttaaactgctgtattccggcgtgcccttcctgggcccttaccacaaagagtctgccgtaaccgccttctctgaaggcagtgttattgcatattattggagcgagttcagcattcctcagcacctggtcgaggaagctgagcgagtgatggccgaagaaagggtggtcatgctgcccccacgtgcccggtctctgaaatcctttgttgtgacctctgttgtcgccttccctacagattccaaaaccgttcagagaacgcaagataactcatgttcatttggcctgcatgccaggggcgtggagctgatgcgttttactacccctggctttcctgacagcccttatcccgcccatgccaggtgtcaatgggcacttcggggtgatgccgatagtgtgctcagcctgacattcaggtcgttcgatctggcatcttgtgatgaaagaggctctgatcttgtgacagtatacaatacgctgtcaccgatggaaccccacgcactggttcagctctgcgggacttaccctccgagctacaacctcacctttcatagttctcagaatgtgctcctgattaccttgatcactaatacagaacgccgacacccaggatttgaagctacatttttccaactgcctcggatgtccagctgcggaggccgtctgcggaaggcccagggaacctttaactcgccttactatccaggacattatcctccaaatatagattgtacttggaacatcgaagtccccaacaaccagcacgtaaaggtgaggttcaaatttttctatctgttggagcctggagtgccagccggtacctgtccgaaagattacgttgaaataaacggcgaaaaatactgtggggagaggtctcagttcgtcgtcacatctaactctaacaaaatcacagtcaggttccattcagaccagtcttacaccgacactgggttcttggctgagtatctgtcctacgattccagcgacccctgccccggtcagttcacatgtcggacaggaagatgtattcggaaagagctgcggtgcgatgggtgggccgactgtacagaccatagtgatgagctgaactgctcttgcgatgccggtcatcaatttacatgtaagaacaaattctgtaaacctctgttttgggtatgcgactctgtgaacgactgcggagacaacagtgacgagcagggctgtagttgtcctgcgcagacattccgctgcagcaacggaaagtgcctgtctaagagtcagcagtgcaacgggaaggacgactgcggagatggttccgatgaagcctcctgcccaaaggtgaatgtggtcacctgcacgaagcacacctacagatgcctgaacggcctgtgtctgagcaaaggaaacccggagtgtgatggaaaagaagactgctccgatgggtctgacgaaaaagattgcgactgtggcctcaggtcattcaccagacaggccagggtggttggaggcacggatgctgatgaaggcgagtggccgtggcaggttagtctgcatgcgctggggcagggacacatctgtggggcaagcctcatatcccctaattggctggtcagcgcagcgcattgttacattgatgatcggggattcagatactctgatcccacccagtggacagcttttttgggccttcatgatcagagtcagagatcagccccaggggtacaggagaggaggcttaagcggatcattagccacccatttttcaacgattttaccttcgactatgacattgcactacttgagctggagaagcctgcagaatactcctctatggtccgccccatatgcctgcccgatgcctcccatgtgtttccagcaggcaaggcaatctgggtcaccggctggggccatactcagtacggagggaccggagcactcatcctgcagaagggagagataagagtgattaaccagacaacttgcgagaacctgttacctcagcagatcactccacgcatgatgtgcgtcgggttcctatcaggtggggttgatagctgtcagggagattccggcgggcccctttcaagcgtagaggcagacggcaggatcttccaggccggtgtagtctcctggggagacggatgtgctcagaggaataaacctggtgtctacacaaggcttcctctgttcagggattggataaaggaaaacacaggcgtgtag

SEQ ID NO: 210790 - DNA, 2568 bp, Artificial Sequence
  derived and/or modified sequence
atgggttctgatcgggctcgcaaggggggtggcggtcccaaagacttcggagccggactgaagtacaattctcggcacgagaaagtcaacgggctcgaggagggggttgagttcttaccggtgaacaatgtgaagaaggtggaaaaacatggccctggacgttgggtggtgctggctgctgtcctcattggcctcctgctcgtgttgctagggattggattcctggtttggcatctgcagtatcgggatgtgcgggttcagaaagtctttaacggatacatgcggattacgaatgagaactttgtggatgcttatgagaacagtaatagcactgagttcgtcagtctggcctccaaagttaaagacgctctgaagctgttgtattcgggcgtcccattcttgggaccgtaccacaaggagagcgccgtgaccgctttctcagagggtagtgtgatcgcatactactggagtgagttctctataccacagcatctggttgaggaggcagaaagagtaatggccgaggagagggtggtcatgctccctcctcgcgcacggagtctgaaatcattcgtcgtgacctctgtcgtggctttccccaccgacagcaagacagttcagcggactcaggacaactcttgttcttttggcctgcacgctcgaggggtggaactcatgcgctttaccactcctggctttcccgattccccttatcccgcacacgcacgctgccagtgggctttgcggggagatgccgattctgttttgtccctgactttcaggtctttcgacctcgcctcctgcgacgagcggggaagtgatctggtgaccgtttataacaccctctccccgatggagccccacgcactggtccagctctgcggcacatatcctccctcatataatttgacctttcattcatctcaaaacgtcctgttaataacgctcatcacaaatactgagcggcgtcaccccggatttgaggctacctttttccagttgcctcgcatgtcctcttgcgggggaaggctcagaaaggcccagggcactttcaacagtccctactacccagggcattacccgccaaacatcgattgtacttggaacatcgaggtgccaaataatcaacatgtgaaggtccggttcaagtttttctacctgcttgagccaggggtgcctgccggaacatgcccaaaagactatgtggaaatcaacggtgaaaagtattgcggagagcgctctcagtttgtagtcacatcaaatagtaataaaataaccgtgcgcttccattctgatcagagctacaccgacaccggttttttggccgagtatctatcctatgatagcagtgatccttgtcccggtcaattcacttgtaggaccggcagatgcattcggaaagagctccgctgtgacgggtgggctgactgcacagatcatagcgacgaactcaactgtagctgcgatgcaggacatcagttcacttgtaagaataagttttgcaaacccctgttctgggtttgcgacagcgtcaatgactgtggcgacaattctgatgagcaggggtgttcctgccctgcgcagactttccggtgctcaaatggtaagtgtctgtcaaagtctcagcagtgcaatgggaaggacgactgcggagatggcagcgacgaggctagctgcccaaaggtgaacgtagtgacctgcactaaacacacctataggtgcctcaacgggttgtgtctctccaaaggcaatccagagtgtgatggcaaagaagactgcagcgatggcagcgatgagaaggactgtgattgcgggcttagaagcttcacccgtcaggcaagggtagtaggaggcacagacgcagatgagggagagtggccctggcaggtgagcctgcatgcactcggacaggggcatatctgtggcgctagtttaatctcccctaactggctggtgtctgccgcacattgctacatagacgaccgcggtttccgctatagcgaccccacacagtggacggcctttctcgggttacacgatcagagtcagaggtctgcccctggcgtgcaagagaggcgtctaaagaggattatctcccacccattttttaacgattttaccttcgactacgatattgccctgctggagctcgagaaacccgctgagtatagttcaatggtgcgcccaatctgcctgccagatgcctcgcacgtcttccctgcagggaaagccatttgggtaacaggctgggggcatacccaatacgggggtaccggagctctgattctgcagaagggagagattcgtgtcatcaatcagactacttgcgaaaacctgctcccacagcagatcactcccagaatgatgtgcgtaggcttcctgagtggtggggtggattcttgccagggagactcaggagggcctctctcctccgtggaagccgacgggcgaatcttccaagctggcgtggtcagttggggagacggctgcgcccaacgaaataaaccgggtgtttatactcgtctccctctgtttcgtgactggatcaaggagaacaccggtgtgtag

SEQ ID NO: 210791 - DNA, 3539 bp, Artificial Sequence
  derived and/or modified sequence
ggccggaggggtggtgaacgccgtcgtggtgatggtgagggccttagcgaccaccacccgagtgaggccccctcaccttcaggcccagagccgaggggaggagcctcccccagggccggcgggggcgggcaggtgagccgggcaggtgcgcaggcgagcgcggcgggctgggcgggccgaggccacaccctgaaactacctgcgtgggccgggccggagtgtgagagcggagctgcagccggagaaagaggaagagggagagagagcgcgccagggcgagggcaccgccgccggtcgggcgcgctgggcctgcccggaatcccgccgcctgcgccccgcgccccgcgccctgcgggccatgggagccggccgccggcagggacgacgcctgtgagacccgcgagcggcctcggggaccatggggagcgatcgggcccgcaagggcggagggggcccgaaggacttcggcgcgggactcaagtacaactcccggcacgagaaagtgaatggcttggaggaaggcgtggagttcctgccagtcaacaacgtcaagaaggtggaaaagcatggcccggggcgctgggtggtgctggcagccgtgctgatcggcctcctcttggtcttgctggggatcggcttcctggtgtggcatttgcagtaccgggacgtgcgtgtccagaaggtcttcaatggctacatgaggatcacaaatgagaattttgtggatgcctacgagaactccaactccactgagtttgtaagcctggccagcaaggtgaaggacgcgctgaagctgctgtacagcggagtcccattcctgggcccctaccacaaggagtcggctgtgacggccttcagcgagggcagcgtcatcgcctactactggtctgagttcagcatcccgcagcacctggtggaggaggccgagcgcgtcatggccgaggagcgcgtagtcatgctgcccccgcgggcgcgctccctgaagtcctttgtggtcacctcagtggtggctttccccacggactccaaaacagtacagaggacccaggacaacagctgcagctttggcctgcacgcccgcggtgtggagctgatgcgcttcaccacgcccggcttccctgacagcccctaccccgctcatgcccgctgccagtgggccctgcggggggacgccgactcagtgctgagcctcaccttccgcagctttgaccttgcgtcctgcgacgagcgcggcagcgacctggtgacggtgtacaacaccctgagccccatggagccccacgccctggtgcagttgtgtggcacctaccctccctcctacaacctgaccttccactcctcccagaacgtcctgctcatcacactgataaccaacactgagcggcggcatcccggctttgaggccaccttcttccagctgcctaggatgagcagctgtggaggccgcttacgtaaagcccaggggacattcaacagcccctactacccaggccactacccacccaacattgactgcacatggaacattgaggtgcccaacaaccagcatgtgaaggtgcgcttcaaattcttctacctgctggagcccggcgtgcctgcgggcacctgccccaaggactacgtggagatcaacggggagaaatactgcggagagaggtcccagttcgtcgtcaccagcaacagcaacaagatcacagttcgcttccactcagatcagtcctacaccgacaccggcttcttagctgaatacctctcctacgactccagtgacccatgcccggggcagttcacgtgccgcacggggcggtgtatccggaaggagctgcgctgtgatggctgggccgactgcaccgaccacagcgatgagctcaactgcagttgcgacgccggccaccagttcacgtgcaagaacaagttctgcaagcccctcttctgggtctgcgacagtgtgaacgactgcggagacaacagcgacgagcaggggtgcagttgtccggcccagaccttcaggtgttccaatgggaagtgcctctcgaaaagccagcagtgcaatgggaaggacgactgtggggacgggtccgacgaggcctcctgccccaaggtgaacgtcgtcacttgtaccaaacacacctaccgctgcctcaatgggctctgcttgagcaagggcaaccctgagtgtgacgggaaggaggactgtagcgacggctcagatgagaaggactgcgactgtgggctgcggtcattcacgagacaggctcgtgttgttgggggcacggatgcggatgagggcgagtggccctggcaggtaagcctgcatgctctgggccagggccacatctgcggtgcttccctcatctctcccaactggctggtctctgccgcacactgctacatcgatgacagaggattcaggtactcagaccccacgcagtggacggccttcctgggcttgcacgaccagagccagcgcagcgcccctggggtgcaggagcgcaggctcaagcgcatcatctcccaccccttcttcaatgacttcaccttcgactatgacatcgcgctgctggagctggagaaaccggcagagtacagctccatggtgcggcccatctgcctgccggacgcctcccatgtcttccctgccggcaaggccatctgggtcacgggctggggacacacccagtatggaggcactggcgcgctgatcctgcaaaagggtgagatccgcgtcatcaaccagaccacctgcgagaacctcctgccgcagcagatcacgccgcgcatgatgtgcgtgggcttcctcagcggcggcgtggactcctgccagggtgattccgggggacccctgtccagcgtggaggcggatgggcggatcttccaggccggtgtggtgagctggggagacggctgcgctcagaggaacaagccaggcgtgtacacaaggctccctctgtttcgggactggatcaaagagaacactggggtataggggccggggccacccaaatgtgtacacctgcggggccacccatcgtccaccccagtgtgcacgcctgcaggctggagactggaccgctgactgcaccagcgcccccagaacatacactgtgaactcaatctccagggctccaaatctgcctagaaaacctctcgcttcctcagcctccaaagtggagctgggaggtagaaggggaggacactggtggttctactgacccaactgggggcaaaggtttgaagacacagcctcccccgccagccccaagctgggccgaggcgcgtttgtgcatatctgcctcccctgtctctaaggagcagcgggaacggagcttcggggcctcctcagtgaaggtggtggggctgccggatctgggctgtggggcccttgggccacgctcttgaggaagcccaggctcggaggaccctggaaaacagacgggtctgagactgaaattgttttaccagctcccagggtggacttcagtgtgtgtatttgtgtaaatgagtaaaacattttatttctttttaggtaagtttctttt

SEQ ID NO: 210792 - protein, 639 aa, Artificial Sequence
  derived and/or modified sequence
MSARGPAIGIDLGTTYSCVGVFQHGKVEIIANDQGNRTTPSYVAFTDTERLIGDAAKNQVAMNPTNTIFDAKRLIGRKFEDATVQSDMKHWPFRVVSEGGKPKVQVEYKGETKTFFPEEISSMVLTKMKEIAEAYLGGKVHSAVITVPAYFNDSQRQATKDAGTITGLNVLRIINEPTAAAIAYGLDKKGCAGGEKNVLIFDLGGGTFDVSILTIEDGIFEVKSTAGDTHLGGEDFDNRMVSHLAEEFKRKHKKDIGPNKRAVRRLRTACERAKRTLSSSTQASIEIDSLYEGVDFYTSITRARFEELNADLFRGTLEPVEKALRDAKLDKGQIQEIVLVGGSTRIPKIQKLLQDFFNGKELNKSINPDEAVAYGAAVQAAILIGDKSENVQDLLLLDVTPLSLGIETAGGVMTPLIKRNTTIPTKQTQTFTTYSDNQSSVLVQVYEGERAMTKDNNLLGKFDLTGIPPAPRGVPQIEVTFDIDANGILNVTAADKSTGKENKITITNDKGRLSKDDIDRMVQEAERYKSEDEANRDRVAAKNALESYTYNIKQTVEDEKLRGKISEQDKNKILDKCQEVINWLDRNQMAEKDEYEHKQKELERVCNPIISKLYQGGPGGGSGGGGSGASGGPTIEEVD

SEQ ID NO: 210793 - protein, 413 aa, Artificial Sequence
  derived and/or modified sequence
MSARGPAIGIDLGTTYSCVGVFQHGKVEIIANDQGNRTTPSYVAFTDTERLIGDAAKNQVAMNPTNTIFDAKRLIGRKFEELNADLFRGTLEPVEKALRDAKLDKGQIQEIVLVGGSTRIPKIQKLLQDFFNGKELNKSINPDEAVAYGAAVQAAILIGDKSENVQDLLLLDVTPLSLGIETAGGVMTPLIKRNTTIPTKQTQTFTTYSDNQSSVLVQVYEGERAMTKDNNLLGKFDLTGIPPAPRGVPQIEVTFDIDANGILNVTAADKSTGKENKITITNDKGRLSKDDIDRMVQEAERYKSEDEANRDRVAAKNALESYTYNIKQTVEDEKLRGKISEQDKNKILDKCQEVINWLDRNQMAEKDEYEHKQKELERVCNPIISKLYQGGPGGGSGGGGSGASGGPTIEEVD

SEQ ID NO: 210794 - DNA, 1920 bp, Artificial Sequence
  derived and/or modified sequence
atgagtgcacgcggtccggccatcggcatcgacctgggaacaacatacagctgcgtcggggtattccagcatggaaaagtggagatcattgccaatgaccagggcaacagaaccacaccctcatacgtggcattcacggataccgaaaggctgatcggagacgctgccaagaaccaggtcgctatgaatccaacgaacacaattttcgacgcgaaacgcctgataggccggaaatttgaggatgctaccgtccagtctgacatgaaacattggcctttccgtgtggtgtctgaaggcggcaaaccgaaagtacaggtggaatacaaaggtgaaactaaaacattctttcccgaagagattagcagcatggttctcacaaagatgaaagaaatagccgaagcatatctgggaggaaaggtgcatagcgccgtaatcacagtgcctgcgtactttaacgactcacagcggcaggctactaaagacgccggcacaatcactgggctcaacgtgcttagaattatcaacgaacccactgcggccgctatcgcgtacggtctggataaaaaggggtgcgcgggaggtgaaaaaaatgttttgatcttcgatctgggcggtggtacgttcgacgtgtctattctcacaattgaggatggtattttcgaggtaaagtccacagctggagatacacatcttggcggggaggacttcgataacagaatggtatcccatctggctgaagagttcaaacgaaaacataaaaaggatatcggacccaataagcgggccgtgaggaggctgagaaccgcctgcgagagggcaaagcggaccctaagtagttccactcaggctagcatcgagattgactccctgtatgaaggagtggatttctataccagtatcacccgcgctcgatttgaggagctgaatgctgacctgtttcgagggacactagaacccgtcgagaaagcactgagagacgccaagctggataaaggacaaatccaggaaatcgtgctggtgggtggcagcacgcgcatcccaaagattcagaaattactgcaggatttttttaacggaaaggaactgaataagagcatcaatcctgacgaggctgtcgcatacggtgctgctgtccaggctgctatactgatcggcgataaaagcgaaaatgttcaggacctcctgctgctggatgtcacccccctcagcctgggtattgagacagcagggggggtcatgactcccctgatcaaaagaaacacgactatcccaaccaagcagacccagacttttaccacctattctgacaatcagagctctgtgctcgttcaagtctacgagggtgagagggccatgaccaaggataacaacctcttaggcaagttcgatttaacaggcatcccccctgctcctagaggtgtgcctcaaattgaggtgactttcgacatcgacgctaatggtatcctgaatgtcactgcagctgacaaaagcaccggaaaggaaaataagatcaccatcacaaacgacaaaggacgtctgtccaaagacgacatcgacagaatggtccaagaagcagaaagatacaagtccgaggacgaagcaaacagagaccgggtggctgcgaaaaacgcgctcgagtcttacacctataacattaaacagactgttgaagatgaaaaacttagaggtaagatttccgaacaggataaaaataagattttagataagtgccaggaggtgattaattggctggatcggaaccagatggctgagaaagatgagtatgagcacaaacagaaggaactggagagagtgtgtaatccaatcatctctaagctatatcaaggagggccgggcggcggctcaggggggggtggaagtggcgctagtggcgggccaacaattgaagaggtcgactag

SEQ ID NO: 210795 - DNA, 1920 bp, Artificial Sequence
  derived and/or modified sequence
atgagcgcaagggggcccgccatcgggatcgatctgggaaccacttactcctgcgtaggagtctttcagcacggaaaggtggagataattgccaatgatcaaggaaatcggaccaccccatcctacgtagcattcaccgacactgaaagactgataggggatgctgccaaaaatcaggtcgctatgaacccaaccaacacaatattcgacgccaaaaggctcatcgggaggaaatttgaggacgccacggtacagtctgacatgaagcattggccctttagggtagtctcagaagggggaaaacccaaagtgcaggtggaatacaaaggcgaaaccaaaacattctttccagaggagattagctctatggtcctcactaagatgaaagagatcgccgaggcctacctcgggggaaaagtccactcagcagttatcaccgtccccgcctattttaatgacagtcaaagacaggcaactaaggatgccgggacaatcaccgggctgaatgtgttaaggatcattaatgagcctacagcagccgccattgcttacggtctagataagaaaggttgcgccggcggcgagaagaatgtactgatttttgacctcggcgggggaactttcgatgtttccatcctgaccattgaggacggcatattcgaggtgaaaagcacagcaggagatactcacctgggaggcgaagactttgataacagaatggtctctcacttggccgaggaatttaagcgcaagcataaaaaagatatcgggcctaataaacgcgcggtgagacgcttgcgaacagcatgcgaacgggctaaacgcacattaagttcatcaacccaggcatccatcgagatcgacagcctctatgagggcgtggacttctacacatcaatcacacgggcccgcttcgaagaactcaacgccgatcttttcagaggaaccctggagcccgtcgagaaggcattacgggatgctaaactggataaggggcaaatacaggagattgtgctcgtagggggctccactagaatacctaaaatccagaaacttttgcaagacttttttaatggaaaagagttgaataaatcaatcaatccagatgaagcagtggcctacggtgccgctgtgcaagctgctattctcataggagataagagtgaaaacgtccaggacctcctgttgcttgacgtgacacctctctcactgggcatcgagactgccggcggagtcatgacacccctgatcaagcgcaacacaacaatccccactaaacagactcagacctttaccacttattcggacaatcagtcatccgtgctggtccaggtatacgagggtgagcgagcaatgacaaaggataacaaccttcttggcaagttcgaccttacgggaattccacctgccccgcgcggcgttcctcagatagaggtcaccttcgatattgacgccaatggaatcctgaacgtcacggcagccgacaagtccacagggaaggagaacaagatcacaattacaaacgacaagggcaggttgtccaaggatgatatagatcgcatggtgcaggaggccgaacgttataagtcagaggacgaggcaaacagggatcgcgttgccgcaaaaaatgcgctggagagctacacatataacatcaagcagacagttgaggacgagaagctgcggggcaaaatctctgaacaggacaaaaacaaaatcttggacaagtgtcaggaagtaattaactggttggatcgcaatcagatggctgagaaagatgagtacgagcacaaacagaaagagttggaaagagtctgtaatcccataatctctaaactctaccagggcggacccggcgggggatcaggcggtggcggcagcggggctagcgggggaccaactattgaagaagttgattag

SEQ ID NO: 210796 - DNA, 1242 bp, Artificial Sequence
  derived and/or modified sequence
atgtctgctcggggccccgcaatcggaattgacctcggcactacatacagctgtgtgggcgtcttccagcacggtaaagtcgaaataatcgctaacgatcagggcaataggactaccccaagctacgtcgctttcacagatactgaacgcctgattggagatgctgccaagaaccaggtcgccatgaatcctacgaataccattttcgacgctaagaggctaatcgggcggaaatttgaagagctcaacgccgatctgttccgcggtacccttgagccagtcgaaaaggctcttcgagacgccaagctggataagggacagatccaggaaatagtgttagtcgggggctctacgcgcatccctaaaattcagaagctgttgcaggacttctttaacgggaaggaattaaacaagtcaatcaatcccgacgaagccgttgcctatggagccgcggtacaagcagcaatactcatcggagataaatcagaaaatgtgcaggatcttctcctgctggacgtgacaccactgagcctgggtatcgagaccgccggcggagtcatgacccctctgatcaagcgaaatacgactatcccaactaagcaaacgcaaacgtttactacctattcggataaccaatccagtgtactggtgcaggtgtatgagggagagcgagctatgactaaagacaataacttgctggggaaatttgatctcaccggcatcccaccggccccacgaggcgtgccgcagattgaagttacatttgacattgacgcaaacggaatcctcaacgttaccgccgctgataaatctactggaaaggaaaacaagatcaccatcacaaacgataaaggacgcctttctaaggacgatattgacagaatggtgcaagaagctgaaaggtacaagagcgaagacgaggcgaaccgcgatcgggtcgccgctaagaatgccctggaaagctatacatacaatatcaagcaaactgtcgaggatgaaaagctccgcgggaaaatcagcgaacaggacaaaaataagatccttgacaagtgccaagaggtgattaactggctggacagaaatcagatggccgaaaaagatgagtacgagcacaagcagaaggagcttgaacgggtgtgcaatcccatcataagcaagctttatcaggggggcccaggcggggggtccggaggcggaggctcgggtgcatcaggggggccaaccatcgaagaggtggattag

SEQ ID NO: 210797 - DNA, 2767 bp, Artificial Sequence
  derived and/or modified sequence
ccagcagcaggaggcgcgcgaggcaccacggcctggcggccgagagtcagggaggaacctcatttacataacggccgcccctctgtctcctggcgggggccggagtcccgcccctcgtccaacttgaaatctgttgggtcacgggccagtcactccgacctaggcaagcctgtggtggagctggaagagtttgtgagggcggtcccgggagcggattgggtctgggagttcccagaggcggctataagaaccgggaactgggcgcggggagctgagttgctggtagtgcccgtggtgcttggttcgaggtggccgttagttgactccgcggagttcatctccctggttttcccgtcctaacgtcgctcgcctttcagtcaggatgtctgcccgtggcccggctatcggcatcgacctgggcaccacctattcgtgcgtcggggtcttccaacatggcaaggtggagatcatcgccaacgaccagggcaatcgcaccacccccagctacgtggccttcacggacaccgagcgcctcatcggcgacgccgccaagaaccaggtggccatgaaccccaccaacaccatcttcgacgccaagaggctgattggacggaaattcgaggatgccacagtgcagtcggatatgaaacactggccgttccgggtggtgagcgagggaggcaagcccaaagtgcaagtagagtacaagggggagaccaagaccttcttcccagaggagatatcctccatggtcctcacgaagatgaaggagatcgcggaagcctacctggggggcaaggtgcacagcgcggtcataacggtcccggcctatttcaacgactcgcagcgccaggccaccaaggacgcaggcaccatcacggggctcaatgtgctgcgcatcatcaacgagcccacggcggcggccatcgcctacggcctggacaagaagggctgcgcgggcggcgagaagaacgtgctcatctttgacctgggcggtggcactttcgacgtgtccatcctgaccatcgaggatggcatcttcgaggtgaagtccacggccggcgacacccacctgggcggtgaggacttcgacaaccgcatggtgagccacctggcggaggagttcaagcgcaagcacaagaaggacattgggcccaacaagcgcgccgtgaggcggctgcgcaccgcttgcgagcgcgccaagcgcaccctgagctcgtccacgcaggcgagcatcgagatcgactcgctctacgagggcgtggacttctatacgtccatcacgcgcgcccgcttcgaggagctcaatgccgacctctttcgcgggaccctggagccggtggagaaggcgctgcgcgacgccaagctggacaagggccagatccaggagatcgtgctggtgggcggctccactcgtatccccaagatccagaagctgctgcaggatttcttcaacggcaaggagctgaacaagagcatcaaccccgacgaggcggtggcctatggcgccgcggtgcaggcggccatcctcatcggcgacaaatcagagaatgtgcaggacctgctgctactcgacgtgaccccgttgtcgctgggcatcgagacagctggcggtgtcatgaccccactcatcaagaggaacaccacgatccccaccaagcagacgcagaccttcaccacctactcggacaaccagagcagcgtactggtgcaggtatacgagggcgaacgggccatgaccaaggacaataacctgctgggcaagttcgacctgaccgggattccccctgcgcctcgcggggtcccccaaatcgaggttaccttcgacattgacgccaatggcatccttaacgttaccgccgccgacaagagcaccggtaaggaaaacaaaatcaccatcaccaatgacaaaggtcgtctgagcaaggacgacattgaccggatggtgcaggaggcggagcggtacaaatcggaagatgaggcgaatcgcgaccgagtcgcggccaaaaacgccctggagtcctatacctacaacatcaagcagacggtggaagacgagaaactgaggggcaagattagcgagcaggacaaaaacaagatcctcgacaagtgtcaggaggtgatcaactggctcgaccgaaaccagatggcagagaaagatgagtatgaacacaagcagaaagagctcgaaagagtttgcaaccccatcatcagcaaactttaccaaggtggtcctggcggcggcagcggcggcggcggttcaggagcctccgggggacccaccatcgaagaagtggactaagcttgcactcaagtcagcgtaaacctctttgcctttctctctctctctttttttttgtttgtttctttgaaatgtccttgtgccaagtacgagatctattgttggaagtctttggtatatgcaaatgaaaggagaggtgcaacaacttagtttaattataaaagttccaaagtttgttttttaaaaacattattcgaggtttctctttaatgcattttgcgtgtttgctgacttgagcatttttgattagttcgtgcatggagatttgtttgagatgagaaaccttaagtttgcacacctgttctgtagaagcttggaaacagtaaaatatataggagcttaaattgtttatttttatgtactactttaaaactaaactgaacattgcagtaatgttaaggacaggtatactttttgcaaacaaatgcataaatgcaaatgtaaagtaaagctgaaattgatctc

SEQ ID NO: 210798 - DNA, 2464 bp, Artificial Sequence
  derived and/or modified sequence
ctctcttgcctgccgccatgtgcctttcgccttctgccgtgattgtgaggcctccccagccatatggaagttcaggatgtctgcccgtggcccggctatcggcatcgacctgggcaccacctattcgtgcgtcggggtcttccaacatggcaaggtggagatcatcgccaacgaccagggcaatcgcaccacccccagctacgtggccttcacggacaccgagcgcctcatcggcgacgccgccaagaaccaggtggccatgaaccccaccaacaccatcttcgacgccaagaggctgattggacggaaattcgaggatgccacagtgcagtcggatatgaaacactggccgttccgggtggtgagcgagggaggcaagcccaaagtgcaagtagagtacaagggggagaccaagaccttcttcccagaggagatatcctccatggtcctcacgaagatgaaggagatcgcggaagcctacctggggggcaaggtgcacagcgcggtcataacggtcccggcctatttcaacgactcgcagcgccaggccaccaaggacgcaggcaccatcacggggctcaatgtgctgcgcatcatcaacgagcccacggcggcggccatcgcctacggcctggacaagaagggctgcgcgggcggcgagaagaacgtgctcatctttgacctgggcggtggcactttcgacgtgtccatcctgaccatcgaggatggcatcttcgaggtgaagtccacggccggcgacacccacctgggcggtgaggacttcgacaaccgcatggtgagccacctggcggaggagttcaagcgcaagcacaagaaggacattgggcccaacaagcgcgccgtgaggcggctgcgcaccgcttgcgagcgcgccaagcgcaccctgagctcgtccacgcaggcgagcatcgagatcgactcgctctacgagggcgtggacttctatacgtccatcacgcgcgcccgcttcgaggagctcaatgccgacctctttcgcgggaccctggagccggtggagaaggcgctgcgcgacgccaagctggacaagggccagatccaggagatcgtgctggtgggcggctccactcgtatccccaagatccagaagctgctgcaggatttcttcaacggcaaggagctgaacaagagcatcaaccccgacgaggcggtggcctatggcgccgcggtgcaggcggccatcctcatcggcgacaaatcagagaatgtgcaggacctgctgctactcgacgtgaccccgttgtcgctgggcatcgagacagctggcggtgtcatgaccccactcatcaagaggaacaccacgatccccaccaagcagacgcagaccttcaccacctactcggacaaccagagcagcgtactggtgcaggtatacgagggcgaacgggccatgaccaaggacaataacctgctgggcaagttcgacctgaccgggattccccctgcgcctcgcggggtcccccaaatcgaggttaccttcgacattgacgccaatggcatccttaacgttaccgccgccgacaagagcaccggtaaggaaaacaaaatcaccatcaccaatgacaaaggtcgtctgagcaaggacgacattgaccggatggtgcaggaggcggagcggtacaaatcggaagatgaggcgaatcgcgaccgagtcgcggccaaaaacgccctggagtcctatacctacaacatcaagcagacggtggaagacgagaaactgaggggcaagattagcgagcaggacaaaaacaagatcctcgacaagtgtcaggaggtgatcaactggctcgaccgaaaccagatggcagagaaagatgagtatgaacacaagcagaaagagctcgaaagagtttgcaaccccatcatcagcaaactttaccaaggtggtcctggcggcggcagcggcggcggcggttcaggagcctccgggggacccaccatcgaagaagtggactaagcttgcactcaagtcagcgtaaacctctttgcctttctctctctctctttttttttgtttgtttctttgaaatgtccttgtgccaagtacgagatctattgttggaagtctttggtatatgcaaatgaaaggagaggtgcaacaacttagtttaattataaaagttccaaagtttgttttttaaaaacattattcgaggtttctctttaatgcattttgcgtgtttgctgacttgagcatttttgattagttcgtgcatggagatttgtttgagatgagaaaccttaagtttgcacacctgttctgtagaagcttggaaacagtaaaatatataggagcttaaattgtttatttttatgtactactttaaaactaaactgaacattgcagtaatgttaaggacaggtatactttttgcaaacaaatgcataaatgcaaatgtaaagtaaagctgaaattgatctcaaa

SEQ ID NO: 210799 - DNA, 1816 bp, Artificial Sequence
  derived and/or modified sequence
gagttgctggtagtgcccgtggtgcttggttcgaggtggccgttagttgactccgcggagttcatctccctggttttcccgtcctaacgtcgctcgcctttcagtcaggatgtctgcccgtggcccggctatcggcatcgacctgggcaccacctattcgtgcgtcggggtcttccaacatggcaaggtggagatcatcgccaacgaccagggcaatcgcaccacccccagctacgtggccttcacggacaccgagcgcctcatcggcgacgccgccaagaaccaggtggccatgaaccccaccaacaccatcttcgacgccaagaggctgattggacggaaattcgaggagctcaatgccgacctctttcgcgggaccctggagccggtggagaaggcgctgcgcgacgccaagctggacaagggccagatccaggagatcgtgctggtgggcggctccactcgtatccccaagatccagaagctgctgcaggatttcttcaacggcaaggagctgaacaagagcatcaaccccgacgaggcggtggcctatggcgccgcggtgcaggcggccatcctcatcggcgacaaatcagagaatgtgcaggacctgctgctactcgacgtgaccccgttgtcgctgggcatcgagacagctggcggtgtcatgaccccactcatcaagaggaacaccacgatccccaccaagcagacgcagaccttcaccacctactcggacaaccagagcagcgtactggtgcaggtatacgagggcgaacgggccatgaccaaggacaataacctgctgggcaagttcgacctgaccgggattccccctgcgcctcgcggggtcccccaaatcgaggttaccttcgacattgacgccaatggcatccttaacgttaccgccgccgacaagagcaccggtaaggaaaacaaaatcaccatcaccaatgacaaaggtcgtctgagcaaggacgacattgaccggatggtgcaggaggcggagcggtacaaatcggaagatgaggcgaatcgcgaccgagtcgcggccaaaaacgccctggagtcctatacctacaacatcaagcagacggtggaagacgagaaactgaggggcaagattagcgagcaggacaaaaacaagatcctcgacaagtgtcaggaggtgatcaactggctcgaccgaaaccagatggcagagaaagatgagtatgaacacaagcagaaagagctcgaaagagtttgcaaccccatcatcagcaaactttaccaaggtggtcctggcggcggcagcggcggcggcggttcaggagcctccgggggacccaccatcgaagaagtggactaagcttgcactcaagtcagcgtaaacctctttgcctttctctctctctctttttttttgtttgtttctttgaaatgtccttgtgccaagtacgagatctattgttggaagtctttggtatatgcaaatgaaaggagaggtgcaacaacttagtttaattataaaagttccaaagtttgttttttaaaaacattattcgaggtttctctttaatgcattttgcgtgtttgctgacttgagcatttttgattagttcgtgcatggagatttgtttgagatgagaaaccttaagtttgcacacctgttctgtagaagcttggaaacagtaaaatatataggagcttaaattgtttatttttatgtactactttaaaactaaactgaacattgcagtaatgttaaggacaggtatactttttgcaaacaaatgcataaatgcaaatgtaaagtaaagctgaaattgatctc

SEQ ID NO: 210800 - DNA, 1920 bp, Artificial Sequence
  derived and/or modified sequence
atgtctgcccggggccctgccatcggcatcgacctgggcaccacctacagctgtgtgggcgtcttccagcacggcaaggtggagatcatcgccaatgaccagggcaacagaaccacccccagctatgtggccttcacagacacagagcggctgattggagatgctgccaagaaccaggtggccatgaaccccaccaacaccatctttgatgccaagaggctgattggaaggaagtttgaagatgccaccgtgcagagcgacatgaagcactggcccttccgggtggtgtctgagggcggcaagcccaaggtgcaggtggagtacaagggggagaccaagaccttcttccctgaggagatcagctccatggtgctgaccaagatgaaggagattgctgaggcctacctgggcggcaaggtgcacagcgctgtgatcaccgtgcctgcctacttcaatgacagccagaggcaggccaccaaggatgctggcaccatcaccggcctgaatgtgctgcgcatcatcaatgagcccacagctgctgccatcgcctacggcctggacaagaagggctgtgccggcggggagaagaatgtgctgatctttgacctgggcggcggcacctttgatgtgtccatcctgaccattgaagatggcatctttgaggtgaagagcacagctggggacacccacctgggcggggaggactttgacaacaggatggtgagccacctggccgaggagttcaagaggaagcacaagaaggacatcggccccaacaagagagctgtgcggcggctgaggacagcctgtgagcgggccaagaggaccctgagcagcagcacccaggccagcattgaaattgacagcctgtatgaaggagtggacttctacaccagcatcacccgggccaggtttgaggagctgaatgctgacctcttccggggcaccctggagcctgtggagaaggccctgagagatgccaagctggacaagggccagatccaggagatcgtgctggtgggcggcagcacccgcatccccaagatccagaagctgctgcaggacttcttcaacgggaaggagctgaacaagagcatcaacccagatgaagctgtggcctacggggctgctgtgcaggccgccatcctgattggagacaagtcagaaaatgtgcaggacctgctgctgctggatgtgacccccctgagcctgggcatcgagacagctggaggagtgatgacccccctcatcaagaggaacaccaccatccccaccaagcagacccagaccttcaccacctacagcgacaaccagagctctgtgctggtgcaggtgtatgaaggagagcgggccatgaccaaggacaacaacctgctgggcaagtttgacctgaccggcatccccccagccccccggggcgtgccccagatcgaggtgacctttgatattgatgccaacggcatcctgaatgtgacagctgctgacaagagcacaggcaaggagaacaagatcaccatcaccaatgacaagggccgcctgagcaaggatgacatcgacaggatggtgcaggaggccgagcgctacaagtcagaagatgaggccaacagagacagagtggccgccaagaatgccctggagagctacacctacaacatcaagcagacagtggaggatgagaagctgcggggcaagatcagcgagcaggacaagaacaagatcctggacaagtgccaggaggtgatcaactggctggacaggaaccagatggccgagaaggatgaatatgagcacaagcagaaggagctggagcgggtgtgcaaccccatcatcagcaagctgtaccagggcggccctgggggcggcagcggcggcggcggcagcggggccagcggcggccccaccatcgaggaggtggactag

SEQ ID NO: 210801 - DNA, 1242 bp, Artificial Sequence
  derived and/or modified sequence
atgtctgcccggggccctgccatcggcatcgacctgggcaccacctacagctgtgtgggcgtcttccagcacggcaaggtggagatcatcgccaatgaccagggcaacagaaccacccccagctatgtggccttcacagacacagagcggctgattggagatgctgccaagaaccaggtggccatgaaccccaccaacaccatctttgatgccaagaggctgattggaaggaagtttgaggagctgaatgctgacctcttccggggcaccctggagcctgtggagaaggccctgagagatgccaagctggacaagggccagatccaggagatcgtgctggtgggcggcagcacccgcatccccaagatccagaagctgctgcaggacttcttcaacgggaaggagctgaacaagagcatcaacccagatgaagctgtggcctacggggctgctgtgcaggccgccatcctgattggagacaagtcagaaaatgtgcaggacctgctgctgctggatgtgacccccctgagcctgggcatcgagacagctggaggagtgatgacccccctcatcaagaggaacaccaccatccccaccaagcagacccagaccttcaccacctacagcgacaaccagagctctgtgctggtgcaggtgtatgaaggagagcgggccatgaccaaggacaacaacctgctgggcaagtttgacctgaccggcatccccccagccccccggggcgtgccccagatcgaggtgacctttgatattgatgccaacggcatcctgaatgtgacagctgctgacaagagcacaggcaaggagaacaagatcaccatcaccaatgacaagggccgcctgagcaaggatgacatcgacaggatggtgcaggaggccgagcgctacaagtcagaagatgaggccaacagagacagagtggccgccaagaatgccctggagagctacacctacaacatcaagcagacagtggaggatgagaagctgcggggcaagatcagcgagcaggacaagaacaagatcctggacaagtgccaggaggtgatcaactggctggacaggaaccagatggccgagaaggatgaatatgagcacaagcagaaggagctggagcgggtgtgcaaccccatcatcagcaagctgtaccagggcggccctgggggcggcagcggcggcggcggcagcggggccagcggcggccccaccatcgaggaggtggactag

SEQ ID NO: 210802 - DNA, 1920 bp, Artificial Sequence
  derived and/or modified sequence
atgagcgcccggggccccgccatcggcatcgacctgggcaccacctatagttgtgtaggagtgtttcagcatggaaaggttgagatcatcgctaacgatcagggcaacagaaccacgccttcatatgtcgcatttacagacactgagaggctaattggggatgccgccaaaaatcaggtggcaatgaaccccaccaacacgatttttgatgccaaacggcttattggccggaaatttgaggacgcaacagtgcagagtgatatgaagcactggccattcagagtggtcagcgaaggaggaaagccgaaggttcaagtcgagtataagggagaaacgaaaaccttcttcccagaagagatttcctccatggtcctgaccaaaatgaaggagatcgcagaagcttatttaggtggcaaggtgcattccgcggtgattaccgtgccggcctattttaatgatagtcagcggcaggccactaaggacgccggcaccatcacaggcctgaacgtcctgcgaattattaatgagcccacagccgccgccattgcttacggactcgataagaaagggtgtgccggtggggagaaaaacgtcctgatcttcgacttggggggggggacatttgatgtgtctatcctgactatcgaagacggcatctttgaagttaagtccaccgccggagatactcacctcggtggggaggattttgacaaccgcatggtgagccatctggccgaagagttcaagaggaagcacaagaaggacataggccctaataagagagccgtaagacgccttcgtactgcctgcgaaagagctaaacgcactctaagcagtagcactcaagcaagtattgagatcgactcactgtatgagggagtagacttctacacttctatcactagggcaaggttcgaagaactgaacgccgatctttttcgcggcacgctggaaccggttgagaaggctctgcgggatgccaagttggacaagggacagattcaggaaattgtgctcgttggcggctccacacgcattcctaagattcagaaactgttgcaggacttcttcaatggcaaggagcttaacaaaagtattaaccccgacgaagctgtagcctacggagctgccgtccaggccgccattttgatcggcgacaagtctgagaatgttcaagaccttctcttattggatgtgacacccctgagtctcggcatcgaaactgccggtggggtcatgacccctctgattaagagaaacaccaccatcccaaccaaacaaactcagacttttaccacatatagcgacaaccagagctctgtgctagttcaggtatatgagggcgagcgggctatgacaaaagacaataacttactcggaaagtttgacctcacgggcataccaccagctcccagaggtgtgccccagatcgaagtaaccttcgacattgatgccaacggcatactgaacgtcaccgccgccgacaagtccaccggcaaggagaacaaaatcacgataacaaacgacaaagggagattgtccaaggatgatatcgatcggatggtgcaagaggctgagcggtacaagtcggaggatgaggcaaacagggatcgggtggccgctaagaacgctctggaatcatatacctacaatatcaagcagacagtggaagacgagaaactgcggggtaagatctcagagcaggacaagaacaagattctggacaagtgtcaggaggttatcaactggctggatcgcaatcagatggcagagaaggacgaatatgagcacaaacagaaagagctcgagcgagtgtgcaaccccattatcagcaaattatatcagggtgggcctggcgggggaagcggggggggaggttctggtgcgtctggggggcccaccatcgaagaggtggattag

SEQ ID NO: 210803 - DNA, 1920 bp, Artificial Sequence
  derived and/or modified sequence
atgagcgcccggggccccgccatcggcatcgacctgggcaccacctattcctgcgttggagtgttccaacacggcaaggtagaaatcatcgcaaatgatcagggaaacaggaccacccccagctatgtggcattcacggatactgaacggttgattggtgacgcagccaagaaccaagtggccatgaacccaacaaatacaattttcgacgctaaaagattgatcgggaggaagttcgaagatgccaccgtgcaatcagatatgaagcattggccttttagggtcgtgtcagagggtggcaaaccaaaggtgcaagtagagtataagggggaaacaaagactttctttccggaggaaatctctagcatggtcctaacaaaaatgaaagaaatcgccgaggcctatctgggagggaaagtgcactccgccgtgatcactgtgcctgcttacttcaatgatagccaaagacaggctacgaaggacgccggaacgatcacaggcttgaatgtgttgcggattataaatgagccgacagctgcagccatcgcgtatgggttagacaaaaaaggttgtgcaggcggcgaaaagaatgtgctcattttcgacctggggggaggcacgttcgacgtgagcattcttaccattgaggatggcatctttgaggtcaagtctacagcaggggatacacacttgggtggagaggactttgataaccggatggtctcccacttggccgaggagtttaagcggaaacacaaaaaagatatcgggccgaacaagcgcgcagtccggaggctgcggacagcatgtgaacgggccaaaaggacattatctagtagtacgcaggccagcatcgagattgatagcctctacgaaggagtggatttctatacatctatcacaagggcaaggtttgaggaactcaatgcggatttgtttcgcgggaccctggaacccgtagagaaagccctcagggacgccaagctggacaagggccagattcaagagatcgtgttggtgggcggaagtacccgaatcccaaagattcagaagcttctgcaagactttttcaatggtaaagaactcaacaaatccatcaaccctgatgaggcagtggcctacggagctgccgtccaagccgccattctgattggtgacaaaagtgagaacgtgcaggacttactcttgctggacgtcaccccgttgagccttgggatcgaaaccgctgggggtgtcatgactcctcttataaagaggaacaccaccatcccaacaaaacagactcagacattcactacctattcagataaccagagctccgtgttagttcaggtctatgagggcgagcgcgctatgactaaagataacaacttgctgggaaagttcgatttgacgggcattccgcccgctccacgaggagtgccccagatcgaagtgacgtttgacatagatgcgaacgggattttgaacgtgaccgctgcagataaatctacggggaaggaaaataaaataaccattacaaacgataaaggaaggctgtccaaggatgacatcgaccgcatggtgcaggaagcagaacgatacaaatctgaagatgaagcaaatcgcgatcgggtggcagccaagaacgccctggagtcctatacgtacaacataaagcagacagtggaagatgagaaactgagaggcaagatctcagaacaggacaagaataaaattctcgataaatgccaggaggtaatcaattggctcgatcgcaaccagatggcggagaaggacgagtatgaacataaacagaaagagctggagagagtatgcaatcctatcatctcaaagctttaccagggggggccaggcggcgggagcggaggtggagggagcggggcctcaggagggccaacgatcgaagaagtggattag

SEQ ID NO: 210804 - DNA, 1242 bp, Artificial Sequence
  derived and/or modified sequence
atgagcgcccggggccccgccatcggcatcgacctgggcaccacctacagttgcgttggtgtatttcagcacggcaaagtagaaatcattgcaaatgaccaggggaatcggactacaccctcatacgtggctttcactgataccgaaagactcatcggtgacgctgccaaaaaccaggttgctatgaacccaaccaacacaatattcgacgctaaacggctcattgggagaaaatttgaggagctgaatgcggacctgttcaggggcactctggaaccagttgagaaggccctcagggatgcaaaactggataaggggcagatccaggagatagtactggtgggcggctctaccagaattccaaagatccaaaaactactccaggacttctttaatggcaaggagctcaacaaatctatcaacccagatgaggccgtggcctatggcgctgctgtacaggctgccattctgattggggataaatccgaaaacgtacaagaccttctactgctggacgtcactcctctctcacttgggatagagactgccggtggagtaatgactcccctcatcaagagaaacacaacgattccaactaagcaaacccagaccttcaccacttattccgacaaccagtcatccgtcttggttcaggtgtacgaaggcgagagggcgatgactaaggacaacaacctgctcgggaagttcgatctgaccgggattccgcctgccccacggggcgtaccgcaaattgaagtcacctttgacatcgatgcaaacggaattctcaacgtcacagcagccgataaaagtactgggaaagagaataaaatcactatcacgaacgacaaaggcaggctcagcaaggatgacatagatagaatggtgcaggaagccgaacggtataagtccgaggatgaggccaatcgggacagagttgcagctaaaaatgccttggaaagttacacatacaacatcaaacagactgttgaggatgaaaaactgaggggcaaaatctctgagcaagacaagaataagatactcgacaagtgccaggaggtgattaactggctcgatagaaaccagatggccgaaaaggacgaatacgaacataagcagaaagaacttgagcgggtgtgcaatcccataatcagcaaactttaccagggagggccgggtggtgggagcgggggtggcggcagtggcgcttccggaggtccaactatagaagaggtggactag

SEQ ID NO: 210805 - DNA, 1920 bp, Artificial Sequence
  derived and/or modified sequence
atgtctgcacgaggcccagcaatcggaattgacttgggtacgacatactcctgcgtaggggtcttccagcatggaaaggtggagattatcgccaatgatcagggcaatagaactaccccctcttacgtcgctttcacagatactgaacgcttgataggagacgccgctaaaaatcaagttgccatgaatcccacaaacaccatatttgatgctaagcgtctgattggccgtaagtttgaagacgccacagttcagagcgacatgaaacattggcctttccgtgtcgtatccgaaggcggaaagcctaaagtgcaggtggaatataagggcgagacaaaaaccttttttcctgaagagatttcgtccatggtccttaccaagatgaaagaaattgccgaggcgtacctgggaggaaaagtacacagcgctgtaattactgttcccgcatactttaacgattcacagagacaagcaactaaggatgcagggactattaccgggctgaatgtgcttcggattatcaatgagcctactgctgcggcaattgcatatggtttggacaagaaaggctgcgcagggggtgagaagaacgttctaatttttgatctggggggtgggacattcgacgtaagcatcttaactatagaagatggtatcttcgaggtgaaatcgacagctggagacacccatttgggaggagaggactttgacaaccgaatggtgagccatctggccgaagagttcaagcgaaaacataagaaggacatcggacctaataagagagccgtgcgtaggctgcggacagcgtgtgagagggcaaaacgcaccctgtccagttcgacacaggctagcatcgagatcgattcactctacgagggcgtggatttttataccagcataactcgagccaggtttgaagagttgaatgccgacctttttcggggaacactcgagcccgtggaaaaagctttacgggatgctaagctggataaaggccagatccaggaaattgtgcttgtgggaggaagcacccggatcccaaagatacagaaactcctccaagactttttcaacggaaaggaacttaataagtccataaatccggacgaagccgttgcctatggcgcagccgtccaggccgctatccttattggcgataaaagtgagaacgtccaggacctattgctcctagacgtgacacctctgagcctcgggattgaaaccgcagggggtgtgatgacccctttgattaagagaaacacgactataccaactaaacaaacacaaactttcaccacgtattccgacaaccagagctctgttttggttcaggtctacgagggcgagcgggctatgaccaaggataacaatctgttaggaaaattcgaccttacagggatacccccagcccctaggggggtgccacagatagaggtaactttcgacatcgatgccaatgggatcctgaatgtgacagccgcagacaagtcaacagggaaggagaataaaattacaattaccaatgacaaagggaggctttcaaaagacgacatcgaccgtatggtacaggaggcagagcgatataagtctgaagacgaggccaatcgagatagggtcgccgctaaaaacgccctggaaagctacacgtataatattaaacaaacagtagaggatgaaaagctgcggggtaaaatatcagagcaagacaagaataagattctggacaagtgccaagaggtgatcaactggctagataggaatcagatggcagagaaggacgagtacgagcacaaacaaaaagagctggagcgagtatgtaacccaatcatctccaaactctatcagggcggacccggtggcggttctgggggtgggggtagtggcgcatccggcggaccgaccattgaagaggtcgactag

SEQ ID NO: 210806 - DNA, 1920 bp, Artificial Sequence
  derived and/or modified sequence
atgtctgcaagaggtcccgctatcggtatcgacttgggtacgacatactcgtgcgtgggagtctttcaacatggaaaagtggagatcatcgcaaacgatcagggcaacagaaccaccccatcctacgtcgcatttaccgacaccgaaaggctgatcggagacgccgctaagaatcaggtcgccatgaatcctactaataccattttcgatgctaaaagactaattggtaggaagtttgaggatgccaccgtccagagcgatatgaaacactggcctttccgcgtagtgagtgaagggggaaagcccaaagtgcaagttgagtacaaaggcgaaacaaaaactttttttccagaggaaattagctctatggtcctgacaaagatgaaagaaatcgctgaagcttacctggggggaaaggttcacagtgccgttatcaccgtcccagcttattttaacgatagccagcgacaagctacaaaggacgccggtaccatcacagggcttaacgtactcaggatcataaatgagcccactgccgctgccattgcctacggattggataaaaaaggctgcgccggtggcgaaaaaaacgtgctcatattcgacctcgggggaggcacttttgatgtgtccatcctgaccattgaagatggcatttttgaggtgaaatccactgccggagatacacacctgggcggtgaggatttcgataataggatggtctctcatctggcggaggagtttaagaggaagcataagaaggatataggtcccaacaagcgcgcagtgagacgactgaggactgcctgtgagcgagcaaaacgtactttatcaagttccacccaagcctctattgagatagatagcctgtatgagggcgtggatttctacacttccatcacgagggctaggtttgaagagctgaatgctgatttattcaggggaacactcgagcccgtcgaaaaggctcttagagacgctaaactcgataaaggccagatacaagaaatcgtcctggtgggcggaagcacgaggatccccaaaatacagaaactgctccaagatttctttaatggtaaggagctgaacaagtccatcaaccccgatgaggctgtcgcctacggagccgctgtgcaggcggctatacttattggagataagagcgaaaacgttcaagacctgctgctgctcgacgttactcctcttagcttgggcatcgaaactgctggcggagtgatgacccccctcataaagcgcaacaccactatcccaaccaaacagacacagacctttacaacttatagcgacaaccagtctagcgtactcgtgcaggtatatgaaggagaaagggctatgaccaaggataacaacctgctcggcaaattcgatctcactggtatccctcccgcaccccgtggcgtgccacaaatcgaggtcaccttcgatatcgacgctaacgggatcctcaatgtgacagctgccgacaagtctaccggcaaggagaacaaaatcaccataacgaatgacaaagggcgtctgagcaaggatgacatcgacaggatggtgcaagaagcagagaggtacaaatccgaggatgaggctaatagagaccgtgtcgccgcaaagaatgctttggaatcgtatacatataatattaaacagacggtcgaagacgaaaagttgcgcggaaagatttcagagcaggataaaaataaaatcctagataaatgtcaggaagtgattaattggctcgacagaaaccagatggctgagaaagatgagtatgagcataaacagaaggaactggaacgcgtgtgtaacccgattatatctaagttgtatcaggggggaccgggaggaggatctggtggaggtggaagcggcgcaagtggcggacccacgatcgaggaggtggattag

SEQ ID NO: 210807 - DNA, 1242 bp, Artificial Sequence
  derived and/or modified sequence
atgtctgccaggggtcctgctattggaatcgatctgggcaccacttattcctgtgtgggcgtgttccaacacggcaaggtggaaatcattgcaaacgaccagggcaatcgaacaaccccatcttacgtcgccttcactgacactgagagacttatcggagacgctgctaaaaatcaggtggctatgaaccccaccaacacaattttcgacgcaaagaggttgatcggcaggaagttcgaagagctgaacgcagatctgttcaggggaactctggagcccgtggagaaggctctgcgggatgccaagttggacaagggccagatccaggaaattgttctcgtaggcggaagtactagaatccctaaaatccagaaactcctgcaggatttcttcaacggcaaggaactaaacaagtcaatcaatccggatgaagcagtggcatatggggctgcagtccaggccgctattctaatcggagacaagagcgaaaatgtgcaggacctgctgctcctggatgtcacacctttgagcctagggattgaaactgctggcggtgtgatgacgcccctgatcaagagaaacaccaccattccgacaaagcagacccaaactttcactacttattctgataatcagtccagcgtgttggtgcaggtatacgagggcgaacgggctatgacaaaggacaataacctgctcggaaagttcgatttgacagggattcctcctgccccaagaggagtgccacaaattgaagtaaccttcgatatcgatgctaacggcatcttgaacgtaactgcagcagataagtcaacgggcaaggagaacaagattaccataaccaacgataagggcagactttctaaagacgatatcgatcggatggtgcaggaggcagaaagatacaagtcagaagatgaagccaaccgggaccgtgttgcggctaagaatgccttggagtcctatacttataacatcaaacagactgtggaggacgagaagctgagagggaaaatttcggaacaggataagaacaaaattctggacaagtgccaggaggttatcaattggcttgaccggaatcagatggctgagaaagacgaatacgagcacaagcagaaggaacttgagagggtgtgtaatcctataatcagcaagctgtatcagggtgggcctggtggaggatcaggagggggaggatccggcgctagtggcggaccaactatcgaggaagttgattag

SEQ ID NO: 210808 - DNA, 1920 bp, Artificial Sequence
  derived and/or modified sequence
atgagcgccagaggccccgccatcggcatcgacctgggcaccacctacagctgcgtgggcgtgttccagcacggcaaggtggagatcatcgccaacgaccagggcaacagaaccacccccagctacgtggccttcaccgacaccgagagactgatcggcgacgccgccaagaaccaggtggccatgaaccccaccaacaccatcttcgacgccaagagactgatcggcagaaagttcgaggacgccaccgtgcagagcgacatgaagcactggcccttcagagtggtgagcgagggcggcaagcccaaggtgcaggtggagtacaagggcgagaccaagaccttcttccccgaggagatcagcagcatggtgctgaccaagatgaaggagatcgccgaggcctacctgggcggcaaggtgcacagcgccgtgatcaccgtgcccgcctacttcaacgacagccagagacaggccaccaaggacgccggcaccatcaccggcctgaacgtgctgagaatcatcaacgagcccaccgccgccgccatcgcctacggcctggacaagaagggctgcgccggcggcgagaagaacgtgctgatcttcgacctgggcggcggcaccttcgacgtgagcatcctgaccatcgaggacggcatcttcgaggtgaagagcaccgccggcgacacccacctgggcggcgaggacttcgacaacagaatggtgagccacctggccgaggagttcaagagaaagcacaagaaggacatcggccccaacaagagagccgtgagaagactgagaaccgcctgcgagagagccaagagaaccctgagcagcagcacccaggccagcatcgagatcgacagcctgtacgagggcgtggacttctacaccagcatcaccagagccagattcgaggagctgaacgccgacctgttcagaggcaccctggagcccgtggagaaggccctgagagacgccaagctggacaagggccagatccaggagatcgtgctggtgggcggcagcaccagaatccccaagatccagaagctgctgcaggacttcttcaacggcaaggagctgaacaagagcatcaaccccgacgaggccgtggcctacggcgccgccgtgcaggccgccatcctgatcggcgacaagagcgagaacgtgcaggacctgctgctgctggacgtgacccccctgagcctgggcatcgagaccgccggcggcgtgatgacccccctgatcaagagaaacaccaccatccccaccaagcagacccagaccttcaccacctacagcgacaaccagagcagcgtgctggtgcaggtgtacgagggcgagagagccatgaccaaggacaacaacctgctgggcaagttcgacctgaccggcatcccccccgcccccagaggcgtgccccagatcgaggtgaccttcgacatcgacgccaacggcatcctgaacgtgaccgccgccgacaagagcaccggcaaggagaacaagatcaccatcaccaacgacaagggcagactgagcaaggacgacatcgacagaatggtgcaggaggccgagagatacaagagcgaggacgaggccaacagagacagagtggccgccaagaacgccctggagagctacacctacaacatcaagcagaccgtggaggacgagaagctgagaggcaagatcagcgagcaggacaagaacaagatcctggacaagtgccaggaggtgatcaactggctggacagaaaccagatggccgagaaggacgagtacgagcacaagcagaaggagctggagagagtgtgcaaccccatcatcagcaagctgtaccagggcggccccggcggcggcagcggcggcggcggcagcggcgccagcggcggccccaccatcgaggaggtggactag

SEQ ID NO: 210809 - DNA, 1242 bp, Artificial Sequence
  derived and/or modified sequence
atgagcgccagaggccccgccatcggcatcgacctgggcaccacctacagctgcgtgggcgtgttccagcacggcaaggtggagatcatcgccaacgaccagggcaacagaaccacccccagctacgtggccttcaccgacaccgagagactgatcggcgacgccgccaagaaccaggtggccatgaaccccaccaacaccatcttcgacgccaagagactgatcggcagaaagttcgaggagctgaacgccgacctgttcagaggcaccctggagcccgtggagaaggccctgagagacgccaagctggacaagggccagatccaggagatcgtgctggtgggcggcagcaccagaatccccaagatccagaagctgctgcaggacttcttcaacggcaaggagctgaacaagagcatcaaccccgacgaggccgtggcctacggcgccgccgtgcaggccgccatcctgatcggcgacaagagcgagaacgtgcaggacctgctgctgctggacgtgacccccctgagcctgggcatcgagaccgccggcggcgtgatgacccccctgatcaagagaaacaccaccatccccaccaagcagacccagaccttcaccacctacagcgacaaccagagcagcgtgctggtgcaggtgtacgagggcgagagagccatgaccaaggacaacaacctgctgggcaagttcgacctgaccggcatcccccccgcccccagaggcgtgccccagatcgaggtgaccttcgacatcgacgccaacggcatcctgaacgtgaccgccgccgacaagagcaccggcaaggagaacaagatcaccatcaccaacgacaagggcagactgagcaaggacgacatcgacagaatggtgcaggaggccgagagatacaagagcgaggacgaggccaacagagacagagtggccgccaagaacgccctggagagctacacctacaacatcaagcagaccgtggaggacgagaagctgagaggcaagatcagcgagcaggacaagaacaagatcctggacaagtgccaggaggtgatcaactggctggacagaaaccagatggccgagaaggacgagtacgagcacaagcagaaggagctggagagagtgtgcaaccccatcatcagcaagctgtaccagggcggccccggcggcggcagcggcggcggcggcagcggcgccagcggcggccccaccatcgaggaggtggactag

SEQ ID NO: 210810 - DNA, 2802 bp, Artificial Sequence
  derived and/or modified sequence
ccagcagcaggaggcgcgcgaggcaccacggcctggcggccgagagtcagggaggaacctcatttacataacggccgcccctctgtctcctggcgggggccggagtcccgcccctcgtccaacttgaaatctgttgggtcacgggccagtcactccgacctaggcaagcctgtggtggagctggaagagtttgtgagggcggtcccgggagcggattgggtctgggagttcccagaggcggctataagaaccgggaactgggcgcggggagctgagttgctggtagtgcccgtggtgcttggttcgaggtggccgttagttgactccgcggagttcatctccctggttttcccgtcctaacgtcgctcgcctttcagtcaggatgtctgcccgtggcccggctatcggcatcgacctgggcaccacctattcgtgcgtcggggtcttccaacatggcaaggtggagatcatcgccaacgaccagggcaatcgcaccacccccagctacgtggccttcacggacaccgagcgcctcatcggcgacgccgccaagaaccaggtggccatgaaccccaccaacaccatcttcgacgccaagaggctgattggacggaaattcgaggatgccacagtgcagtcggatatgaaacactggccgttccgggtggtgagcgagggaggcaagcccaaagtgcaagtagagtacaagggggagaccaagaccttcttcccagaggagatatcctccatggtcctcacgaagatgaaggagatcgcggaagcctacctggggggcaaggtgcacagcgcggtcataacggtcccggcctatttcaacgactcgcagcgccaggccaccaaggacgcaggcaccatcacggggctcaatgtgctgcgcatcatcaacgagcccacggcggcggccatcgcctacggcctggacaagaagggctgcgcgggcggcgagaagaacgtgctcatctttgacctgggcggtggcactttcgacgtgtccatcctgaccatcgaggatggcatcttcgaggtgaagtccacggccggcgacacccacctgggcggtgaggacttcgacaaccgcatggtgagccacctggcggaggagttcaagcgcaagcacaagaaggacattgggcccaacaagcgcgccgtgaggcggctgcgcaccgcttgcgagcgcgccaagcgcaccctgagctcgtccacgcaggcgagcatcgagatcgactcgctctacgagggcgtggacttctatacgtccatcacgcgcgcccgcttcgaggagctcaatgccgacctctttcgcgggaccctggagccggtggagaaggcgctgcgcgacgccaagctggacaagggccagatccaggagatcgtgctggtgggcggctccactcgtatccccaagatccagaagctgctgcaggatttcttcaacggcaaggagctgaacaagagcatcaaccccgacgaggcggtggcctatggcgccgcggtgcaggcggccatcctcatcggcgacaaatcagagaatgtgcaggacctgctgctactcgacgtgaccccgttgtcgctgggcatcgagacagctggcggtgtcatgaccccactcatcaagaggaacaccacgatccccaccaagcagacgcagaccttcaccacctactcggacaaccagagcagcgtactggtgcaggtatacgagggcgaacgggccatgaccaaggacaataacctgctgggcaagttcgacctgaccgggattccccctgcgcctcgcggggtcccccaaatcgaggttaccttcgacattgacgccaatggcatccttaacgttaccgccgccgacaagagcaccggtaaggaaaacaaaatcaccatcaccaatgacaaaggtcgtctgagcaaggacgacattgaccggatggtgcaggaggcggagcggtacaaatcggaagatgaggcgaatcgcgaccgagtcgcggccaaaaacgccctggagtcctatacctacaacatcaagcagacggtggaagacgagaaactgaggggcaagattagcgagcaggacaaaaacaagatcctcgacaagtgtcaggaggtgatcaactggctcgaccgaaaccagatggcagagaaagatgagtatgaacacaagcagaaagagctcgaaagagtttgcaaccccatcatcagcaaactttaccaaggtggtcctggcggcggcagcggcggcggcggttcaggagcctccgggggacccaccatcgaagaagtggactaagcttgcactcaagtcagcgtaaacctctttgcctttctctctctctctttttttttgtttgtttctttgaaatgtccttgtgccaagtacgagatctattgttggaagtctttggtatatgcaaatgaaaggagaggtgcaacaacttagtttaattataaaagttccaaagtttgttttttaaaaacattattcgaggtttctctttaatgcattttgcgtgtttgctgacttgagcatttttgattagttcgtgcatggagatttgtttgagatgagaaaccttaagtttgcacacctgttctgtagaagcttggaaacagtaaaatatataggagcttaaattgtttatttttatgtactactttaaaactaaactgaacattgcagtaatgttaaggacaggtatactttttgcaaacaaatgcataaatgcaaatgtaaagtaaagctgaaattgatctcaaaaaaaaaaaaaaaaaaaaaaaaaaaaaaaaaaa

SEQ ID NO: 210811 - protein, 1093 aa, Artificial Sequence
  derived and/or modified sequence
MSQPGIPASGGAPASLQAQNGAALASGSPYTNGPVQNALLSSQESVSQGYNFQLPGSYPHPIPAKTLNPVSGQSNYGGSQGSGQTLNRPPVASNPVTPSLHSGPAPRMPLPASQNPATTPMPSSSFLPEANLPPPLNWQYNYPSTASQTNHCPRASSQPTVSGNTSLTTNHQYVSSGYPSLQNSFIKSGPSVPPLVNPPLPTTFQPGAPHGPPPAGGPPPVRALTPLTSSYRDVPQPLFNSAVNQEGITSNTNNGSMVVHSSYDEIEGGGLLATPQLTNKNPKMSRSVGYSYPSLPPGYQNTTPPGATGVPPSSLNYPSGPQAFTQTPLGANHLTTSMSGLSLQPEGLRVVNLLQERNMLPSTPLKPPVPNLHEDIQKLNCNPELFRCTLTSIPQTQALLNKAKLPLGLLLHPFKDLVQLPVVTSSTIVRCRSCRTYINPFVSFLDQRRWKCNLCYRVNDVPEEFLYNPLTRVYGEPHRRPEVQNATIEFMAPSEYMLRPPQPPVYLFVFDVSHNAVETGYLNSVCQSLLDNLDLLPGNTRTKIGFITFDSTIHFYGLQESLSQPQMLIVSDIEDVFIPMPENLLVNLNESKELVQDLLKTLPQMFTKTLETQSALGPALQAAFKLMSPTGGRMSVFQTQLPTLGVGALKPREEPNHRSSAKDIHMTPSTDFYKKLALDCSGQQVAVDLFLLSGQYSDLASLGCISRYSAGSVYYYPSYHHQHNPVQVQKLQKELQRYLTRKIGFEAVMRIRCTKGLSIHTFHGNFFVRSTDLLSLPNVNPDAGYAVQMSVEESLTDTQLVSFQSALLYTSSKGERRIRVHTLCLPVVSTLNDVFLGADVQAISGLLANMAVDRSMTASLSDARDALVNAVIDSLSAYRSSVLSNQQPGLMVPFSLRLFPLFVLALLKQKSFQTGTNARLDERIFAMCQVKNQPLVYLMLTTHPSLYRVDNLSDEGALNISDRTIPQPPILQLSVEKLSRDGAFLMDAGSVLMLWVGKNCTQNFLSQVLGVQNYASIPQPMTDLPELDTPESARIIAFISWLREQRPFFPILYVIRDESPMKANFLQNMIEDRTESALSYYEFLLHIQQQVNK

SEQ ID NO: 210812 - DNA, 3282 bp, Artificial Sequence
  derived and/or modified sequence
atgagccagcccggcatccccgccagcggcggcgcccccgccagcctgcaggcccagaacggcgccgccctggccagcggcagcccctacaccaacggccccgtgcagaacgccctgctgagcagccaggagagcgtgagccagggctacaacttccagctgcccggcagctacccccaccccatccccgccaagaccctgaaccccgtgagcggccagagcaactacggcggcagccagggcagcggccagaccctgaacagaccccccgtggccagcaaccccgtgacccccagcctgcacagcggccccgcccccagaatgcccctgcccgccagccagaaccccgccaccacccccatgcccagcagcagcttcctgcccgaggccaacctgcccccccccctgaactggcagtacaactaccccagcaccgccagccagaccaaccactgccccagagccagcagccagcccaccgtgagcggcaacaccagcctgaccaccaaccaccagtacgtgagcagcggctaccccagcctgcagaacagcttcatcaagagcggccccagcgtgccccccctggtgaacccccccctgcccaccaccttccagcccggcgccccccacggccccccccccgccggcggccccccccccgtgagagccctgacccccctgaccagcagctacagagacgtgccccagcccctgttcaacagcgccgtgaaccaggagggcatcaccagcaacaccaacaacggcagcatggtggtgcacagcagctacgacgagatcgagggcggcggcctgctggccaccccccagctgaccaacaagaaccccaagatgagcagaagcgtgggctacagctaccccagcctgccccccggctaccagaacaccaccccccccggcgccaccggcgtgccccccagcagcctgaactaccccagcggcccccaggccttcacccagacccccctgggcgccaaccacctgaccaccagcatgagcggcctgagcctgcagcccgagggcctgagagtggtgaacctgctgcaggagagaaacatgctgcccagcacccccctgaagccccccgtgcccaacctgcacgaggacatccagaagctgaactgcaaccccgagctgttcagatgcaccctgaccagcatcccccagacccaggccctgctgaacaaggccaagctgcccctgggcctgctgctgcaccccttcaaggacctggtgcagctgcccgtggtgaccagcagcaccatcgtgagatgcagaagctgcagaacctacatcaaccccttcgtgagcttcctggaccagagaagatggaagtgcaacctgtgctacagagtgaacgacgtgcccgaggagttcctgtacaaccccctgaccagagtgtacggcgagccccacagaagacccgaggtgcagaacgccaccatcgagttcatggcccccagcgagtacatgctgagacccccccagccccccgtgtacctgttcgtgttcgacgtgagccacaacgccgtggagaccggctacctgaacagcgtgtgccagagcctgctggacaacctggacctgctgcccggcaacaccagaaccaagatcggcttcatcaccttcgacagcaccatccacttctacggcctgcaggagagcctgagccagccccagatgctgatcgtgagcgacatcgaggacgtgttcatccccatgcccgagaacctgctggtgaacctgaacgagagcaaggagctggtgcaggacctgctgaagaccctgccccagatgttcaccaagaccctggagacccagagcgccctgggccccgccctgcaggccgccttcaagctgatgagccccaccggcggcagaatgagcgtgttccagacccagctgcccaccctgggcgtgggcgccctgaagcccagagaggagcccaaccacagaagcagcgccaaggacatccacatgacccccagcaccgacttctacaagaagctggccctggactgcagcggccagcaggtggccgtggacctgttcctgctgagcggccagtacagcgacctggccagcctgggctgcatcagcagatacagcgccggcagcgtgtactactaccccagctaccaccaccagcacaaccccgtgcaggtgcagaagctgcagaaggagctgcagagatacctgaccagaaagatcggcttcgaggccgtgatgagaatcagatgcaccaagggcctgagcatccacaccttccacggcaacttcttcgtgagaagcaccgacctgctgagcctgcccaacgtgaaccccgacgccggctacgccgtgcagatgagcgtggaggagagcctgaccgacacccagctggtgagcttccagagcgccctgctgtacaccagcagcaagggcgagagaagaatcagagtgcacaccctgtgcctgcccgtggtgagcaccctgaacgacgtgttcctgggcgccgacgtgcaggccatcagcggcctgctggccaacatggccgtggacagaagcatgaccgccagcctgagcgacgccagagacgccctggtgaacgccgtgatcgacagcctgagcgcctacagaagcagcgtgctgagcaaccagcagcccggcctgatggtgcccttcagcctgagactgttccccctgttcgtgctggccctgctgaagcagaagagcttccagaccggcaccaacgccagactggacgagagaatcttcgccatgtgccaggtgaagaaccagcccctggtgtacctgatgctgaccacccaccccagcctgtacagagtggacaacctgagcgacgagggcgccctgaacatcagcgacagaaccatcccccagccccccatcctgcagctgagcgtggagaagctgagcagagacggcgccttcctgatggacgccggcagcgtgctgatgctgtgggtgggcaagaactgcacccagaacttcctgagccaggtgctgggcgtgcagaactacgccagcatcccccagcccatgaccgacctgcccgagctggacacccccgagagcgccagaatcatcgccttcatcagctggctgagagagcagagacccttcttccccatcctgtacgtgatcagagacgagagccccatgaaggccaacttcctgcagaacatgatcgaggacagaaccgagagcgccctgagctactacgagttcctgctgcacatccagcagcaggtgaacaagtag

SEQ ID NO: 210813 - DNA, 3282 bp, Artificial Sequence
  derived and/or modified sequence
atgtcacaacctgggatccccgctagtgggggagctcctgcaagcctgcaggcccaaaatggcgctgccctggcttctggttctccgtacactaacgggcccgtgcagaatgcgctgcttagttcccaggagtccgtgtctcagggctataattttcaactgccagggagttacccccacccaattcccgcgaaaaccctaaatccggttagcgggcaatctaactacggggggagccagggaagcggacaaacgctgaacagaccacccgtggctagcaacccagtgacgccttcccttcatagcggaccagccccaaggatgcctctacctgcaagccagaaccccgccaccacccccatgcctagctccagctttcttcctgaagccaatcttccccccccactgaattggcagtacaactatccctccaccgcatcacagaccaaccattgccccagagcaagtagtcagcccaccgtgtcaggtaatactagtttgaccacaaatcaccagtatgtttcctcagggtatccctcacttcagaatagttttataaagagcggtcccagtgtccccccccttgtcaaccccccacttcccacaactttccaacctggagctccccatggaccaccaccagccggagggcctcctcccgtgagggccctcacgcctctgaccagttcttaccgcgatgttcctcaaccattgttcaattccgctgttaatcaggaaggcattacctctaataccaataacggctccatggttgttcactcaagttatgacgaaatcgaagggggtggccttttggccaccccgcaactcaccaacaagaatcctaaaatgtcccgaagtgtaggctattcatacccgtctctgcctcctggctaccaaaataccaccccaccaggagcgactggcgttccaccttcctccctcaattacccgtcagggccccaagccttcacgcagactcccctgggagcaaaccacctgaccacatccatgagtgggctgtcactccagcccgaagggctcagagtggtaaatcttctgcaggagcgtaacatgttgccatcaacacccctcaagcctcccgtgcctaatctgcacgaagacattcagaaactgaactgtaatccggagctctttagatgcactctgaccagcattccgcaaacccaggccttattgaataaggcaaagctgcccctcggcctacttctgcacccttttaaagatctcgtccagctgcctgttgttacttctagcactattgttcgctgtcggtcctgtagaacctatatcaacccatttgtaagtttcctggatcagagacgctggaaatgtaacctgtgctatagggttaacgatgttccagaggagttcctatataaccctctgacaagggtttatggtgagccccatcggcggcccgaagtgcaaaacgccaccatcgaatttatggctcctagcgagtacatgctcaggcccccccagccccctgtctacctgtttgtcttcgacgtgtcccataacgccgttgaaaccggctacttgaatagcgtctgccaaagtctgcttgataacctggatctactccctggcaatactagaacaaagataggcttcatcacattcgactcaaccattcacttttacggcctgcaggaatcactctcacagccccagatgctgatcgtatccgacatcgaggacgtcttcattcccatgccagagaacctgctcgtgaatctaaacgaaagtaaggaattggttcaagacttgctgaaaacactgcctcagatgttcactaagactctggagacccaatccgctctgggccctgccctccaggcagcctttaagctgatgtccccaacaggcggaagaatgagtgtgtttcagacacaattgcctaccttgggcgtgggcgccctaaagccaagagaggaacctaaccaccgctcttctgcaaaggacattcatatgaccccttccacagacttttataagaagttggcactcgattgcagcggccagcaagtggccgtcgacctcttcctgctgtccggtcaatactccgatctggcttccctgggttgcatctccagatactcggcaggaagtgtgtactactacccttcttatcaccatcaacataacccggtgcaggtccagaaactccagaaggaactccaacgttatcttacaagaaagatcgggttcgaggcagttatgagaatcagatgtactaaagggctgtctatccataccttccacgggaatttctttgtgagatccacagacttactgtcactccccaatgtcaatcccgatgccggatatgcggtgcagatgtcagtcgaagagtcgcttaccgacactcagttagtgagctttcaatccgctctactctacacatcatcgaaaggggaacggagaatccgagtccacacactgtgtttgcctgtggttagtactttgaatgacgttttcctcggcgctgacgtgcaagctatcagcggcctgttagcaaacatggccgtggatcggagcatgacagcctcgctgtctgacgctcgggatgccctggtgaacgccgtcatcgatagtctttcagcctaccgatccagtgtgctgtcaaaccaacaacctggactgatggtcccattctccctgaggctttttccgctctttgtcctggcgctgctgaagcaaaagagctttcagaccggcacaaatgctcggctggacgagcgcatctttgctatgtgccaggtgaagaaccagccgttagtttacttgatgctcaccacacacccctccctctaccgggtggataacctgtctgacgagggggctttaaatatctcagatcgaaccatccctcaacctcctatcctgcagctctccgttgagaagctctcacgggatggcgctttcctgatggatgccgggagcgtgctgatgctctgggtcggaaagaattgtacccaaaacttcctgtcccaagtgctcggagtacagaattacgcaagcattcctcagccaatgacagatctgcctgaattggatactcctgagagtgctcgcattatcgcttttataagctggcttcgcgagcagcgtcccttttttcccatcttatacgtgatcagggacgagagtcctatgaaagccaactttcttcagaatatgatcgaggacaggacagaaagcgccttgtcatactacgaatttctattgcacatccaacagcaagtgaacaagtag

SEQ ID NO: 210814 - DNA, 3282 bp, Artificial Sequence
  derived and/or modified sequence
atgagccagcccggcatcccagccagcggcggggccccagccagcctgcaggcccagaatggagctgccctggccagcggcagcccctacaccaacggccctgtgcagaatgccctgctgagcagccaggagagcgtgtcccagggctacaacttccagctgcccggcagctacccccaccccatcccagccaagaccctgaaccctgtgtctggccagagcaactacggcggcagccagggcagcggccagaccctgaacagacctcctgtggccagcaaccctgtgacccccagcctgcacagcggccctgcccccaggatgcccctgcctgccagccagaacccagccaccacccccatgcccagcagcagcttcctgcctgaggccaacctgcccccacccctgaactggcagtacaactaccccagcacagccagccagaccaaccactgcccccgggccagcagccagcccaccgtgtctggcaacaccagcctgaccaccaaccaccagtatgtgagcagcggctaccccagcctgcagaacagcttcatcaagagcggccccagcgtgccccccctggtgaacccccccctgcccaccaccttccagcccggggccccccacggccccccacctgctgggggccccccacctgtgcgggccctgacccccctgaccagcagctacagagatgtgccccagcccctcttcaacagcgctgtgaaccaggagggcatcaccagcaacaccaacaacggctccatggtggtgcacagcagctatgatgaaattgagggcggcggcctgctggccaccccccagctgaccaacaagaaccccaagatgagccgctctgtgggctacagctaccccagcctgcccccaggctaccagaacaccaccccacctggggccaccggggtgccccccagcagcctgaactaccccagcggcccccaggccttcacccagacccccctgggcgccaaccacctgaccacctccatgagcggcctgagcctgcagcctgagggcctgcgggtggtgaacctgctgcaggagaggaacatgctgcccagcacccccctgaagccccctgtgcccaacctgcacgaggacatccagaagctgaactgcaaccctgagctgttccgctgcaccctgaccagcatcccccagacccaggccctgctgaacaaggccaagctgcccctgggcctgctgctgcaccccttcaaggacctggtgcagctgcctgtggtgaccagcagcaccatcgtgcgctgccgcagctgcaggacctacatcaacccctttgtgtccttcctggaccagaggcgctggaagtgcaacctgtgctacagagtgaatgatgtgcctgaggagttcctgtacaaccccctgaccagggtgtatggagagccccacagaagacctgaggtgcagaatgccaccatcgagttcatggcccccagcgagtacatgctgcggcccccccagccccctgtgtacctgtttgtgtttgatgtgagccacaatgctgtggagaccggctacctgaacagcgtgtgccagagcctgctggacaacctggacctgctgcccggcaacaccaggaccaagattggcttcatcacctttgacagcaccatccacttctacggcctgcaggagagcctgagccagccccagatgctgattgtgtctgacattgaagatgtgttcatccccatgcctgagaacctgctggtgaacctgaatgaaagcaaggagctggtgcaggacctgctgaagaccctgccccagatgttcaccaagaccctggagacccagagcgccctgggccctgccctgcaggccgccttcaagctgatgagccccaccggcggccgcatgtctgtgttccagacccagctgcccaccctgggcgtgggcgccctgaagccccgggaggagcccaaccacaggagcagcgccaaggacatccacatgacccccagcacagacttctacaagaagctggccctggactgcagcggccagcaggtggccgtggacctcttcctgctgagcggccagtacagcgacctggccagcctgggctgcatcagccgctacagcgctggctctgtgtactactaccccagctaccaccaccagcacaaccctgtgcaggtgcagaagctgcagaaggagctgcagcgctacctgaccaggaagattggatttgaagctgtgatgaggatccgctgcaccaagggcctgagcatccacaccttccacggcaacttctttgtgcgcagcacagacctgctgagcctgcccaacgtgaacccagatgctggctatgctgtgcagatgtctgtggaggagagcctgacagacacccagctggtgtccttccagagcgccctgctgtacaccagcagcaaaggagagcggcgcatccgggtgcacaccctgtgcctgcctgtggtgtccaccctgaatgatgtgttcctgggcgcagatgtgcaggccatcagcggcctgctggccaacatggctgtggaccgctccatgacagccagcctgagtgatgccagagatgccctggtgaatgctgtgattgacagcctgagcgcctaccgcagctctgtgctgagcaaccagcagcccggcctgatggtgcccttcagcctgcggctcttccccctgtttgtgctggccctgctgaagcagaagagcttccagacaggcaccaatgcccggctggatgagcgcatctttgccatgtgccaggtgaagaaccagcccctggtgtacctgatgctgaccacccaccccagcctgtacagagtggacaacctgagtgatgagggcgccctgaacatcagtgacaggaccatcccccagccccccatcctgcagctgtctgtggagaagctgagcagagatggagccttcctgatggatgctggctctgtgctgatgctgtgggtgggcaagaactgcacccagaacttcctgagccaggtgctgggcgtgcagaactatgccagcatcccccagcccatgacagacctgcctgagctggacaccccagagagcgcccgcatcatcgccttcatctcctggctgcgggagcagaggcccttcttccccatcctgtatgtgatcagagatgagagccccatgaaggccaacttcctgcagaacatgattgaggacagaacagagagcgccctgagctactatgagttcctgctgcacatccagcagcaggtgaacaagtag

SEQ ID NO: 210815 - DNA, 3282 bp, Artificial Sequence
  derived and/or modified sequence
atgagccagcccggcatccccgccagcggcggcgcccccgccagcctacaggctcagaacggcgcggccctcgcctccggctctccctacacaaatgggcccgtccagaatgcattactgtcaagccaggagtctgtgagtcaaggatataattttcaattgccggggtcttatcctcaccctataccggccaagacactgaaccctgtgtctggacagtctaactacggaggaagccagggatctggccagacactcaacagacctcccgtcgcatcgaaccctgtaactccttccttacacagcggccccgcgccccgcatgcctctgccagcatcacaaaacccggccaccacgccaatgccttccagtagttttctgccggaagcaaacctgcccccccccctgaattggcagtacaattatccctcgaccgcatcgcagactaatcattgcccaagggcatcctctcaacctaccgtaagtggcaatacatcccttacaacaaaccaccagtacgtctcctccggttatccgtcccttcagaattcttttataaaatcaggacctagtgtccccccacttgtgaacccgccactgcccaccactttccagccaggcgcaccgcatggcccacccccagccgggggacccccacctgttagagctctgaccccactgacttcctcttaccgggacgttcctcagcctctcttcaactccgcagtgaaccaggaggggatcacctccaatacaaacaacgggtctatggtcgttcacagtagctacgatgagatcgaaggaggcggccttcttgccactccacagttgacaaataagaaccctaagatgtcaagatcggtgggatactcttatccatcactgccacctggataccagaacaccactcccccaggcgctacaggcgttcccccttcctccctgaactacccctccggtccacaagccttcactcagaccccactcggtgccaaccacctcacaacttcaatgagtggtctctctctccagccagagggccttagagtggtcaatctgctgcaagagaggaatatgctgccaagcacgcctctgaagccacctgtccccaacctgcatgaggacatacaaaagctcaactgtaatcctgaactgtttcgctgcacccttacatcgatccctcagacacaagcccttctgaataaagccaagcttccactgggccttcttctacatcccttcaaggacttagtgcaactgcccgtggtaacctcgagcacaatcgtacggtgtagaagttgccggacttatattaatccctttgtgagcttcctcgatcagcgccggtggaaatgtaacctgtgttaccgagtgaacgatgttccagaggagttcctgtacaatccgctgaccagggtgtatggcgagcctcaccggcggccggaggtacaaaacgcaacaatagagtttatggctcccagtgaatacatgctacgccccccgcagcctccagtatacctcttcgtgtttgacgtgtctcacaatgccgtggagaccgggtatcttaattccgtgtgccagtctctgctcgacaatttggacttactcccaggaaatactcggacaaaaatcgggtttattacgttcgattcaaccatccacttttacgggctccaggagtctctgtcccagccacagatgcttatagtatctgacatcgaagacgtgttcatccccatgcctgaaaatctactcgtgaatctgaacgaatcaaaagagctggtgcaagatctgctgaaaaccctgcctcagatgtttactaaaacactggaaacccagtctgcactggggcccgccttgcaagctgcctttaagttaatgtctcccacggggggtagaatgagcgttttccaaactcagttgcccactctgggcgtgggtgccttaaaaccacgggaggagcctaaccacaggtccagcgccaaggacatccacatgaccccctccactgacttctataagaaacttgccttggattgcagtggccagcaggtggctgtcgatctcttcttgctgtccggtcagtacagcgacttggcgagcctaggctgcatttcaaggtactccgcaggatccgtctattactatcctagctaccaccatcaacataatccagttcaagtgcagaagctccaaaaggaactccagcgctacctgacacggaaaatcggatttgaagctgtcatgcgcatccgatgcacaaaaggtttgtcaatccacacattccatgggaatttcttcgtgagatcgaccgacctgcttagcctcccaaatgttaaccctgatgccggatatgccgtgcaaatgagcgtagaagagtcgttgacagatactcagctggtgtcctttcaatccgcccttctttacacctcatctaaaggagagcggcggattagggttcataccctttgtctgccagtcgtatcaaccctgaatgatgtatttttgggcgccgatgtccaggccatcagcggtctgctggcgaacatggcagtggatcgtagcatgactgcctctctgagcgacgcaagggatgccctagtcaacgccgtcatcgactcactttccgcatatagatcttcggttctttcaaatcagcagcctgggctgatggttccattttctctccggctatttcctctatttgtgttggctctccttaaacagaaatctttccagacgggaaccaatgcacgccttgatgagagaatcttcgcaatgtgccaggtaaagaaccagccacttgtttacctcatgttaaccacacatcccagtttgtatagagtggataacctgtctgatgaaggcgctttaaacatttcagataggacaattccccagccacccatcctgcagttgagtgttgagaagctttctcgggatggggccttcctgatggacgctggaagcgtactgatgctctgggtggggaagaactgtacacagaacttcctgtctcaggtccttggtgtccaaaactatgcatctatcccccagccaatgactgaccttcccgagctggacaccccggagagtgccaggattatcgcctttatttcttggttgcgcgagcaaaggcctttttttccgatattatatgtgatccgagatgagtccccaatgaaggccaactttcttcagaacatgatagaggaccggacagagtccgcgttgtcttactatgagttcttacttcacatccagcagcaggttaataagtag

SEQ ID NO: 210816 - DNA, 3282 bp, Artificial Sequence
  derived and/or modified sequence
atgagccagcctggcattccagcctctggaggggctcccgcttccttgcaagcccagaacggagctgcactcgcctccgggtccccctatactaatggtccagttcagaacgctctgctcagctcacaggagtccgtctcccaaggctacaacttccagctccccggaagctaccctcaccctattccggctaagacccttaatcccgtatcagggcagagcaattacgggggttctcagggtagcggacagacactcaaccgcccacccgtcgcttccaacccggtcaccccatctttgcacagtgggccagcccctaggatgcccctcccggcttctcagaaccctgctactacaccaatgcccagtagttcattccttcctgaggcaaatctcccaccccctttaaattggcagtacaattaccctagcactgcgtcacagaccaatcattgtcccagagccagttcgcagccaactgtaagtggcaataccagtcttactacaaatcatcaatatgtctcgagcggctacccatccctgcagaacagtttcattaagagcgggccttccgtgccacccctggttaaccctcctttaccaacgacatttcagcccggagcccctcatgggcctcctcccgctggcggacctccacctgtgcgggctctaacacccctgacctcttcataccgggatgtgccgcagcctctgttcaattccgccgtcaatcaagagggcattaccagcaacaccaataacggcagcatggtcgtgcattctagttacgacgaaatagagggagggggactgcttgctacaccgcagctgacgaacaaaaatccaaaaatgagtagaagcgtgggatactcctacccttcattgccacctggttaccagaataccacgcccccaggcgcaactggagtaccccctagtagccttaattacccaagtggcccacaggcctttacccagacccctctaggtgcgaatcatctgacaactagcatgtccggtctcagcctgcagccggaggggctgcgggttgtaaatcttttgcaggagcggaacatgctgccgtcaactccactgaaaccacctgtccctaacttgcacgaggacatccagaagttgaactgcaacccagagctatttagatgcactcttacatccataccccaaacacaggcactgctgaataaagcaaaactgcccctggggctgctgttacatccattcaaagacctggttcagctgcctgttgttactagctctacaattgttcgctgtaggtcttgccgcacctatatcaatccttttgtgtcatttctagatcagaggaggtggaagtgtaacctttgctacagagtcaacgatgtcccagaagagtttctttacaatccactcactcgcgtgtatggtgagccacaccgcagaccagaggtgcagaatgccaccatcgagttcatggccccttccgagtatatgctgagaccacctcagcccccagtgtacctgtttgtgttcgacgtgagccataatgccgtggaaaccggctatctcaacagcgtgtgccaaagcttacttgataatctggacctccttcctggaaatacacggaccaaaataggatttataacattcgattccaccatacacttctacggcctccaggagtctctgtctcaaccacagatgcttatcgttagtgatatcgaggatgtctttattcctatgcccgagaatcttttggtgaacctcaacgagtccaaagaactggtccaggacttgctgaaaacgttgccacaaatgttcaccaagacattggaaacacagtctgccctcggcccagccctgcaagcagcattcaaactcatgagcccgaccggtggacgtatgtccgtgtttcagacacagctgcctactctgggcgtcggcgcacttaaacctcgggaagaacccaatcaccgctcttctgctaaagatatccatatgaccccttctacggatttttacaagaagctcgcactggactgcagcggccagcaggtagccgttgacctcttcctgctcagcggccagtacagcgacctggctagtctgggctgtatctcccggtattccgccggaagtgtatactattatccttcttaccaccatcagcacaaccccgtccaggtgcagaagctgcagaaagaactgcagcgttacctgactcgcaagatcggctttgaagctgtgatgagaattcgatgcactaaagggctaagtattcatacctttcacggaaacttctttgtgagaagcacagacctgctgagtctaccgaatgtgaaccccgatgccggatacgccgtccagatgtccgtggaggagagtctaacagatactcagctagtctcattccaatctgctctgttgtacaccagctccaaaggcgagcggagaattcgcgtgcacactctttgtttacctgtcgtcagcaccctgaatgatgtttttctgggagccgatgtccaggccatatccggacttcttgctaatatggctgtggatcgtagtatgacagcaagcctgtccgacgcgagagatgccctcgtaaacgccgtaatcgactctttgagcgcatataggagctcggtactatccaatcaacagccaggacttatggtaccctttagcctcaggctctttcccctcttcgtcctggccctgttaaagcaaaaaagtttccagacgggaacaaacgcccgtctcgacgagaggatcttcgcgatgtgccaggtgaaaaaccagcctctcgtgtacctgatgctgacgacacacccctctctttacagagtcgataacctttccgatgaaggcgcactgaacatttccgaccggaccatccctcagccccctattctgcagctcagcgtggagaaactgagtcgagacggcgcatttctgatggacgctggatccgttctcatgttatgggttggcaagaactgcactcagaatttccttagtcaagttctgggagtccaaaattacgcatcaatcccccagcccatgacagacctccctgagttggatacccctgagtcggccaggatcattgctttcatttcatggcttcgcgagcagcgtccttttttccctatcttatatgtcattcgcgacgagtcccctatgaaggccaatttcctgcagaatatgattgaggacagaactgaaagcgccctgtcctactacgagttcctgctgcatatccaacagcaggtaaacaagtag

SEQ ID NO: 210817 - DNA, 6299 bp, Artificial Sequence
  derived and/or modified sequence
ccggccagggcctccctccttctctctaggtttggctgccgccttctagccgggcgttcgcggccccgccggcccgactctcaagcctcagctcccaggctaggctgtggccgccggtggcctggggagagtgcggcgccatgcctcgggcttaatgcgcccccccctcttctcccagtcttcagtcttaagtcgttagcctcctccctccgctttcagcagtggtctttcagctctcttcttgtgcgctgttgtcgaccccgaccagccccttccaacccagtcatcatgtcccagccgggaataccggcctccggcggcgccccagccagcctccaggcccagaacggagccgccttggcctcggggtctccctacaccaacggtcctgtccaaaatgcattgctgtcttcacaagagtcagtgagccaaggatacaatttccagcttccaggatcctaccctcatccaataccagcaaagactttgaatccagtctctggacagtctaactatggtggttctcagggatctgggcagactcttaatagaccacctgtggcctctaatccagtgacaccttcgcttcatagtggtcctgctccccgaatgccattacctgcttctcagaacccagctactacaccaatgccttctagtagctttcttcctgaagccaacctgccaccacctttgaattggcaatataactatccatccacagcctcacaaacaaaccattgtcctcgtgcatcatcccaaccaactgtatctggaaatacaagtttaaccacaaatcatcaatatgtttcttctggatatccttcacttcaaaatagcttcataaagtcaggtccttctgtacctcccttagtgaatccacctctgcctacaacttttcaaccaggagctcctcatgggccccctccagctggaggcccacccccagtgagggccctcacgcccctgacatcatcatatagagatgtaccccagcccttatttaattcagctgtcaaccaagaaggtattacatcaaataccaataacggatctatggtggtccacagtagttacgacgagattgaaggaggtggcttattggcaacaccacagcttactaacaagaatcccaaaatgagccgaagtgttggatattcatatccctccttaccacctggttatcagaacacaacaccacctggtgcaactggagtaccaccctcttccttgaattacccaagtgggccacaagcctttactcagactcccttaggtgctaatcatttaaccacaagcatgagtggattaagtctacaaccagagggtctaagagttgtcaatcttcttcaagaaagaaacatgcttccgtcaacacctttgaagcctccagttccaaatttgcatgaagacatccagaaactcaactgtaacccagagttatttcgatgcacgctgactagcattcctcagacgcaggccttattgaataaagccaaacttcctttggggctgctgcttcatcctttcaaagacttagtgcaattgcctgtggttacctccagtacaattgtgagatgccgttcatgcaggacgtacatcaatcctttcgtcagctttcttgatcaaaggagatggaagtgtaacttatgttatcgagtcaatgatgttcctgaagaattcttgtacaaccctttgaccagagtttatggagaacctcacagaagaccagaagttcaaaatgctactattgagtttatggctccttcagaatacatgttacgaccacctcagcctccagtgtatctctttgtatttgatgtgtctcacaatgcagtcgaaactggatacttgaattcagtttgccagagtttgttagacaatctggatttgcttcctggcaacactagaacaaaaattggcttcataacatttgacagtacaatccatttctacggtcttcaggaaagtctctctcaacctcagatgctaatagtttcagatattgaagatgtttttatacctatgccagagaacttattagtaaacttaaatgaaagtaaagagctcgtgcaagatttactgaaaactttgccacaaatgtttaccaagactctggagacccagagtgccttgggtcctgcactgcaggctgcctttaagctgatgtctccaactggtggtcgaatgtctgtctttcaaacacaactcccaactcttggagtgggagccctgaaaccacgagaggaaccaaaccacaggtcatctgctaaggatatacacatgacaccatccactgacttctataagaaattagccttggactgttctggtcagcaagttgctgttgacttattccttctcagtggacagtattctgatttggcttctctgggttgtatttctcggtattcagcaggtagtgtctattactatccctcttaccatcatcagcacaacccagtccaagtacagaaattacagaaggaactacagagataccttactcggaagattggctttgaggcagtcatgaggattcggtgcaccaaaggtctttccattcatactttccatggaaacttctttgttaggtcaaccgacttactgtctttgcctaacgtcaacccagacgctgggtatgcagtacagatgtcagtggaagagagtcttactgacactcagttggtttcttttcagtcagcactcttgtatacatccagcaaaggcgaaagaagaattcgtgttcatactttgtgtttgccagtagtttcgactctgaatgatgtctttcttggagctgatgttcaagcaatttcagggttattggccaatatggctgttgacagatctatgactgccagtctgagtgacgctcgggatgctctagtgaatgcagtcattgactccctttcagcttaccgttcttcagtcttaagtaaccagcagcctggactcatggttcctttttctttgcggcttttcccactttttgtgttggctctccttaaacagaaatcattccagactgggacaaatgcacgtctagatgaacgcatttttgctatgtgtcaagtgaaaaaccagcccttggtttaccttatgctcacaactcatcccagtttgtatagagttgacaatctctcagatgagggagcactcaacatcagtgatagaaccatacctcagccccccattcttcagctttcagtggagaagctgagcagagatggagctttcctcatggatgcaggctctgtactgatgctttgggttggaaaaaattgtacacagaattttctcagccaagttctaggagttcaaaactatgcatcaattccacagcctatgacagaccttccagaacttgatacaccagaatctgccagaataatagctttcatctcttggcttagagagcagagaccatttttcccaatactttatgtaataagggatgagagtccaatgaaagcaaacttccttcaaaacatgatagaagacagaacagaatctgcattatcatattatgaattcctgttgcatatacagcaacaagtgaataaatgaatgaatgaagaaatttgacttatttttaaggaatgtcacgatagtgcagaatacctggaaatgtgtaataccttctttttctattatgtttgtggactaatgtgatgattgagatgttctcactgtgatttcaacaacctatagcaaataaaagaccacagcagagaatcaaacatgcaactctgaaatactgtatttttcaaatcagaatatagctacgtatgattggatacttttttcttgccaattatgtttgagttgttatggattaaaataagaatattgcagaggcaaagtacattttgtaaaataaagatttctgtgttctacatgtatatttctcatttttaatttttctgaatctttggctgctacatttaaaacctcacaaacctaagtgttgcagggaagttacaaattgattggtagtgatgtttttaaaataaaaacaatggaaagtaaatataatgtaggaaaactagaattcattccccacacgtgtcttttttttttctttgttaagggaaaggatcatgttgactaaaactaaactaattctagtatagcttgagaaaaatatgaagaaacacattcaagctttaaaatctgtcagtattctttatgcttgaagaacaaagtcactttgatttgaagtgagaactatcattaggtggttttctgatttcctgatgaagagttggacatactgtcttaatctatagtgaaaagaatttgagctgtcttcataaacactgggactagcaatgataatagggagataagaaactttaattatcttgatcctttaagtggattttatttggtgcatttctgctctgggtatataataaaagtgggggtttttggtgaaatgagtgaagaaatgaaaggtttctaaagtgctatccaaatacatcagtaacatttttctaaggagtttaattgttaaattggaagtcattcataagaaatatttatgcttgaatatgaaaatctatgaaagcataaatgctgctgtttgatttggtggatattaagattatacacatccaacatattaaagttatgaaagaaacttgacttctgaaaatccttaagagactgctttcttgattcagctagagaaatattatagtcaaaactattgagtgaattttgtttacaaataggtaaattatacatttgtatatttaaagtgctgtgacatagtatctttaagagtttggctcagttttcacagattcattttgtcttaagaatttcttaaatatgttcatgtataatacttgatcaaaatatttttgggttttttgttttgttttaatgggttagaaaatgtttacaatcttggtcttatatgatcaccaatggaatagtaacttccaggtttatatcaatatgagctgactttaactgagttgtttgggatagggaagaagcagtccctctacagtatacaactactgcttgccagctggatcaaaataatcatgttttatgaaaatatctcccttaagcagtgttaaggttggtttgcagtgtgtaagtggcacattgaactggaagttttcttgaaagctgcttcatctattaagaagcaattttcaaattgtagcgaattatattatcccctcttttaaagaaacagtcgttatatgctgatgtttcttaaaataactaaaatgttcctcttaatgtgattttaaatggagttatttgtaggtcctttcttagtagtaaagaatcttctagagggaaacatttgtgcttttagggataatcttccttgtgcctcactacatccctaagtgggtatgactcttgttattaccacatgcttttttagtatatttcacaaatttacttttaaatattattttagatacggtgtaacatgtgcaattcagaataattttataacaggtcatgaaaaacataactttagttaggattcacaatatttgttctccacataatgagagaatgaatgagcctttggagatactgatataaggcaattattttttgcaatgttgaatgtgttttttagtttgattctttttttttcccccaatagggcactacctgccatatcatcttgtattactttttgatgtaaagcgactaatatttacactatgccatattttttttaattatagttgtaaattatgaaagatccttgaattttctacagatctacaactactaatgtaacagacaagggcaatcttggtatttaaatctgagcatggcagttctaccataaaaagtactctatttttctaatttctaggatttttaaaataacatttctgtaagtctgacatactaatagtcactcaagcagtaccatttattttagtttgcatatattttcactgtttttaatttaatgtattgagtctaatagactgttttgcaataattagaataaagatttatttcttctaatcaaagatgcataacagctattatctaggggaccaccaaatgtgatttcaaaattttgttaactattacaaatgtaatccttatatagaaattttaattttgtaaagtagtgtataatattgtaatattaaattcttgttcttaaattcaaatatgtattgatcttcaatgtgctgtgttaaatcttgcttctctgaaaagttggagacaagatttgtcttcctttttacagtttgtaattttcactgttttattcctgttaaaaaaaaaaaaaa

SEQ ID NO: 210818 - protein, 266 aa, Artificial Sequence
  derived and/or modified sequence
MVCLKLPGGSCMAALTVTLTVLSSPLALAGDTQPRFLEQAKCECHFLNGTERVWNLIRYIYNQEEYARYNSDLGEYQAVTELGRPDAEYWNSQKDLLERRRAEVDTYCRYNYGVVESFTVQRRVQPKVTVYPSKTQPLQHHNLLVCSVNGFYPGSIEVRWFRNGQEEKAGVVSTGLIQNGDWTFQTLVMLETVPRSGEVYTCQVEHPSMMSPLTVQWSARSESAQSKMLSGVGGFVLGLLFLGTGLFIYFRNQKGHSGLQPTGLLS

SEQ ID NO: 210819 - protein, 266 aa, Artificial Sequence
  derived and/or modified sequence
MVCLKLPGGSCMAALTVTLTVLSSPLALAGDTQPRFLEQAKCECHFLNGTERVWNLIRYIYNQEEYARYNSDLGEYQAVTELGRPDAEYWNSQKDLLERRRAEVDTYCRYNYGVVESFTVQRRVQPKVTVYPSKTQPLQHHNLLVCSVNGFYPGSIEVRWFRNSQEEKAGVVSTGLIQNGDWTFQTLVMLETVPRSGEVYTCQVEHPSMMSPLTVQWSARSESAQSKMLSGVGGFVLGLLFLGTGLFIYFRNQKGHSGLQPTGLLS

SEQ ID NO: 210820 - DNA, 801 bp, Artificial Sequence
  derived and/or modified sequence
atggtgtgcctgaagctgcccggcggcagctgcatggccgccctgaccgtgaccctgaccgtgctgagcagccccctggccctggccggcgacacccagcccagattcctggagcaggccaagtgcgagtgccacttcctgaacggcaccgagagagtgtggaacctgatcagatacatctacaaccaggaggagtacgccagatacaacagcgacctgggcgagtaccaggccgtgaccgagctgggcagacccgacgccgagtactggaacagccagaaggacctgctggagagaagaagagccgaggtggacacctactgcagatacaactacggcgtggtggagagcttcaccgtgcagagaagagtgcagcccaaggtgaccgtgtaccccagcaagacccagcccctgcagcaccacaacctgctggtgtgcagcgtgaacggcttctaccccggcagcatcgaggtgagatggttcagaaacggccaggaggagaaggccggcgtggtgagcaccggcctgatccagaacggcgactggaccttccagaccctggtgatgctggagaccgtgcccagaagcggcgaggtgtacacctgccaggtggagcaccccagcatgatgagccccctgaccgtgcagtggagcgccagaagcgagagcgcccagagcaagatgctgagcggcgtgggcggcttcgtgctgggcctgctgttcctgggcaccggcctgttcatctacttcagaaaccagaagggccacagcggcctgcagcccaccggcctgctgagctag

SEQ ID NO: 210821 - DNA, 801 bp, Artificial Sequence
  derived and/or modified sequence
atggtgtgcctgaagctgcccggcggcagctgcatggccgccctgaccgtgaccctgaccgtgctgagcagccccctggccctggccggcgacacccagcccagattcctggagcaggccaagtgcgagtgccacttcctgaacggcaccgagagagtgtggaacctgatcagatacatctacaaccaggaggagtacgccagatacaacagcgacctgggcgagtaccaggccgtgaccgagctgggcagacccgacgccgagtactggaacagccagaaggacctgctggagagaagaagagccgaggtggacacctactgcagatacaactacggcgtggtggagagcttcaccgtgcagagaagagtgcagcccaaggtgaccgtgtaccccagcaagacccagcccctgcagcaccacaacctgctggtgtgcagcgtgaacggcttctaccccggcagcatcgaggtgagatggttcagaaacagccaggaggagaaggccggcgtggtgagcaccggcctgatccagaacggcgactggaccttccagaccctggtgatgctggagaccgtgcccagaagcggcgaggtgtacacctgccaggtggagcaccccagcatgatgagccccctgaccgtgcagtggagcgccagaagcgagagcgcccagagcaagatgctgagcggcgtgggcggcttcgtgctgggcctgctgttcctgggcaccggcctgttcatctacttcagaaaccagaagggccacagcggcctgcagcccaccggcctgctgagctag

SEQ ID NO: 210822 - DNA, 801 bp, Artificial Sequence
  derived and/or modified sequence
atggtgtgtctgaagttacccggtggcagttgcatggccgccctcactgtcactctgaccgttctgagctccccactggccctcgccggtgatactcagcctcgctttctggaacaagcgaagtgcgaatgtcactttctcaacggaacagagcgggtgtggaatttgataaggtatatctataatcaggaggagtatgctaggtacaactcagatctcggagagtatcaagctgttaccgaactcggcagacccgacgctgagtattggaattctcagaaggatttactggaaaggaggcgggcagaagtcgatacttattgccggtacaactacggcgtggtggagagttttacagttcagaggcgggttcagccgaaagtgacagtgtatccttccaaaacccaaccactgcagcatcataacctcctggtctgctccgtcaacggcttctaccccggttccatagaggtacgctggtttcgcaatggacaggaagagaaggctggggttgtgtctaccggacttattcagaatggggattggactttccagactttggttatgttagagaccgtgcccaggtccggagaggtatatacatgccaggtggagcacccaagcatgatgagccctctcaccgtgcagtggtccgcccgctcagaatcagctcagtccaagatgctgagcggagtgggaggcttcgtcctgggcttgctgttcctcggaaccggcctgttcatttacttcaggaatcaaaaagggcacagcggtctgcaacccactggcctgctgagctag

SEQ ID NO: 210823 - DNA, 801 bp, Artificial Sequence
  derived and/or modified sequence
atggtttgtctaaaactgccgggcggttcctgtatggcagcactgacagtgacgcttacagtgctctcctcaccactggctctggcaggagacacccagccacgattcctcgaacaggccaagtgtgagtgccactttcttaatggcaccgagcgggtctggaatctcattaggtatatatataatcaagaagagtacgcacgctacaacagcgacttaggggagtatcaggccgtaacagaactggggaggcccgatgccgaatattggaattctcagaaggacctcctcgagcgccgaagagcagaagttgatacctattgtaggtataattacggcgtggtggagagcttcactgtgcagcgacgggtgcaacctaaggtgactgtctaccctagcaaaacccagcctctacagcaccacaatctgctcgtgtgcagcgtcaatggcttctaccccggctctatagaagtccggtggttccggaacagccaggaggagaaagcgggggtggtatctactggacttatccaaaacggcgactggacattccaaaccctcgtgatgttagagaccgtgcctcgaagcggcgaggtttacacatgccaagtcgaacatccttcaatgatgagcccactgacagtacagtggtccgccaggagtgaatctgcccaatccaagatgctctccggggtggggggattcgtcctaggacttctgtttctgggtactgggctttttatctacttccgcaaccaaaagggccacagcggactgcagccaacaggcctgctgtcatag

SEQ ID NO: 210824 - DNA, 801 bp, Artificial Sequence
  derived and/or modified sequence
atggtgtgtttgaagctccccggagggagttgcatggctgcactgacagtgactctgaccgtgctgtcttctcctcttgccctggctggcgatacccagcccaggttcttggaacaggccaagtgcgagtgtcatttcctgaatggcactgagcgggtgtggaatctcattaggtacatatataaccaggaagagtatgcgaggtacaattctgatctcggtgagtaccaggctgttactgaacttggcaggcccgatgccgaatactggaattcacaaaaggacttgctggagcggcggagggcggaggtggacacgtactgtcgatacaactacggggtcgtggagagctttacagttcaaaggcgagtacagcctaaggtgactgtctatccgagtaaaactcagcccctccaacatcacaatctgttggtgtgttctgttaatgggttctatccgggatccatcgaggtccggtggtttcggaatggacaggaggagaaggccggtgtcgtctccacaggtctgattcagaacggggactggacgtttcaaacgttggtcatgctggagaccgtgccaagatccggcgaggtatatacctgccaagtggaacacccctccatgatgagccccctgacagtgcaatggtccgctcgcagtgagagcgcgcagtccaaaatgctctctggggttggcgggttcgtcttaggactgctgttccttggtaccggcctttttatctattttagaaatcaaaagggccattctggacttcaacctactggtctactgagctag

SEQ ID NO: 210825 - DNA, 801 bp, Artificial Sequence
  derived and/or modified sequence
atggtgtgcctgaagctgcccggcggcagctgcatggccgccctgactgtgaccctgactgtgctgagcagccccctggccctggccggggacacccagccccgcttcctggagcaggccaagtgtgagtgccacttcctgaatggaacagagcgggtgtggaacctgatccgctacatctacaaccaggaggagtatgcccgctacaacagcgacctgggggagtaccaggccgtgacagagctgggccgcccagatgctgagtactggaacagccagaaggacctgctggagcggcggcgggcagaggtggacacctactgccgctacaactacggcgtggtggagagcttcaccgtgcagaggagagtgcagcccaaggtgacagtgtaccccagcaagacccagcccctgcagcaccacaacctgctggtgtgcagcgtgaatggcttctacccaggcagcattgaggtgcgctggttcagaaatggccaggaggagaaggccggcgtggtgtccacaggcctcatccagaatggagactggaccttccagaccctggtgatgctggagaccgtgcccaggtctggagaggtgtacacctgccaggtggagcaccccagcatgatgagccccctgactgtgcagtggagcgcccggtctgagagcgcccagagcaagatgctgagcggcgtgggcggctttgtgctgggcctgctcttcctgggcaccggcctcttcatctacttcaggaaccagaagggccacagcggcctgcagcccaccggcctgctgtcctag

SEQ ID NO: 210826 - DNA, 801 bp, Artificial Sequence
  derived and/or modified sequence
atggtgtgcctgaagctgcccggcggcagctgcatggccgccctgactgtgaccctgactgtgctgagcagccccctggccctggccggggacacccagccccgcttcctggagcaggccaagtgtgagtgccacttcctgaatggaacagagcgggtgtggaacctgatccgctacatctacaaccaggaggagtatgcccgctacaacagcgacctgggggagtaccaggccgtgacagagctgggccgcccagatgctgagtactggaacagccagaaggacctgctggagcggcggcgggcagaggtggacacctactgccgctacaactacggcgtggtggagagcttcaccgtgcagaggagagtgcagcccaaggtgacagtgtaccccagcaagacccagcccctgcagcaccacaacctgctggtgtgcagcgtgaatggcttctacccaggcagcattgaggtgcgctggttcaggaacagccaggaggagaaggccggcgtggtgtccacaggcctcatccagaatggagactggaccttccagaccctggtgatgctggagaccgtgcccaggtctggagaggtgtacacctgccaggtggagcaccccagcatgatgagccccctgactgtgcagtggagcgcccggtctgagagcgcccagagcaagatgctgagcggcgtgggcggctttgtgctgggcctgctcttcctgggcaccggcctcttcatctacttcaggaaccagaagggccacagcggcctgcagcccaccggcctgctgtcctag

SEQ ID NO: 210827 - DNA, 1184 bp, Artificial Sequence
  derived and/or modified sequence
atagttctccctgattgagacttgcctgctgctgtgaccactggtcttgtcctcttctccagcatggtgtgtctgaagctccctggaggctcctgtatggcagcgctgacagtgacattgacggtgctgagctccccactggctttggctggggacacccaaccacgtttcttggagcaggctaagtgtgagtgtcatttcctcaatgggacggagcgagtgtggaacctgatcagatacatctataaccaagaggagtacgcgcgctacaacagtgacctgggggagtaccaggcggtgacggagctggggcggcctgacgctgagtactggaacagccagaaggacctcctggagcggaggcgggccgaggtggacacctactgcagatacaactacggggttgtggagagcttcacagtgcagcggcgagtccaacctaaggtgactgtgtatccttcaaagacccagcccctgcagcaccacaacctcctggtctgctctgtgaatggtttctatccaggcagcattgaagtcaggtggttccggaacggccaggaagagaaggctggggtggtgtccacaggcctgatccagaatggagactggaccttccagaccctggtgatgctggaaacagttcctcggagtggagaggtttacacctgccaagtggagcatccaagcatgatgagccctctcacggtgcaatggagtgcacggtctgaatctgcacagagcaagatgctgagtggagtcgggggctttgtgctgggcctgctcttccttgggacagggctgttcatctacttcaggaatcagaaaggacactctggacttcagccaacaggactcttgagctgaagtgcagatgaccacattcaaggaagaaccttctgccccagctttgcaagatgaaaagctttcccacttggctcttattcttccacaagagctttgtcaggaccaggttgttactggttcagcaactctgcagaaaatgtcctcccttgtggcttccttagctcctgttcttggcctgaagcctcacagctttgatggcagtgcctcatcttcaacttttgtgcttccctttacctaaactgtcctgcctcccgtgcatctgtactccccttgtgccacacattgcattattaaatgtttctcaaacatggagttaaaaa

SEQ ID NO: 210828 - DNA, 1172 bp, Artificial Sequence
  derived and/or modified sequence
atagttctccctgagtgagacttgcctgctgctctgaccactggtcttgtcctcttctccagcatggtgtgtctgaagctccctggaggctcctgtatggcagcgctgacagtgacattgacggtgctgagctccccactggctttggctggggacacccaaccacgtttcttggagcaggctaagtgtgagtgtcatttcctcaatgggacggagcgagtgtggaacctgatcagatacatctataaccaagaggagtacgcgcgctacaacagtgacctgggggagtaccaggcggtgacggagctggggcggcctgacgctgagtactggaacagccagaaggacctcctggagcggaggcgggccgaggtggacacctactgcagatacaactacggggttgtggagagcttcacagtgcagcggcgagtccaacctaaggtgactgtgtatccttcaaagacccagcccctgcagcaccacaacctcctggtctgctctgtgaatggtttctatccaggcagcattgaagtcaggtggttccggaacagccaggaagagaaggctggggtggtgtccacaggcctgatccagaatggagactggaccttccagaccctggtgatgctggaaacagttcctcggagtggagaggtttacacctgccaagtggagcatccaagcatgatgagccctctcacggtgcaatggagtgcacggtctgaatctgcacagagcaagatgctgagtggagtcgggggctttgtgctgggcctgctcttccttgggacagggctgttcatctacttcaggaatcagaaaggacactctggacttcagccaacaggactcttgagctgaagtgcagatgaccacattcaaggaagaaccttctgccccagctttgcaagatgaaaagctttcccacttggctcttattcttccacaagagctttgtcaggaccaggttgttactggttcagcaactctgcagaaaatgtcctcccttgtggcttccttagctcctgttcttggcctgaagcctcacagctttgatggcagtgcctcatcttcaacttttgtgcttccctttacctaaactgtcctgcctcccatgcatctgtaccccccttgtgccacacattgcattattaaatgtttctcaaaca

SEQ ID NO: 210829 - DNA, 801 bp, Artificial Sequence
  derived and/or modified sequence
atggtgtgcctgaagctgcccggcggcagctgcatggccgccctgactgtgactctgaccgtactaagctcaccgctggcactggcgggcgacacgcagcctcggttcctggagcaggccaagtgcgaatgtcacttcctgaacggaacagagcgggtgtggaacctgatccgctatatatacaaccaggaggagtacgcccgttataattcagatctcggggaataccaagctgtcactgagctgggccggccagacgccgaatactggaactcccagaaagatttgctcgaacgcagacgggcggaggtggacacgtactgccgctataactacggcgtcgttgagtcctttaccgtccagaggagagtgcagcccaaggtaacagtttacccaagtaagactcagccactccagcatcataacttgctggtctgcagcgtcaacgggttttatccagggtcaattgaagttcggtggttccggaacggccaggaggaaaaagccggtgttgtatcaacagggctgattcaaaatggtgattggacgttccagaccttggtcatgttagagaccgtcccccgatcaggtgaggtttacacctgccaggtcgagcacccatccatgatgagtcccctcaccgttcagtggtctgctagatctgagtctgcccagtcaaaaatgcttagcggagtggggggcttcgtactgggattgttgttcctcggcaccggtctctttatctatttccgcaaccagaagggacacagcgggctccagcccacaggccttctcagttag

SEQ ID NO: 210830 - DNA, 801 bp, Artificial Sequence
  derived and/or modified sequence
atggtgtgcctgaagctgcccggcggcagctgcatggccgccctgactgtgacgctcactgtcctgagctccccacttgccctcgctggagatacacagccccgcttcctggaacaggcaaagtgcgagtgccatttcctgaacggcactgaacgagtgtggaaccttatccgctacatttacaaccaagaagagtatgcccgctataactccgacttgggcgagtaccaagctgtaaccgagttgggccggccagacgctgagtactggaactcccaaaaagacctgttagagagacggagggcagaggtagacacctattgcagatataattatggggttgtggagagcttcaccgttcagcgcagggttcagccaaaagtaacagtgtacccttctaagacccagcctctgcagcaccataacctattggtttgttctgtaaacggcttctatccagggagcattgaagtacgatggtttaggaacagtcaggaagaaaaagccggcgtggtgagcactggactcatccagaacggggactggacatttcagacgctggtgatgctcgagaccgttcctaggagtggtgaagtgtatacgtgtcaggttgagcaccccagcatgatgagtccattgactgttcagtggtcggcgaggtcagagagtgcccagagtaagatgctgtcaggagtcggaggcttcgtcctggggctgctctttctgggcacgggcttgttcatttactttcgcaatcagaaaggccattctggtcttcagccgacgggactgctgtcttag

SEQ ID NO: 210831 - DNA, 801 bp, Artificial Sequence
  derived and/or modified sequence
atggtgtgcctgaagctgcccggcggcagctgcatggccgccctgacggtgacactcacagtgctgagttccccactggctcttgccggggacactcaaccacgatttctggaacaggctaagtgtgagtgccacttcctgaacggcaccgagcgtgtgtggaacctgatacgctacatttacaaccaagaggaatacgccaggtataacagcgatctaggagagtatcaggcggtaaccgaactcggcagaccagatgcagagtactggaatagccagaaggacttgcttgagcgacgccgggcagaggtcgacacatattgtaggtacaattacggtgtggtggaatcattcaccgtgcaacggcgcgttcagcctaaggtgactgtgtacccctctaagacacagccacttcagcaccacaacctcctggtgtgctcagttaatggtttttaccccggctcaatcgaggtacggtggtttaggaacgggcaggaggagaaagcaggggtggtgagcacgggactgatccaaaatggggattggacatttcaaacactcgtcatgcttgagacggtcccccggagcggtgaagtatacacctgtcaggtagaacatcctagtatgatgtcccccctgacggtgcagtggagcgcccggagcgaaagcgctcaatctaagatgctcagtggtgtgggtggattcgtcctgggactgctgttccttggaaccggcttatttatttactttcgaaaccaaaaaggccatagtggccttcagcccacaggtctattgtcttag

SEQ ID NO: 210832 - DNA, 801 bp, Artificial Sequence
  derived and/or modified sequence
atggtttgtcttaaactgccagggggatcatgtatggcggctctaaccgtcacccttacagtcctctctagcccgttggcccttgccggtgacactcaacccaggtttctggagcaagccaagtgtgaatgccattttcttaatggaaccgagagggtttggaacttaattcggtatatctataaccaggaagaatacgctaggtacaattcagacctcggcgaatatcaggcagttaccgagctcggccgacccgatgcagagtattggaatagtcagaaggacctcctagagcgaagacgcgctgaggttgatacgtactgtcggtataactatggcgtggttgagtcctttaccgtgcagcgaagagttcagcctaaagtgaccgtctatccctccaaaacccagcccttgcagcaccacaatcttctggtatgttctgtgaacgggttttacccaggctccattgaagtcaggtggttccgcaatgggcaggaggagaaggccggagtcgttagtactggtctcattcagaatggcgactggacattccagaccctggtgatgctggagactgtacctaggagcggcgaggtgtacacttgtcaagttgagcatccaagcatgatgtcccctctgactgtgcaatggtccgctaggagcgagagtgctcagagcaagatgctgtcaggagttgggggatttgtgctcggacttctcttccttggcactggcttgtttatttattttagaaatcaaaagggtcacagtggactccagccgactgggctgctttcatag

SEQ ID NO: 210833 - DNA, 801 bp, Artificial Sequence
  derived and/or modified sequence
atggtctgtctcaagttaccaggtggctcttgcatggcagccctcacggtgacgctgacagttctgtcctctcctcttgcgctcgctggagatacacaacctcgattcttagagcaagcgaagtgtgagtgccacttcctgaatggcacagaaagggtatggaatctgatcaggtatatttacaaccaggaggaatatgcacgctacaacagcgatctgggggaataccaggctgtgacagaacttggtcgccctgatgcggaatattggaactcacagaaagatcttctggaaaggcgaagggcggaggtcgacacttattgccgctacaattacggggtagtggagtcctttactgttcagagacgtgtacaacccaaagtgactgtctatccatccaagacacaacctctgcagcaccacaacctgttggtgtgctccgtgaatggcttctaccccggatctatcgaggtgcgttggtttcgcaacagccaggaggagaaggccggagtggtctccacgggactgatccagaatggcgactggacctttcagacattggtgatgctcgaaacagttcctaggtcgggcgaggtgtatacctgccaggtcgaacatccatcaatgatgagtccgctgaccgtgcaatggtccgcgaggtcagagagcgctcagtccaaaatgttgtctggagtagggggatttgtcctgggcctgctcttcctcgggacagggttgtttatttatttccgcaaccaaaagggacatagcgggctccagccaaccggactcctctcttag

SEQ ID NO: 210834 - DNA, 801 bp, Artificial Sequence
  derived and/or modified sequence
atggtctgcctgaagctaccgggaggaagctgcatggctgcactgaccgtaacactgactgtgctgagctcccctcttgccttggcaggggatacccagcccagatttcttgaacaggcaaaatgcgagtgccactttctgaacggtaccgaacgagtttggaatctaattaggtatatctacaaccaggaggagtatgcccgttataactcagacctaggagaatatcaagctgtaacggagttgggcagacccgacgccgagtattggaattctcaaaaggacctgctggagcgcagacgcgcagaggtggacacctactgcagatacaactatggagtggtggaatctttcacagtgcaaagacgagtccagcctaaagtgacagtgtatccatctaagacacagcctttgcagcaccacaaccttttggtttgctcggtgaatggtttttacccaggatccatagaagtgcggtggtttcggaatggtcaggaagaaaaggctggtgttgtttctacaggacttatccaaaacggcgactggaccttccagaccttggtgatgcttgagacagtcccacggtccggagaagtatatacttgccaggtagagcacccttcaatgatgtccccattgactgtacagtggtctgctcgcagtgagtccgcacagagcaagatgctatccggagtgggtggctttgtcctcggattactgttcctagggacgggactgtttatctattttcgtaatcagaagggtcactcaggactgcagcctaccggcctactcagctag

SEQ ID NO: 210835 - DNA, 1193 bp, Artificial Sequence
  derived and/or modified sequence
ggggggccatagttctccctgattgagacttgcctgctgctgtgaccactggtcttgtcctcttctccagcatggtgtgtctgaagctccctggaggctcctgtatggcagcgctgacagtgacattgacggtgctgagctccccactggctttggctggggacacccaaccacgtttcttggagcaggctaagtgtgagtgtcatttcctcaatgggacggagcgagtgtggaacctgatcagatacatctataaccaagaggagtacgcgcgctacaacagtgacctgggggagtaccaggcggtgacggagctggggcggcctgacgctgagtactggaacagccagaaggacctcctggagcggaggcgggccgaggtggacacctactgcagatacaactacggggttgtggagagcttcacagtgcagcggcgagtccaacctaaggtgactgtgtatccttcaaagacccagcccctgcagcaccacaacctcctggtctgctctgtgaatggtttctatccaggcagcattgaagtcaggtggttccggaacggccaggaagagaaggctggggtggtgtccacaggcctgatccagaatggagactggaccttccagaccctggtgatgctggaaacagttcctcggagtggagaggtttacacctgccaagtggagcatccaagcatgatgagccctctcacggtgcaatggagtgcacggtctgaatctgcacagagcaagatgctgagtggagtcgggggctttgtgctgggcctgctcttccttgggacagggctgttcatctacttcaggaatcagaaaggacactctggacttcagccaacaggactcttgagctgaagtgcagatgaccacattcaaggaagaaccttctgccccagctttgcaagatgaaaagctttcccacttggctcttattcttccacaagagctttgtcaggaccaggttgttactggttcagcaactctgcagaaaatgtcctcccttgtggcttccttagctcctgttcttggcctgaagcctcacagctttgatggcagtgcctcatcttcaacttttgtgcttccctttacctaaactgtcctgcctcccgtgcatctgtactccccttgtgccacacattgcattattaaatgtttctcaaacatggagttaaaaaa

SEQ ID NO: 210836 - protein, 450 aa, Artificial Sequence
  derived and/or modified sequence
MAASKTQGAVARMQEDRDGSCSTVGGVGYGDSKDCILEPLSLPESPGGTTTLEGSPSVPCIFCEEHFPVAEQDKLLKHMIIEHKIVIADVKLVADFQRYILYWRKRFTEQPITDFCSVIRINSTAPFEEQENYFLLCDVLPEDRILREELQKQRLREILEQQQQERNDTNFHGVCMFCNEEFLGNRSVILNHMAREHAFNIGLPDNIVNCNEFLCTLQKKLDNLQCLYCEKTFRDKNTLKDHMRKKQHRKINPKNREYDRFYVINYLELGKSWEEVQLEDDRELLDHQEDDWSDWEEHPASAVCLFCEKQAETIEKLYVHMEDAHEFDLLKIKSELGLNFYQQVKLVNFIRRQVHQCRCYGCHVKFKSKADLRTHMEETKHTSLLPDRKTWDQLEYYFPTYENDTLLCTLSDSESDLTAQEQNENVPIISEDTSKLYALKQSSILNQLLL

SEQ ID NO: 210837 - protein, 290 aa, Artificial Sequence
  derived and/or modified sequence
MAASKTQGAVARMQEDRDGSCSTVGGVGYGDSKDCILEPLSLPESPGGTTTLEGSPSVPCIFCEEHFPVAEQDKLLKHMIIEHKIVIADVKLVADFQRYILYWRKRFTEQPITDFCSVIRINSTAPFEEQENYFLLCDVLPEDRILREELQKQRLREILEQQQQERNDTNFHGVCMFCNEEFLGNRSVILNHMAREHAFNIGLPDNIVNCNEFLCTLQKKLDNLQCLYCEKTFRDKNTLKDHMRKKQHRKINPKNREYDRFYVINYLVRLSFHNLKFDCSTANKIFLRTN

SEQ ID NO: 210838 - DNA, 2687 bp, Artificial Sequence
  derived and/or modified sequence
gtccagagcgcggcgtaggtgtggagaaaacattacgtcgacggggagttcgcctccagtagcgtttctactggtgccaccccgcctccgacccgccctgcggccctcccttttcttttctgccgggtaatggctgcttccaagacccagggggctgtcgcccgaatgcaggaagaccgtgatgggagctgcagcacagtcgggggtgtaggttatggggacagtaaggattgtatcctggagccgctttccctgccagaaagtccaggtggcaccaccactttagaaggttctccatctgtgccttgtattttctgtgaagaacattttcctgtggctgaacaagacaaacttctgaagcacatgattattgagcataagattgtcatagctgatgtcaagttggttgctgatttccaaaggtacattttatattggaggaaaaggttcactgaacagcccatcacagatttttgtagtgtaataagaattaattccactgctccatttgaagaacaagagaattattttttgttatgtgacgttttaccagaagatagaattcttagagaagagcttcagaaacagagactgagagaaattctggaacaacagcagcaagaacgaaatgataccaattttcatggcgtttgtatgttttgcaatgaagaattccttggaaacagatctgttattttgaaccacatggccagagaacatgctttcaacattggattgccagacaacattgtaaactgcaatgaatttttgtgtacattacagaaaaagcttgacaatttgcagtgcttgtactgtgagaagaccttcagggacaaaaatacacttaaagatcacatgaggaaaaaacagcatcgtaagattaatcctaagaacagagaatatgacagattttatgtcatcaattatttggaacttggaaaatcgtgggaagaagttcagttggaagatgatcgggagttgctggaccatcaggaagatgactggtctgattgggaagaacaccctgcctctgcagtctgcttattttgtgaaaagcaagcagaaacaattgagaagttgtatgtccacatggaggatgcacacgaatttgatcttctcaaaataaagtcagaacttggattaaatttctatcagcaagtgaaactggtcaattttattcggaggcaagttcaccaatgcagatgttatggctgccatgtgaagttcaaatccaaagcagacttaagaactcacatggaagaaactaaacacacttcgctgctccccgatagaaagacgtgggatcaactggagtattattttccaacctatgaaaatgacactctcctgtgtacactatctgacagtgaaagtgacctgacagctcaggaacaaaatgaaaatgttcccatcatcagtgaagatacatctaaactgtatgctttgaaacaaagcagtattttgaaccagttgctactataagagtacttgaaaacctagaagaaactaccacagaagcaatttttcatgtttttctcctatgagacagatatgaaagaacaatttaaatttgaacatcaacaaaagattggtccttggtgaaataaacttttcaaaaatgaatgttcttttcaaaaaataaagtagaaaaatgcacttactaagaacatgaaaaaaaatgaagtaggaaaataagatgaagactttgtattttggctgtaaagttttattgtgtgatcatcttaaattatctcacttcattaaactcataattatatatagaagtatatgtcaattacaaagaaatgaaatgttcaaattatttataaacctgatttttcaatcagtagtttcagtctcctccccaaggaccttcttcatccaacaagttgcaaaatttgaatatcccttctgtactatattgggtgagctgtaaatgtaatgactaaaagaaaagccacagaagaaagaagaaatggtcaaagacgtggataatatgcaaattggccattatattagaacaatcaagagctgactgtgttattaccactttctgcctagggtggccaaattccctagaaatagacatcaagccagttaacttcacttttccctgcaatttgtatgtcactaacatttaaatgccattttttaaaaacataaccacaataccattatgacacctaaaaaacattaacattaacttaatatcatctgttttcagtttttcccacttgtctcaaaatgtatgtttacaatattatcagtttcattactgatgaatattatatgcctcctgataagatgtactgaggaggacagaatatcacttttgtagatttataccaaaaatgcataatttggatataatgaagaaacagtcaaatccaagtttgaggctgggcacagtagctcatatctgtaatcccagcactttgggaggccaaggcagaggatcacatgaggtcaggagttcaagatcagcctggccaacgtggcaaaaccccatctctacgaaaaatacacagattagccaggcatggtggaatgcacctatagtcccagctacttgggaggctgaagcacaagaatcgcttgaatccaggaggcaaaagttgcagtgagccgagatcacaccactgcagttcagcctgggcaacagaccaagactctgtctcaaaaaaagg

SEQ ID NO: 210839 - DNA, 1353 bp, Artificial Sequence
  derived and/or modified sequence
atggccgccagcaagacccagggcgccgtggccagaatgcaggaggacagagacggcagctgcagcaccgtgggcggcgtgggctacggcgacagcaaggactgcatcctggagcccctgagcctgcccgagagccccggcggcaccaccaccctggagggcagccccagcgtgccctgcatcttctgcgaggagcacttccccgtggccgagcaggacaagctgctgaagcacatgatcatcgagcacaagatcgtgatcgccgacgtgaagctggtggccgacttccagagatacatcctgtactggagaaagagattcaccgagcagcccatcaccgacttctgcagcgtgatcagaatcaacagcaccgcccccttcgaggagcaggagaactacttcctgctgtgcgacgtgctgcccgaggacagaatcctgagagaggagctgcagaagcagagactgagagagatcctggagcagcagcagcaggagagaaacgacaccaacttccacggcgtgtgcatgttctgcaacgaggagttcctgggcaacagaagcgtgatcctgaaccacatggccagagagcacgccttcaacatcggcctgcccgacaacatcgtgaactgcaacgagttcctgtgcaccctgcagaagaagctggacaacctgcagtgcctgtactgcgagaagaccttcagagacaagaacaccctgaaggaccacatgagaaagaagcagcacagaaagatcaaccccaagaacagagagtacgacagattctacgtgatcaactacctggagctgggcaagagctgggaggaggtgcagctggaggacgacagagagctgctggaccaccaggaggacgactggagcgactgggaggagcaccccgccagcgccgtgtgcctgttctgcgagaagcaggccgagaccatcgagaagctgtacgtgcacatggaggacgcccacgagttcgacctgctgaagatcaagagcgagctgggcctgaacttctaccagcaggtgaagctggtgaacttcatcagaagacaggtgcaccagtgcagatgctacggctgccacgtgaagttcaagagcaaggccgacctgagaacccacatggaggagaccaagcacaccagcctgctgcccgacagaaagacctgggaccagctggagtactacttccccacctacgagaacgacaccctgctgtgcaccctgagcgacagcgagagcgacctgaccgcccaggagcagaacgagaacgtgcccatcatcagcgaggacaccagcaagctgtacgccctgaagcagagcagcatcctgaaccagctgctgctgtag

SEQ ID NO: 210840 - DNA, 873 bp, Artificial Sequence
  derived and/or modified sequence
atggccgccagcaagacccagggcgccgtggccagaatgcaggaggacagagacggcagctgcagcaccgtgggcggcgtgggctacggcgacagcaaggactgcatcctggagcccctgagcctgcccgagagccccggcggcaccaccaccctggagggcagccccagcgtgccctgcatcttctgcgaggagcacttccccgtggccgagcaggacaagctgctgaagcacatgatcatcgagcacaagatcgtgatcgccgacgtgaagctggtggccgacttccagagatacatcctgtactggagaaagagattcaccgagcagcccatcaccgacttctgcagcgtgatcagaatcaacagcaccgcccccttcgaggagcaggagaactacttcctgctgtgcgacgtgctgcccgaggacagaatcctgagagaggagctgcagaagcagagactgagagagatcctggagcagcagcagcaggagagaaacgacaccaacttccacggcgtgtgcatgttctgcaacgaggagttcctgggcaacagaagcgtgatcctgaaccacatggccagagagcacgccttcaacatcggcctgcccgacaacatcgtgaactgcaacgagttcctgtgcaccctgcagaagaagctggacaacctgcagtgcctgtactgcgagaagaccttcagagacaagaacaccctgaaggaccacatgagaaagaagcagcacagaaagatcaaccccaagaacagagagtacgacagattctacgtgatcaactacctggtgagactgagcttccacaacctgaagttcgactgcagcaccgccaacaagatcttcctgagaaccaactag

SEQ ID NO: 210841 - DNA, 1353 bp, Artificial Sequence
  derived and/or modified sequence
atggcggcttctaaaactcagggagctgtggctcggatgcaagaagaccgggacggcagttgtagcaccgtgggaggcgtgggctatggggactcaaaggactgcatactcgagcctttgtcactccctgagagcccaggaggcacaaccacgctcgaagggtctccgtcggtgccgtgcatcttctgtgaggagcactttcccgtcgctgaacaagataagctcctgaagcacatgatcattgaacacaagattgtgattgcagacgttaagctggttgccgacttccaaaggtacattttatattggcgcaaacgctttactgagcagccaatcactgacttttgttctgtcattcgcataaatagcacggcaccatttgaagaacaagagaactacttcctcctgtgcgacgtcctgccagaggatagaatcctgcgggaggaactgcagaaacaaagactccgggaaatcctggagcaacagcagcaggaaaggaacgacactaacttccatggtgtctgcatgttctgcaatgaggagttcttgggcaaccggtctgttatactgaatcacatggccagggagcatgccttcaatatcgggcttcccgacaacatcgtcaattgcaatgaatttctgtgtactttgcagaagaaacttgataacctgcagtgtctttattgcgaaaagacatttcgggacaaaaacaccctgaaggatcacatgcgcaaaaaacagcacaggaaaataaatccaaaaaatcgagagtatgacaggttctacgtgataaactatcttgagctcggaaagtcctgggaagaggtgcaattagaggacgatagagagctgctggaccatcaggaggatgattggtcggattgggaagagcatcccgcctccgccgtgtgcctgttttgtgagaaacaggctgaaacgattgaaaaactatacgtgcacatggaggacgctcatgaatttgatctcctcaaaattaaaagtgaactgggcttgaatttctaccagcaggttaagcttgtgaacttcattcggcgtcaggtgcatcagtgcaggtgctacgggtgccacgtgaaatttaaaagcaaagcagacctgaggacccatatggaggagacaaaacacacctctttgctgcctgatagaaagacatgggaccagctggagtactactttcctacctatgaaaatgataccttgctctgcaccctgtccgactctgaatccgatctgaccgcccaggaacagaacgaaaacgtgcctattattagcgaagacacctctaagctgtatgcgctgaaacagtcatccatacttaatcagcttctcctttag

SEQ ID NO: 210842 - DNA, 873 bp, Artificial Sequence
  derived and/or modified sequence
atggcggcctcaaaaacgcaaggggccgtagctcggatgcaagaagatagggacggatcctgctctactgttggaggtgtgggctacggcgactccaaagattgcatcttagaacctctgtccctgccggaaagccctggaggtacaaccacgctggaaggaagccccagtgtgccttgcattttttgcgaagagcatttcccagtcgcagaacaagacaagttgctgaaacatatgattattgagcacaaaatagtgatcgccgatgtgaagctcgttgcggatttccagcgatacatcctctattggagaaaacgatttaccgagcaacctatcactgacttctgttctgtgataagaatcaactctaccgccccttttgaggagcaggaaaactacttcctgctatgcgatgtgttaccggaggacagaatcctaagagaggagctccagaagcagcgcctgagagagattttagagcaacagcagcaagaaagaaacgacaccaatttccacggggtctgtatgttttgcaacgaggagttcctagggaacaggagtgtgatcttgaaccacatggccagggagcacgctttcaatataggcttaccagataatattgtgaactgcaatgaatttctgtgcaccttacagaaaaaattggacaaccttcagtgcctctactgtgagaagaccttcagggacaagaataccctgaaggatcacatgcgtaagaaacagcatagaaagattaatcccaagaacagggagtatgatcgattttatgtgattaactacctggtcaggttatcctttcataatctcaaatttgattgttctacagctaataagatctttctgcgtaccaattag

SEQ ID NO: 210843 - DNA, 1353 bp, Artificial Sequence
  derived and/or modified sequence
atggccgccagcaagacccagggcgctgtggccaggatgcaggaggacagagatggcagctgcagcacagtgggcggcgtgggctatggagacagcaaggactgcatcctggagcccctgagcctgcctgagagccctgggggcaccaccaccctggagggcagccccagcgtgccctgcatcttctgtgaggagcacttccctgtggccgagcaggacaagctgctgaagcacatgatcatcgagcacaagatcgtgattgctgatgtgaagctggtggccgacttccagcgctacatcctgtactggaggaagcgcttcacagagcagcccatcacagacttctgcagcgtcatccgcatcaacagcacagccccctttgaggagcaggagaactacttcctgctgtgtgatgtgctgcctgaggaccgcatcctgcgggaggagctgcagaagcagaggctgcgggagatcctggagcagcagcagcaggagagaaatgacaccaacttccacggcgtgtgcatgttctgcaatgaggagttcctgggcaacagaagtgtcatcctgaaccacatggcccgggagcacgccttcaacatcggcctgcctgacaacatcgtgaactgcaatgagttcctgtgcaccctgcagaagaagctggacaacctgcagtgcctgtactgtgagaagaccttccgggacaagaacaccctgaaggaccacatgaggaagaagcagcacaggaagatcaaccccaagaaccgggagtatgaccgcttctacgtgatcaactacctggagctgggcaagtcctgggaggaggtgcagctggaggatgaccgggagctgctggaccaccaggaggatgactggagcgactgggaggagcacccagccagcgctgtgtgcctcttctgtgagaagcaggccgagaccatcgagaagctgtatgtgcacatggaggatgcccatgaatttgacctgctgaagatcaagtctgagctgggcctgaacttctaccagcaggtgaagctggtgaacttcatccggcggcaggtgcaccagtgccgctgctacggctgccacgtgaagttcaagagcaaggctgacctgcggacccacatggaggagaccaagcacaccagcctgctgcctgacaggaagacctgggaccagctggagtactacttccccacctatgaaaatgacaccctgctgtgcaccctgagtgacagcgagagtgacctgacagcccaggagcagaatgaaaatgtgcccatcatcagcgaggacaccagcaagctgtatgccctgaagcagagcagcatcctgaaccagctgctgctgtag

SEQ ID NO: 210844 - DNA, 873 bp, Artificial Sequence
  derived and/or modified sequence
atggccgccagcaagacccagggcgctgtggccaggatgcaggaggacagagatggcagctgcagcacagtgggcggcgtgggctatggagacagcaaggactgcatcctggagcccctgagcctgcctgagagccctgggggcaccaccaccctggagggcagccccagcgtgccctgcatcttctgtgaggagcacttccctgtggccgagcaggacaagctgctgaagcacatgatcatcgagcacaagatcgtgattgctgatgtgaagctggtggccgacttccagcgctacatcctgtactggaggaagcgcttcacagagcagcccatcacagacttctgcagcgtcatccgcatcaacagcacagccccctttgaggagcaggagaactacttcctgctgtgtgatgtgctgcctgaggaccgcatcctgcgggaggagctgcagaagcagaggctgcgggagatcctggagcagcagcagcaggagagaaatgacaccaacttccacggcgtgtgcatgttctgcaatgaggagttcctgggcaacagaagtgtcatcctgaaccacatggcccgggagcacgccttcaacatcggcctgcctgacaacatcgtgaactgcaatgagttcctgtgcaccctgcagaagaagctggacaacctgcagtgcctgtactgtgagaagaccttccgggacaagaacaccctgaaggaccacatgaggaagaagcagcacaggaagatcaaccccaagaaccgggagtatgaccgcttctacgtgatcaactacctggtgcggctgtccttccacaacctgaagtttgactgcagcacagccaacaagatcttcctgcggaccaactag

SEQ ID NO: 210845 - DNA, 1353 bp, Artificial Sequence
  derived and/or modified sequence
atggccgccagcaagacccagggcgccgtggcccggatgcaggaggacagagatgggtcctgttccacggtaggcggtgtaggttacggcgattccaaagactgcattctcgaaccactgtcccttcctgaatcccctggaggcaccacgacactggagggatccccttccgtcccctgcatcttttgcgaggagcactttcccgtagccgaacaggataagctgctgaaacacatgataatcgaacacaaaatcgtgatcgcagatgtcaagttagttgccgacttccagagatatattctgtattggcgcaagcgcttcactgaacagccaattaccgatttctgcagtgtgattcgaatcaactctacagctccctttgaagagcaggagaattatttcctgttgtgtgacgtgctgccagaagacagaattctgcgagaggaacttcagaaacagaggctacgggagatcttggagcagcaacaacaggagcgaaacgacacgaatttccacggggtctgcatgttctgtaatgaggagtttcttggaaatcggtcagtgatactaaaccatatggctcgagagcacgcctttaacattggactgccagataatattgtaaattgtaatgagttcctttgtaccctgcaaaagaagctggataaccttcaatgtttatattgcgaaaagacctttcgggacaagaatacccttaaggatcatatgcgtaagaaacagcaccgaaagattaatccaaagaatagggagtacgataggttctatgtgattaattatttagaactggggaagagttgggaggaggtgcaactcgaggatgaccgcgaattactggaccaccaagaggatgattggtccgattgggaagagcacccagcttctgcggtctgtttattctgcgaaaaacaggcggaaacaattgagaaactttatgttcacatggaagatgctcacgaattcgacctgctaaagataaagtctgaacttggactcaacttctaccagcaggtgaaactggtaaacttcatacggcgccaagtgcaccagtgcagatgttacggctgccatgtgaagtttaagtcaaaggctgacttacgaacacacatggaagagactaagcatacaagtctgctgccagaccgcaagacctgggaccagttggaatactactttcctacttatgagaatgacacactcctgtgcaccttgtccgatagcgagtccgacttaaccgcccaggaacaaaatgagaatgttcctatcattagcgaagacacttcaaaattgtatgccttgaagcaatcttctatccttaaccagctcctgctctag

SEQ ID NO: 210846 - DNA, 873 bp, Artificial Sequence
  derived and/or modified sequence
atggccgccagcaagacccagggcgccgtggcccggatgcaggaggaccgtgacggcagttgcagcaccgtcggtggcgtgggctacggtgatagcaaagactgcattctggagcccctcagtctgcctgaatcgccaggcggaaccacaacactggaaggatccccaagcgtgccttgcatcttctgcgaggagcacttccccgtagctgaacaggacaagttacttaaacacatgattatcgagcacaagatcgttatagctgacgttaaattggtggccgatttccagcggtacattctttactggagaaaaaggtttacggagcaacccatcacggatttctgttcagtaatcaggattaattccacagccccttttgaagaacaggagaactactttctattgtgtgatgtgctcccggaagaccggatcctgcgggaggagctgcaaaagcagcgcttacgagagatacttgagcagcagcagcaggaaaggaacgacactaatttccacggcgtctgtatgttttgcaatgaggaattcctgggaaatcgctcggtgatactgaaccacatggcaagggaacacgcatttaatatcgggctccccgacaacatcgttaattgtaatgaatttctttgcaccctgcagaagaagcttgacaacctgcaatgcctgtactgtgagaaaactttcagagacaaaaacaccctgaaggatcacatgcgcaagaagcagcatcgcaagatcaatccaaagaatagagagtacgaccggttctacgtaatcaactatctggtgcgcctgagtttccacaacctcaagttcgactgtagtacagctaacaagatttttctgagaaccaattag

SEQ ID NO: 210847 - DNA, 1353 bp, Artificial Sequence
  derived and/or modified sequence
atggccgcaagcaagacgcaaggtgctgttgcgagaatgcaggaggacagagacggcagttgtagcactgtcgggggagttggttacggcgatagcaaagattgtattctggaacctctctcactgccagaatcacctgggggtaccaccacacttgaaggctcaccttccgtcccgtgcatcttttgtgaagagcacttccccgtggcggagcaagacaaactactcaagcatatgatcatagaacataagattgtcattgctgacgtgaagctcgtggctgatttccagaggtatattctgtactggcgcaagcggttcacagaacagccaattacagacttttgctccgtaatccgaattaattcgacagccccattcgaggaacaggagaattattttttgctctgtgacgtgctgccagaggataggatcttgagagaggaattgcaaaaacaacggcttagggagatacttgaacagcaacagcaagagcgtaatgacacgaatttccatggcgtctgcatgttctgcaatgaggaattccttgggaatcggtctgtaattctgaaccatatggcccgtgaacacgctttcaatattggtcttccagacaacatcgtgaattgcaacgagttcctgtgtacacttcagaaaaaactggacaacctccaatgtctttactgtgagaaaaccttcagagataagaataccctcaaagaccacatgagaaagaagcagcatcgaaaaataaaccccaagaaccgcgagtatgaccgcttttacgtaattaactacttggagctgggcaagtcttgggaggaagtgcagctcgaggacgatcgggagcttctggaccaccaagaagacgattggtcagattgggaagagcacccagctagcgcagtctgtctgttttgtgagaaacaggccgagacaatcgagaagctgtatgttcatatggaagacgctcacgagtttgacctcttgaagataaaatcggaattggggttgaacttttatcaacaagtaaaactagttaatttcatacggcgtcaagtgcaccaatgtcggtgttacggctgtcacgtaaagtttaagtcgaaggcagacctgaggacgcatatggaagagaccaagcatacaagcctcctccccgaccggaagacttgggatcagctagagtactattttccaacctacgagaacgacaccttgctatgtactttaagtgattccgagtcagacttaactgctcaggaacagaatgagaatgtcccaataatatctgaagacacgtccaagttgtacgcccttaaacaaagctcgatcctgaaccagctcctattgtag

SEQ ID NO: 210848 - DNA, 873 bp, Artificial Sequence
  derived and/or modified sequence
atggccgcttccaagacacagggggctgtggcacgaatgcaggaggacagggatggcagctgcagcacagtggggggagtgggctacggcgattctaaggactgtattctggagccgctgagcttacccgaatctccaggtggaaccactaccctggaagggtccccgagtgtgccttgcattttctgtgaggagcactttcctgtcgcagagcaggacaagctgttaaagcatatgattatagagcacaaaatcgtgatagctgacgttaaacttgttgccgactttcagcgttatattctgtactggcgcaaaagatttacggagcagccaattaccgacttctgcagcgttatcagaatcaactccaccgctcctttcgaggagcaagaaaactattttctcctatgtgacgtgctgcccgaggaccggattttgagagaggagctacagaaacaaagacttcgagaaatcctggagcagcagcagcaggagcgcaacgatacaaactttcatggcgtctgcatgttttgcaatgaggaattcttaggaaaccgtagcgttatactgaaccacatggcaagggaacatgccttcaacataggactgccggacaatatcgtgaattgtaacgagttcctctgcacccttcagaaaaaactagataatctgcagtgcctgtactgcgaaaagacctttagggacaagaataccttgaaagatcacatgaggaagaagcagcatcgcaagattaacccgaagaatagagaatatgatcgattctatgttatcaactacttagttagactgtcttttcacaatcttaaatttgactgctccacagccaacaaaatctttctccgtacaaactag

SEQ ID NO: 210849 - DNA, 1849 bp, Artificial Sequence
  derived and/or modified sequence
gtccagagcgcggcgtaggtgtggagaaaacattacgtcgacggggagttcgcctccagtagcgtttctactggtgccaccccgcctccgacccgccctgcggccctcccttttcttttctgccgggtaatggctgcttccaagacccagggggctgtcgcccgaatgcaggaagaccgtgatgggagctgcagcacagtcgggggtgtaggttatggggacagtaaggattgtatcctggagccgctttccctgccagaaagtccaggtggcaccaccactttagaaggttctccatctgtgccttgtattttctgtgaagaacattttcctgtggctgaacaagacaaacttctgaagcacatgattattgagcataagattgtcatagctgatgtcaagttggttgctgatttccaaaggtacattttatattggaggaaaaggttcactgaacagcccatcacagatttttgtagtgtaataagaattaattccactgctccatttgaagaacaagagaattattttttgttatgtgacgttttaccagaagatagaattcttagagaagagcttcagaaacagagactgagagaaattctggaacaacagcagcaagaacgaaatgataccaattttcatggcgtttgtatgttttgcaatgaagaattccttggaaacagatctgttattttgaaccacatggccagagaacatgctttcaacattggattgccagacaacattgtaaactgcaatgaatttttgtgtacattacagaaaaagcttgacaatttgcagtgcttgtactgtgagaagaccttcagggacaaaaatacacttaaagatcacatgaggaaaaaacagcatcgtaagattaatcctaagaacagagaatatgacagattttatgtcatcaattatttggaacttggaaaatcgtgggaagaagttcagttggaagatgatcgggagttgctggaccatcaggaagatgactggtctgattgggaagaacaccctgcctctgcagtctgcttattttgtgaaaagcaagcagaaacaattgagaagttgtatgtccacatggaggatgcacacgaatttgatcttctcaaaataaagtcagaacttggattaaatttctatcagcaagtgaaactggtcaattttattcggaggcaagttcaccaatgcagatgttatggctgccatgtgaagttcaaatccaaagcagacttaagaactcacatggaagaaactaaacacacttcgctgctccccgatagaaagacgtgggatcaactggagtattattttccaacctatgaaaatgacactctcctgtgtacactatctgacagtgaaagtgacctgacagctcaggaacaaaatgaaaatgttcccatcatcagtgaagatacatctaaactgtatgctttgaaacaaagcagtattttgaaccagttgctactataagagtacttgaaaacctagaagaaactaccacagaagcaatttttcatgtttttctcctatgagacagatatgaaagaacaatttaaatttgaacatcaacaaaagattggtccttggtgaaataaacttttcaaaaatgaatgttcttttcaaaaaataaagtagaaaaatgcacttactaagaacatgaaaaaaaatgaagtaggaaaataagatgaagactttgtattttggctgtaaagttttattgtgtgatcatcttaaattatctcacttcattaaactcataattatatatagaagtatatgtcaattacaaagaaatgaaatgttcaaattatttataaacctgatttttcaatcagta

SEQ ID NO: 210850 - DNA, 1075 bp, Artificial Sequence
  derived and/or modified sequence
tcttttctgccgggtaatggctgcttccaagacccagggggctgtcgcccgaatgcaggaagaccgtgatgggagctgcagcacagtcgggggtgtaggttatggggacagtaaggattgtatcctggagccgctttccctgccagaaagtccaggtggcaccaccactttagaaggttctccatctgtgccttgtattttctgtgaagaacattttcctgtggctgaacaagacaaacttctgaagcacatgattattgagcataagattgtcatagctgatgtcaagttggttgctgatttccaaaggtacattttatattggaggaaaaggttcactgaacagcccatcacagatttttgtagtgtaataagaattaattccactgctccatttgaagaacaagagaattattttttgttatgtgacgttttaccagaagatagaattcttagagaagagcttcagaaacagagactgagagaaattctggaacaacagcagcaagaacgaaatgataccaattttcatggcgtttgtatgttttgcaatgaagaattccttggaaacagatctgttattttgaaccacatggccagagaacatgctttcaacattggattgccagacaacattgtaaactgcaatgaatttttgtgtacattacagaaaaagcttgacaatttgcagtgcttgtactgtgagaagaccttcagggacaaaaatacacttaaagatcacatgaggaaaaaacagcatcgtaagattaatcctaagaacagagaatatgacagattttatgtcatcaattatttggtaaggctttcttttcataacttaaaatttgattgcagtactgcaaacaaaatctttctgaggaccaactaatatttgaataagcaattattgcaaaagtcaaaatgtaattgaggggcacattcaagtagtgattagctttgaaatggttagagtacaagacatttgatttgacttgtcttttatttgacagtgtttatgtagtaaaaatgtcatgtctctagaactcacagtcatcttgaccaaaaaaaaaaaaaa

SEQ ID NO: 210851 - protein, 160 aa, Artificial Sequence
  derived and/or modified sequence
MHRRRLALGLGFCLLAGTSLSVLWVYLENWLPVSYVPYYLPCPEILPMMMALSCLCHQQHEAALQEGEATPARGMVTVPSAQAAGAQAHTAADTHTLVGAHRLRGNLQPRASAAHLPATEPDHWGHGVCRGEVHSFHPVLPGVSRGVLHAWVPGALLHLH

SEQ ID NO: 210852 - protein, 347 aa, Artificial Sequence
  derived and/or modified sequence
MHRRRLALGLGFCLLAGTSLSVLWVYLENWLPVSYVPYYLPCPEIFNMKLHYKREKPLQPVVWSQYPQPKLLEHRPTQLLTLTPWLAPIVSEGTFNPELLQHIYQPLNLTIGVTVFAVGKYTHFIQSFLESAEEFFMRGYRVHYYIFTDNPAAVPGVPLGPHRLLSSIPIQGHSHWEETSMRRMETISQHIAKRAHREVDYLFCLDVDMVFRNPWGPETLGDLVAAIHPSYYAVPRQQFPYERRRVSTAFVADSEGDFYYGGAVFGGQVARVYEFTRGCHMAILADKANGIMAAWREESHLNRHFISNKPSKVLSPEYLWDDRKPQPPSLKLIRFSTLDKDISCLRS

SEQ ID NO: 210853 - DNA, 1044 bp, Artificial Sequence
  derived and/or modified sequence
atgcacagacggagactggccctcggactagggttctgtcttctagccgggacgagtctttcagtattatgggtctatctggaaaactggctgccagtttcatatgtgccatattatctgccatgcccagaaatattcaacatgaagcttcattataagcgcgagaagcctcttcaaccagtcgtctggagccaatatcctcagcctaaactgctcgaacaccggcctacccagttgctgaccctgacgccttggctggctcccatcgtctctgagggcacctttaatcctgaactcctgcagcatatctatcagcccctcaaccttacaataggagtcaccgtctttgcagtcggaaaatatacccatttcatccagagttttctagaatctgccgaggagttcttcatgcgcggatacagggttcactattacatttttaccgacaaccctgccgctgtgccgggggtgcccctgggccctcacaggctgctgtcctccattccaatccaaggccactcccactgggaggagacatccatgcggcgaatggagacgattagtcagcacattgcaaagcgagctcatcgggaagttgattacctcttttgcctcgatgttgatatggtgttccgaaatccatggggccctgagaccctcggtgacctggtggcggcaatccatcctagctattacgctgtacctcggcagcagttcccttatgagaggcgtagggtcagcactgccttcgtcgccgatagtgagggcgatttttattatgggggcgctgtgtttggaggccaggtggcccgcgtgtatgagttcactagaggttgccatatggcgatactcgcggataaagcgaacggcattatggcggcttggagggaggagtcccatctcaaccggcatttcattagcaataagccaagtaaggttctttccccagagtacctatgggacgaccggaagccgcaacctcccagtctcaagctgattcgctttagcacactggacaaagatatttcctgcctacgctcgtag

SEQ ID NO: 210854 - DNA, 847 bp, Artificial Sequence
  derived and/or modified sequence
cgcggccccgctgcctgccctgctccaggctccacctgcgccgccgatcgcccgggtatcgcgggggcccaggccagctgagtccgttttccgcgccggggtggcgcccctccaaccgtcctaacgccgggccggcagcaaggagtgttcctgggacctcagagaccaggctcagagcctgacatccctgcgaggggacagcctcatccgcccaggccagtgggggtctctacaagtgcccaggctcaggtgcagcccccagcaatgcatcgccggagactggccctgggtctggggttctgcctgttggcgggcacaagcctcagtgtcctgtgggtgtatcttgagaactggctgccagtctcctatgtcccctattatctcccctgcccagagatcttacccatgatgatggctctttcttgcctctgccaccagcaacatgaagctgcactacaagagggagaagccactccagcccgtggtatggtcacagtaccctcagcccaagctgctggagcacaggcccacacagctgctgacactcacaccctggttggcgcccatcgtctccgagggaaccttcaacccagagcttctgcagcacatctaccagccactgaacctgaccattggggtcacggtgtttgccgtggggaagtacactcatttcatccagtccttcctggagtcagccgaggagttcttcatgcgtgggtaccgggtgcactactacatcttcactgacaaccctgcagccgttcccggggtcccgctgggtccccaccggcttctcagctccatccccatccagggtcactcccactgggaggagacatccatgcgc

SEQ ID NO: 210855 - DNA, 1980 bp, Artificial Sequence
  derived and/or modified sequence
ctcttttctgtcctctttcctgtctgtcttcctcttttctgtctggcccgcggccccgctgcctgccctgctccaggctccacctgcgccgccgatcgcccgggtatcgcgggggcccaggccagctgagtccgttttccgcgccggggtggcgcccctccaaccgtcctaacgccgggccggcagcaaggagtgttcctgggacctcagagaccaggctcagagcctgacatccctgcgaggggacagcctcatccgcccaggccagtgggggtctctacaagtgcccaggctcaggtgcagcccccagcaatgcatcgccggagactggccctgggtctggggttctgcctgttggcgggcacaagcctcagtgtcctgtgggtgtatcttgagaactggctgccagtctcctatgtcccctattatctcccctgcccagagatcttcaacatgaagctgcactacaagagggagaagccactccagcccgtggtatggtcacagtaccctcagcccaagctgctggagcacaggcccacacagctgctgacactcacaccctggttggcgcccatcgtctccgagggaaccttcaacccagagcttctgcagcacatctaccagccactgaacctgaccattggggtcacggtgtttgccgtggggaagtacactcatttcatccagtccttcctggagtcagccgaggagttcttcatgcgtgggtaccgggtgcactactacatcttcactgacaaccctgcagccgttcccggggtcccgctgggtccccaccggcttctcagctccatccccatccagggtcactcccactgggaggagacatccatgcgccggatggagaccatcagccagcacattgctaagagggctcaccgggaggtggactacctcttctgccttgatgtggacatggtgtttcggaacccgtggggccctgagaccttgggagacctggtggctgccattcacccaagctactacgccgttccccgccagcagttcccctatgagcgcaggcgtgtttccactgcctttgtggcagacagcgaaggggacttctattatggtggggcagtcttcggggggcaggtggccagggtatatgagtttactaggggctgccacatggccatcctggcggacaaggccaatggcatcatggctgcctggcgggaggaaagccacctgaaccgtcacttcatctcaaacaagccgtccaaggtgctgtcccccgagtacctctgggacgacaggaagccccagccacccagcctgaagctgatccgcttttctacactggacaaggatatcagctgcctgaggagctgaccacggagctgggggttgccatggatggggacccaaagacctgcagccaccagtgcttcactagcgtgcagaccagccctgtcccgcctccctgtcagtcaggcgaattcaaccggaaaagggacgtggaaaggccactgtgaactgcagagggctgtgcacacagtagcacacaggatctcacagtaacgcggcatgggaacagtgagacagggggaggggaggcgcagttacaaaggcagggcccggcaggcttgccacgttctgcagccgtgcctttgcggggcaggctctgaagcctcagcccgactcagagtgcctgaaccctgccgcgccagtcccccgtttattgcatattgcccttaacgtagcatttctaataccctggtgtgaaggcgccctagaccccttttctctggtcacaggggtcctgggtcctttgatgtctcccaaccacatgtagccaattcctcactcaggcccccagagtgagcctttgaaatggaacaggtctaggctccctcggtttcctgcaccccaaagtgagccgcactctcaggggactagccacctccttcttaagagggtttggggcagtttataataaagggggcgtgtgctcaa

SEQ ID NO: 210856 - DNA, 1935 bp, Artificial Sequence
  derived and/or modified sequence
tcttcctcttttctgtctggcccgcggccccgctgcctgccctgctccaggctccacctgcgccgccgatcgcccgggtatcgcgggggcccaggccagctgagtccgttttccgcgccggggtggcgcccctccaaccgtcctaacgccgggccggcagcaaggagtgttcctgggacctcagagaccaggctcagagcctgacatccctgcgaggggacagcctcatccgcccaggccagtgggggtctctacaagtgcccaggctcaggtgcagcccccagcaatgcatcgccggagactggccctgggtctggggttctgcctgttggcgggcacaagcctcagtgtcctgtgggtgtatcttgagaactggctgccagtctcctatgtcccctattatctcccctgcccagagatcttcaacatgaagctgcactacaagagggagaagccactccagcccgtggtatggtcacagtaccctcagcccaagctgctggagcacaggcccacacagctgctgacactcacaccctggttggcgcccatcgtctccgagggaaccttcaacccagagcttctgcagcacatctaccagccactgaacctgaccattggggtcacggtgtttgccgtggggaatccttcctggagtcagccgaggagttcttcatgcgtgggtaccgggtgcactactacatcttcactgacaaccctgcagccgttcccggggtcccgctgggtccccaccggcttctcagctccatccccatccagggtcactcccactgggaggagacatccatgcgccggatggagaccatcagccagcacattgctaagagggctcaccgggaggtggactacctcttctgccttgatgtggacatggtgtttcggaacccgtggggccctgagaccttgggagacctggtggctgccattcacccaagctactacgccgttccccgccagcagttcccctatgagcgcaggcgtgtttccactgcctttgtggcagacagcgaaggggacttctattatggtggggcagtcttcggggggcaggtggccagggtatatgagtttactaggggctgccacatggccatcctggcggacaaggccaatggcatcatggctgcctggcgggaggaaagccacctgaaccgtcacttcatctcaaacaagccgtccaaggtgctgtcccccgagtacctctgggacgacaggaagccccagccacccagcctgaagctgatccgcttttctacactggacaaggatatcagctgcctgaggagctgaccacggagctgggggttgccatggatggggacccaaagacctgcagccaccagtgcttcactagcgtgcagaccagccctgtcccgcctccctgtcagtcaggcgaattcaaccggaaaagggacgtggaaaggccactgtgaactgcagagggctgtgcacacagtagcacacaggatctcacagtaacgcggcatgggaacagtgagacagggggaggggaggcgcagttacaaaggcagggcccggcaggcttgccacgttctgcagccgtgcctttgcggggcaggctctgaagcctcagcccgactcagagtgcctgaaccctgccgcgccagtcccccgtttattgcatattgcccttaacgtagcatttctaataccctggtgtgaaggcgccctagaccccttttctctggtcacaggggtcctgggtcctttgatgtctcccaaccacatgtagccaattcctcactcaggcccccagagtgagcctttgaaatggaacaggtctaggctccctcggtttcctgcaccccaaagtgagccgcactctcaggggactagccacctccttcttaagagggtttggggcagtttataataaagggggcgtgtgctcaa

SEQ ID NO: 210857 - DNA, 1044 bp, Artificial Sequence
  derived and/or modified sequence
atgcacagaagaaggctggccctgggcctgggcttctgcctgctggccggcaccagcctgtctgtgctgtgggtgtacctggagaactggctgcctgtgtcctatgtgccctactacctgccctgcccagagatcttcaacatgaagctgcactacaagcgggagaagcccctgcagcctgtggtgtggagccagtacccccagcccaagctgctggagcaccggcccacccagctgctgaccctgaccccctggctggcccccatcgtgtctgagggcaccttcaaccctgagctgctgcagcacatctaccagcccctgaacctgaccatcggcgtgacagtgtttgctgtgggcaagtacacccacttcatccagagcttcctggagagcgctgaggagttcttcatgaggggctacagagtgcactactacatcttcacagacaacccagctgctgtgcctggggtgcccctgggcccccaccggctgctgagcagcatccccatccagggccacagccactgggaggagacctccatgaggaggatggagaccatcagccagcacatcgccaagagggcccaccgggaggtggactacctgttctgcctggatgtggacatggtgttcaggaacccctggggccctgagaccctgggggacctggtggccgccatccaccccagctactatgctgtgccccggcagcagttcccctatgaaagaagaagagtgtccacagcctttgtggccgacagcgagggggacttctactacggcggcgctgtgtttggaggccaggtggcccgggtgtatgagttcacccggggctgccacatggccatcctggccgacaaggccaacggcatcatggccgcctggagggaggagagccacctgaacagacacttcatcagcaacaagcccagcaaggtgctgagccctgagtacctgtgggatgacaggaagccccagccccccagcctgaagctgatccgcttcagcaccctggacaaggacatcagctgcctgcggagctag

SEQ ID NO: 210858 - DNA, 1044 bp, Artificial Sequence
  derived and/or modified sequence
atgcaccggcggcggctggccctgggcctgggcttctgcctgctggcaggcactagcctcagcgttctgtgggtatatctagagaactggctcccagtgtcctacgtcccttactacctcccttgtcccgaaatatttaacatgaagttacactataagcgagagaagcccctccagcctgttgtgtggagtcagtaccctcagccaaagctccttgagcacaggcctacgcagcttcttactctaactccatggctggctcccatagtgtctgaggggactttcaaccccgagctcctgcagcatatatatcaacctctgaatctaactataggtgtcactgtgtttgccgtcggcaagtatacacactttattcagtccttcctcgagtcagccgaggagtttttcatgagaggatatagagtgcattattatatcttcaccgacaatcccgcagcagtgccaggtgtccccctgggtccacatcgactgctgagtagcattccgatccaaggtcactcacattgggaagaaacaagcatgagacggatggagacaatatcacagcacatcgctaagcgtgcccaccgcgaggtcgactacctcttctgtctcgatgtcgacatggtgtttagaaatccatggggtccggaaaccctgggagatctcgtggctgcaattcatccatcctattacgccgtcccgaggcagcagttcccctatgaacggcgccgagtgtccaccgccttcgtggcagactcggagggcgacttctactacggcggcgctgtttttggcggacaggtcgccagggtgtacgagtttaccagaggctgtcacatggccatcttggccgataaagctaatggcatcatggcagcttggagggaggaatcccatctgaaccgccattttatttcaaacaaaccgtctaaggtcctctctccagagtatctttgggacgaccgtaagccgcagcccccctctttaaaactgatccgattcagtaccttagacaaagatatatcttgccttcggtcctag

SEQ ID NO: 210859 - DNA, 1044 bp, Artificial Sequence
  derived and/or modified sequence
atgcacagaagacgattggccctaggtctcggattctgcctgctggccggtacctcacttagcgttttgtgggtttatctggagaattggcttccagtgtcatacgtgccatactatttgccatgtcctgagatcttcaatatgaagcttcattataaacgcgaaaagcccctgcaaccggtcgtctggtcccagtatccccagcccaaattgttggagcaccggcctacccagcttctgaccttgacaccctggctggcgcctatcgtatcggaggggacatttaatcctgagctcctccagcacatctaccagccactgaacctcaccatcggagtcacagtgtttgccgttggaaaatatactcacttcattcaaagttttctggagtcagccgaggagttcttcatgcgtggttacagggtgcactattacatctttactgataaccctgccgcagttccaggagtcccgctgggccctcaccggctgctttcatccatccctatccaggggcactctcactgggaagagacctcaatgcgtagaatggaaactatcagccagcacattgccaagcgagcgcacagggaggtggattaccttttctgtctggacgtggacatggtatttaggaacccctggggcccagaaactctgggcgacctggttgccgcaattcatccatcttactacgcagtgcccaggcagcagtttccttatgagcgcagaagggtttctaccgcttttgtcgctgactcagaaggcgatttctattatggaggagccgttttcggaggccaggtcgccagagtgtacgagtttacacggggatgtcacatggctattttggccgacaaagctaacggaattatggcagcttggcgagaagagtcccacctgaatcgtcattttatctcgaataagccttctaaggtcctgtctcctgaatatctgtgggacgaccgcaagccacagccaccttccctgaaactgatccggttttcgacccttgataaagatatttcctgcctgaggtcctag

SEQ ID NO: 210860 - DNA, 1044 bp, Artificial Sequence
  derived and/or modified sequence
atgcacagaagaagactggccctgggcctgggcttctgcctgctggccggcaccagcctgagcgtgctgtgggtgtacctggagaactggctgcccgtgagctacgtgccctactacctgccctgccccgagatcttcaacatgaagctgcactacaagagagagaagcccctgcagcccgtggtgtggagccagtacccccagcccaagctgctggagcacagacccacccagctgctgaccctgaccccctggctggcccccatcgtgagcgagggcaccttcaaccccgagctgctgcagcacatctaccagcccctgaacctgaccatcggcgtgaccgtgttcgccgtgggcaagtacacccacttcatccagagcttcctggagagcgccgaggagttcttcatgagaggctacagagtgcactactacatcttcaccgacaaccccgccgccgtgcccggcgtgcccctgggcccccacagactgctgagcagcatccccatccagggccacagccactgggaggagaccagcatgagaagaatggagaccatcagccagcacatcgccaagagagcccacagagaggtggactacctgttctgcctggacgtggacatggtgttcagaaacccctggggccccgagaccctgggcgacctggtggccgccatccaccccagctactacgccgtgcccagacagcagttcccctacgagagaagaagagtgagcaccgccttcgtggccgacagcgagggcgacttctactacggcggcgccgtgttcggcggccaggtggccagagtgtacgagttcaccagaggctgccacatggccatcctggccgacaaggccaacggcatcatggccgcctggagagaggagagccacctgaacagacacttcatcagcaacaagcccagcaaggtgctgagccccgagtacctgtgggacgacagaaagccccagccccccagcctgaagctgatcagattcagcaccctggacaaggacatcagctgcctgagaagctag

SEQ ID NO: 210861 - protein, 761 aa, Artificial Sequence
  derived and/or modified sequence
MDSGGGSLGLHTPDSRMAHTMIMQDFVAGMAGTAHIDGDHIVVSVPEAVLVSDVVTDDGITLDHGLAAEVVHGPDIITETDVVTEGVIVPEAVLEADVAIEEDLEEDDGDHILTSELITETVRVPEQVFVADLVTGPNGHLEHVVQDCVSGVDSPTMVSEEVLVTNSDTETVIQAAGGVPGSTVTIKTEDDDDDDVKSTSEDYLMISLDDVGEKLEHMGNTPLKIGSDGSQEDAKEDGFGSEVIKVYIFKAEAEDDVEIGGTEIVTESEYTSGHSVAGVLDQSRMQREKMVYMAVKDSSQEEDDIRDERRVSRRYEDCQASGNTLDSALESRSSTAAQYLQICDGINTNKVLKQKAKKRRRGETRQWQTAVIIGPDGQPLTVYPCHICTKKFKSRGFLKRHMKNHPDHLMRKKYQCTDCDFTTNKKVSFHNHLESHKLINKVDKTHEFTEYTRRYREASPLSSNKLILRDKEPKMHKCKYCDYETAEQGLLNRHLLAVHSKNFPHVCVECGKGFRHPSELKKHMRTHTGEKPYQCQYCIFRCADQSNLKTHIKSKHGNNLPYKCEHCPQAFGDERELQRHLDLFQGHKTHQCPHCDHKSTNSSDLKRHIISVHTKDFPHKCEVCDKGFHRPSELKKHSDIHKGRKIHQCRHCDFKTSDPFILSGHILSVHTKDQPLKCKRCKRGFRQQNELKKHMKTHTGRKIYQCEYCEYSTTDASGFKRHVISIHTKDYPHRCEFCKKGFRRPSEKNQHIMRHHKEALM

SEQ ID NO: 210862 - DNA, 4182 bp, Artificial Sequence
  derived and/or modified sequence
agacgcagagtagattgtgattggctcgggctgcggaacctcggaaacccgaatgtgaggaccttaagggatccacagctgccgccccccgcagccatccagagcgcggtcacagtccgactggcggcacggaggcggcggcggcggcggcggcggcagcggcggcggcagcggcggcggcagctgtagctgcagcagcaggtaaagagagcgttttcccaaagaaaataacatagcacagaaggaaaaataaaaagaaattgctgcagattttactttatgtgagaaaatctacaatttcttcgagacactcatataaagatattggtgaatgaactttgctaagtatggattcaggcggtggaagtcttggattgcacacgccagactctagaatggcccataccatgattatgcaagattttgtggctggaatggctggtactgcacatatcgatggagaccatattgttgtttcagttcctgaagctgttttagtttctgatgttgtcacagatgatgggataactcttgatcatggccttgcagctgaagttgtccatggacctgatatcatcacagagactgatgtagtaacagaaggtgtgattgttcctgaagcggtacttgaagctgatgttgccattgaagaggatttagaggaagatgatggtgatcacatcttgacttctgaactaattacagaaaccgttagggtaccagagcaggttttcgtggctgaccttgttactggtcctaatggacacttagaacatgtggtccaagattgtgtttcaggagtcgactctcccacaatggtatcagaggaggttcttgtaactaattcagatacagaaactgtgattcaagcagctggaggtgttcctggttctacagttactataaaaaccgaagatgatgatgatgatgatgtcaagagcacttctgaagactacttaatgatatctttggatgatgttggagaaaaattagagcatatggggaatacaccattaaaaattggcagtgatggttcacaagaagatgctaaagaagatgggtttggttctgaagttataaaagtgtatatatttaaagcggaggctgaagatgatgttgaaataggtggaacagaaattgtcacagagagtgagtacaccagtggacattcagtagctggagtgcttgaccagagccgaatgcagcgggagaagatggtttacatggcagttaaagattcttctcaagaagaagatgatatcagagatgaaagaagagtttcccgaaggtatgaagattgtcaagcatcaggaaatactttggactcagcattagaaagcagaagtagtacagcagcacagtaccttcaaatttgtgacggcattaatacaaataaagtacttaaacaaaaagccaaaaagaggagaaggggagaaaccaggcagtggcaaacagctgttataataggtcctgatggacagcccctcacagtgtacccttgccatatttgcacaaaaaagtttaaatccaggggattcttaaaaagacacatgaagaatcatcctgatcatttaatgagaaaaaaatatcagtgtacagattgtgactttacaactaacaagaaagtgagtttccataaccacttagaaagccataagctcataaacaaagtcgacaaaacccatgaatttacagaatacacacgaagatacagagaggctagtccactgagttccaataaacttattttaagagacaaggagccgaagatgcacaagtgcaaatactgtgactatgaaactgcagaacaaggactgttaaacaggcatttgttggccgttcacagcaagaattttcctcatgtttgtgttgagtgtgggaagggttttcgacatccttctgaactcaagaaacatatgagaacccatactggtgagaagccatatcagtgtcagtattgtattttcaggtgtgcagatcaatcaaatctgaaaactcacattaagtctaaacatggtaacaatttgccatataaatgtgagcattgtccccaagcatttggtgatgagagggagcttcaacgccatctggatttgtttcaaggacataagacacaccagtgtcctcattgtgaccataagagcaccaattcaagtgaccttaagcggcacatcatatctgtccatactaaggattttcctcacaaatgtgaggtctgtgataaaggttttcatcgtccttctgagctcaaaaagcatagtgatatccataagggtaggaagattcatcagtgcaggcactgtgactttaaaacatccgatccatttattcttagtggccatatcctttcagttcatactaaagatcagccattgaaatgtaaaaggtgcaagagaggattcagacaacaaaatgagctaaaaaaacatatgaagacccatactggaaggaagatttaccaatgtgagtattgtgaatacagcactacagatgcatctggctttaaacgacatgtgatatcaatacatacaaaagactatccacacaggtgtgaattctgcaagaagggattccgaagaccatcagaaaaaaatcagcatattatgaggcaccacaaagaggctcttatgtaataagatcaatataaagaaagaagctatttaggagatatgatatgctacttgggagaaaactctcactaactgtctcaccgggtttcaaagcttgatactaaaccatgactttacattctttgtattaaagatcttaaaatatttgaattcacaggggatcccatagccctttgaaaattacttaaagaatttaagaagcactatagaatggttacagaaaaacttcttaagtatctgtgtaatagtattatatgcatacttaaactacagaggggaaaagcaaagacaaatactttatttggctgattatgttagatacaaatgtttctgagaagagaatacataattgagtttagtgatgctttgctatagcaagcaaacccacttttatgcaattttagaaatggggcagggaaacaaaatgtggtcattcatcagtcacttagtcattgagccttttatattgtacctggaaattaaattccagcaatgacaaaagttttgtgtattcattaaaagaaaactaactggaaaacaggttagattaattcagtactattaaaaaagaattcagagctgttaatattttatcacaggataggatacttaaaatatagcattctgtgctgagatctaaggtgaagtctataaagattaaagttcccttttttctgatgttcaagttgattgttgttcagtatggcatatatgacaaaagtatatttgagtcaaatgtggctttctaaaatggatgcaacattagcgttgcaaacaaaatcagcactatatttcttaatgatctaaagattaatttgagagaacacagttttcttaaatattataatgtctagagtttttttaggacagtcttagcaagtatgattgttctagtcttacttgctctaatgtttaaaggtgcaattttatgccattattgaaattgatttttaaaatctatataccatatgattaacatgcattttcaatatgaggcagtgtttatgcagtatttaacagagcaatctgctgccaatagagtttggaggtggatatttagtttacagtgtataaacttaaaatatgcatccctttaacaacgctttgtgttagcatgctgcaaatcaaaatggcacttaatattaaaagctggtttagggaaattttatgaaaatcctgttcataaatgtaatgcatatgatatgtacttttaagttttagttgcttcatgtttacattcagctgttcaacataattaaaatgtaattttacttcatgctatattgtggctttgtgtttcaaataatgttcacctttctgtttttgcaccagataagaatcagttccttgagaataaattttttatctttcttaacttcagaatattaaatttggaatatctactaaaattgtgtgttatgtggctgtaaatgatgtacacgctgtaaaataagatcgctactgttatgtgggattattatttctaaatgttactcattgaaatgagcatacaataaaaagcatttattgcacttaaaaaaaaaaaaaaaaa

SEQ ID NO: 210863 - DNA, 2286 bp, Artificial Sequence
  derived and/or modified sequence
atggacagcggcggcggcagcctgggcctgcacacccccgacagcagaatggcccacaccatgatcatgcaggacttcgtggccggcatggccggcaccgcccacatcgacggcgaccacatcgtggtgagcgtgcccgaggccgtgctggtgagcgacgtggtgaccgacgacggcatcaccctggaccacggcctggccgccgaggtggtgcacggccccgacatcatcaccgagaccgacgtggtgaccgagggcgtgatcgtgcccgaggccgtgctggaggccgacgtggccatcgaggaggacctggaggaggacgacggcgaccacatcctgaccagcgagctgatcaccgagaccgtgagagtgcccgagcaggtgttcgtggccgacctggtgaccggccccaacggccacctggagcacgtggtgcaggactgcgtgagcggcgtggacagccccaccatggtgagcgaggaggtgctggtgaccaacagcgacaccgagaccgtgatccaggccgccggcggcgtgcccggcagcaccgtgaccatcaagaccgaggacgacgacgacgacgacgtgaagagcaccagcgaggactacctgatgatcagcctggacgacgtgggcgagaagctggagcacatgggcaacacccccctgaagatcggcagcgacggcagccaggaggacgccaaggaggacggcttcggcagcgaggtgatcaaggtgtacatcttcaaggccgaggccgaggacgacgtggagatcggcggcaccgagatcgtgaccgagagcgagtacaccagcggccacagcgtggccggcgtgctggaccagagcagaatgcagagagagaagatggtgtacatggccgtgaaggacagcagccaggaggaggacgacatcagagacgagagaagagtgagcagaagatacgaggactgccaggccagcggcaacaccctggacagcgccctggagagcagaagcagcaccgccgcccagtacctgcagatctgcgacggcatcaacaccaacaaggtgctgaagcagaaggccaagaagagaagaagaggcgagaccagacagtggcagaccgccgtgatcatcggccccgacggccagcccctgaccgtgtacccctgccacatctgcaccaagaagttcaagagcagaggcttcctgaagagacacatgaagaaccaccccgaccacctgatgagaaagaagtaccagtgcaccgactgcgacttcaccaccaacaagaaggtgagcttccacaaccacctggagagccacaagctgatcaacaaggtggacaagacccacgagttcaccgagtacaccagaagatacagagaggccagccccctgagcagcaacaagctgatcctgagagacaaggagcccaagatgcacaagtgcaagtactgcgactacgagaccgccgagcagggcctgctgaacagacacctgctggccgtgcacagcaagaacttcccccacgtgtgcgtggagtgcggcaagggcttcagacaccccagcgagctgaagaagcacatgagaacccacaccggcgagaagccctaccagtgccagtactgcatcttcagatgcgccgaccagagcaacctgaagacccacatcaagagcaagcacggcaacaacctgccctacaagtgcgagcactgcccccaggccttcggcgacgagagagagctgcagagacacctggacctgttccagggccacaagacccaccagtgcccccactgcgaccacaagagcaccaacagcagcgacctgaagagacacatcatcagcgtgcacaccaaggacttcccccacaagtgcgaggtgtgcgacaagggcttccacagacccagcgagctgaagaagcacagcgacatccacaagggcagaaagatccaccagtgcagacactgcgacttcaagaccagcgaccccttcatcctgagcggccacatcctgagcgtgcacaccaaggaccagcccctgaagtgcaagagatgcaagagaggcttcagacagcagaacgagctgaagaagcacatgaagacccacaccggcagaaagatctaccagtgcgagtactgcgagtacagcaccaccgacgccagcggcttcaagagacacgtgatcagcatccacaccaaggactacccccacagatgcgagttctgcaagaagggcttcagaagacccagcgagaagaaccagcacatcatgagacaccacaaggaggccctgatgtag

SEQ ID NO: 210864 - DNA, 2286 bp, Artificial Sequence
  derived and/or modified sequence
atggattctgggggcgggagcctgggactacacacccccgacagccgcatggctcataccatgatcatgcaggactttgtggctggtatggcgggaacagctcatatagacggggaccatatcgtcgtttcggtgcctgaagcggtgctggtatccgacgtggtgacagatgatggaattaccctggaccatgggctggcagcagaagtcgtacacggccccgatatcatcactgagacggacgtcgtgactgaaggtgttattgtccccgaggctgtgctggaggcggatgtcgccatcgaggaggatctggaggaagatgacggagatcacatcttgaccagtgagctgattacagagacagtgagggtgcctgaacaggtcttcgtggctgatctcgtgacaggccctaatggccacctcgaacatgtcgtgcaagactgcgtgagtggggtcgattcgcccacaatggtgtccgaagaagtactcgtcacaaacagtgacaccgagaccgttatccaggctgctggtggagtcccgggcagtaccgttactattaaaaccgaggacgatgacgatgacgatgtcaagtcaactagcgaggattacttaatgatcagcctcgatgatgttggcgagaagctggagcacatgggtaacacacctctgaaaataggcagcgatggttcccaagaagatgcaaaggaggacgggttcgggtccgaggtcatcaaggtgtacatctttaaggccgaagccgaggatgatgtagaaatcggaggaaccgaaattgtcaccgaatctgagtatacttccgggcactccgtggcgggtgtactggatcaatcaagaatgcaacgagagaaaatggtgtatatggctgtaaaggatagcagtcaggaagaggacgacattcgcgacgaacgccgggtttcaagaaggtacgaagactgtcaagcaagcggtaatactcttgatagcgcattggagagtcgctcaagtaccgctgctcagtacctccagatatgcgatggcatcaacaccaacaaggttctcaagcagaaggctaagaagcgtaggcggggtgaaacacgacaatggcagacggctgtgatcattgggccagatgggcagccattaaccgtttatccatgtcacatatgtacaaaaaagttcaaatctagggggttcctgaagcgacatatgaaaaatcaccctgaccacctgatgagaaagaagtaccagtgtactgattgtgacttcaccacaaacaaaaaagttagctttcacaatcatctggagtcacataaactgattaataaggtcgataagacccacgagttcacagaatacacgaggcgctatagggaagcttcacccttatcttctaacaagctgatcctgcgggacaaagaaccaaagatgcataagtgtaagtattgcgactacgaaacagctgaacagggattattgaatcgccaccttcttgcagtacatagcaagaatttccctcacgtctgtgtcgaatgcggcaagggatttcgtcatccaagcgagttgaaaaagcacatgcggacgcacaccggcgagaaaccataccaatgtcagtactgtatcttcagatgtgctgatcagagtaatttgaagacccacataaagtcaaagcacggaaataacctaccctacaagtgtgagcattgcccacaagcattcggcgatgaacgagagctccagcggcaccttgaccttttccaggggcacaaaacccaccagtgccctcactgcgatcataaatcaacaaacagcagcgacctgaaaaggcacatcatcagcgtacatacgaaagactttcctcacaagtgcgaagtctgcgacaagggtttccaccggccttccgaactgaaaaaacactcagatatacacaaaggcagaaaaatacaccagtgccgccactgcgatttcaagacttccgacccttttatcctgtcgggccacatattgagtgtgcacaccaaggaccaacccctgaaatgtaaaaggtgcaaacgaggtttcaggcagcaaaacgagttgaaaaaacacatgaagactcatacagggaggaagatttaccagtgtgaatactgtgaatactcaaccacagacgcgtctgggttcaagcggcacgtcataagtatacacacaaaggattatccccatcgctgtgagttttgcaagaagggctttcggagaccttcagaaaagaaccagcacatcatgcgacaccacaaagaggccctaatgtag

SEQ ID NO: 210865 - DNA, 2286 bp, Artificial Sequence
  derived and/or modified sequence
atggactccggtggaggatcgcttggcttacacacaccggactcgagaatggctcataccatgattatgcaggactttgtcgcagggatggccggtaccgcgcacatcgatggtgaccacatcgtcgtatccgtgcccgaagcagtattagtgtctgatgttgtcaccgatgacggaatcaccctggaccacgggctcgcagcagaggttgtgcacggccccgatatcatcaccgaaacagacgtcgttacagagggcgtcattgtccccgaagcagtgctcgaagccgatgtcgcgatcgaggaggatctggaggaggatgatggcgatcacattctgacctcagagctcattaccgagaccgtgagagtaccagagcaagtgtttgttgctgatctagtgactgggccgaacggtcacctggagcatgttgtgcaagattgcgtgagtggcgtcgacagccctacaatggtctctgaggaggtcctagttaccaattctgatactgaaaccgtgatccaggcggctggtggcgtgcccgggtctaccgtcacgatcaagacagaagacgacgatgatgacgatgtgaaatccaccagtgaggattatctcatgatctccctcgatgacgtgggcgaaaagctggagcatatgggcaatacaccattaaagatcggctctgacggctcacaagaggacgctaaagaagacggctttggatccgaggtgataaaggtgtacatttttaaggcagaggccgaagatgacgtagagatcggtggaaccgagattgtcacagagtctgagtacacgtctggccatagcgtggctggcgtccttgaccagtctaggatgcagagagagaaaatggtatatatggcagtcaaggattcctcacaggaggaggacgatatccgggacgagaggagggtcagccgaagatacgaagattgccaggcatccggcaatactctcgatagcgcactcgagtcacgctcttcaacagctgctcagtatctccaaatctgtgacggcatcaatacaaacaaggtgcttaaacagaaggcaaagaaaagaaggcggggagaaactcggcagtggcaaacggctgtgatcattggcccagacggacaaccgctcaccgtgtatccctgtcatatctgcaccaagaaattcaaatccaggggcttcctgaagaggcatatgaaaaatcaccccgaccacctgatgcgcaagaagtatcagtgcactgattgcgacttcacaaccaataagaaggtgtccttccataaccacttggagtcacacaaactgataaacaaggtagacaagacgcatgagtttaccgaatatacccggagatacagagaggcctctcctctgtcatcgaataaactaattttgagggacaaagagcccaaaatgcacaagtgtaagtactgtgattatgaaacagccgagcagggcctgttgaacaggcacctgctagccgtgcacagtaaaaactttcctcatgtgtgcgtggaatgcggcaagggttttcgacatcctagtgagctgaaaaaacacatgagaacacacaccggtgagaaaccttatcagtgtcaatactgtatttttcggtgcgctgaccagtcgaacctcaagacccatataaagagcaaacacgggaataacctgccttataaatgcgaacattgtccacaagcttttggggacgaacgagaactacaaaggcatctagatttgttccagggacataagacacaccagtgcccgcactgcgaccataagagcactaattctagtgacttaaagaggcatataatttccgttcatactaaggactttccccacaagtgcgaagtgtgtgacaaggggtttcatcgaccatcagaactcaagaaacacagcgacatccataaaggaagaaagatacatcagtgtcggcactgcgattttaagacttccgaccccttcatcttgagcggacacattctctcggtacatactaaagatcaaccgcttaagtgcaagcgatgcaagagaggatttaggcaacagaacgagctcaaaaagcacatgaagacccacactggccgcaagatctatcagtgcgagtattgcgaatatagcacaaccgacgcctccggcttcaagcggcatgtcatctctatacacacaaaggattaccctcatcgatgtgagttctgcaaaaagggctttaggcggccgagcgagaaaaaccagcatattatgcggcatcacaaagaagcccttatgtag

SEQ ID NO: 210866 - DNA, 2286 bp, Artificial Sequence
  derived and/or modified sequence
atggattctgggggcggcagcctgggcctgcacaccccagacagcaggatggcccacaccatgatcatgcaggactttgtggccggcatggccggcacagcccacattgatggagaccacatcgtggtgtctgtgcctgaggccgtgctggtgtctgatgtggtgacagatgatggcatcaccctggaccacggcctggccgctgaggtggtgcacggccctgacatcatcacagaaacagatgtggtgacagagggcgtcatcgtgcctgaggccgtgctggaggctgatgtggccatcgaggaggacctggaggaggatgatggagaccacatcctgaccagcgagctgatcacagaaacagtgcgggtgcctgagcaggtgtttgtggccgacctggtgacaggccccaacggccacctggagcacgtggtgcaggactgtgtgtctggagtggacagccccaccatggtgtctgaggaggtgctggtgaccaacagcgacacagaaacagtcatccaggccgccggcggcgtgcccggcagcacagtgaccatcaagacagaagatgatgatgatgatgatgtgaagagcaccagcgaggactacctgatgatcagcctggatgatgtgggggagaagctggagcacatgggcaacacccccctgaagattggaagtgatggcagccaggaggatgccaaggaggatggctttggaagtgaggtgatcaaggtgtacatcttcaaggccgaggccgaggatgatgtggagattggaggaacagagatcgtgacagagagcgagtacaccagcggccacagcgtggccggcgtgctggaccagagcaggatgcagcgggagaagatggtgtacatggctgtgaaggacagcagccaggaggaggatgacatcagagatgaaagaagagtgtccagaagatatgaggactgccaggccagcggcaacaccctggacagcgccctggagagccgcagcagcacagctgcccagtacctgcagatctgtgatggcatcaacaccaacaaggtgctgaagcagaaggccaagaagagaagaagaggagagacccggcagtggcagacagctgtgatcattggaccagatggccagcccctgactgtgtacccctgccacatctgcaccaagaagttcaagagccggggcttcctgaagaggcacatgaagaaccacccagaccacctgatgaggaagaagtaccagtgcacagactgtgacttcaccaccaacaagaaggtgtccttccacaaccacctggagagccacaagctgatcaacaaggtggacaagacccatgagttcacagagtacacccggcgctaccgggaggccagccccctgagcagcaacaagctgatcctgcgggacaaggagcccaagatgcacaagtgcaagtactgtgactatgaaacagctgagcagggcctgctgaacagacacctgctggccgtgcacagcaagaacttcccccacgtgtgtgtggagtgtgggaagggcttccgccaccccagcgagctgaagaagcacatgaggacccacactggagagaagccctaccagtgccagtactgcatcttccgctgtgccgaccagagcaacctgaagacccacatcaagagcaagcacggcaacaacctgccctacaagtgtgagcactgcccccaggcctttggagatgagcgggagctgcagaggcacctggacctcttccagggccacaagacccaccagtgcccccactgtgaccacaagagcaccaacagcagtgacctgaagaggcacatcatctctgtgcacaccaaggacttcccccacaagtgtgaggtgtgtgacaagggcttccaccggcccagcgagctgaagaagcacagcgacatccacaagggcaggaagatccaccagtgccgccactgtgacttcaagaccagtgaccccttcatcctgagcggccacatcctgtctgtgcacaccaaggaccagcccctgaagtgcaagcgctgcaagaggggcttccggcagcagaatgagctgaagaagcacatgaagacccacactggaaggaagatctaccagtgtgagtactgtgagtacagcaccacagatgccagcggcttcaagagacatgtgatcagcatccacaccaaggactacccccaccgctgtgagttctgcaagaagggcttcagaagacccagcgagaagaaccagcacatcatgaggcaccacaaggaggccctgatgtag

SEQ ID NO: 210867 - DNA, 2286 bp, Artificial Sequence
  derived and/or modified sequence
atggacagcggcggcggcagcctgggcctgcacacccccgacagccggatggcacacaccatgattatgcaagattttgtcgcaggcatggccgggaccgcccacatcgatggggaccacatcgtggtcagcgttccagaggcggtgttggtgagcgacgtagtcacggacgacggtatcacccttgaccacggcctggcagccgaggtagtccatgggcccgacattatcacagagactgatgtggtaacagagggtgtcatcgtgcctgaggctgttctcgaggctgacgtggccatcgaggaagatctggaggaggatgacggggatcatatcctcacatctgagttaatcaccgagaccgtgcgcgtgccagaacaggtgttcgtggcggatcttgttaccgggcccaacggacatctagagcatgtggtgcaggactgtgttagtggggtcgatagtcctactatggtatctgaagaggtgctggtcacgaactcagataccgaaactgtgatccaggccgctgggggcgtaccaggatcaacagttaccatcaagacggaagacgatgatgacgatgacgttaagagcacctcagaggactacttgatgatttccctggacgatgtcggtgaaaagctggagcatatgggcaacacccctctcaagatcggatcggatggttctcaggaagacgcgaaagaggatggatttggaagtgaggtcataaaggtgtacattttcaaagcagaggctgaggatgacgttgaaataggaggcaccgagatcgtgacagaaagtgagtacacgtcaggccatagcgttgcgggagtgctggaccagtcaagaatgcagagagaaaaaatggtgtatatggctgtgaaagacagtagccaagaggaggatgatattagagatgagagacgagtttctcgccggtatgaagactgccaagcatctgggaacacactggatagcgctcttgagagcagatcatctactgctgcgcaatacttacaaatttgtgatgggataaatacaaataaagtgctgaaacagaaagccaagaaacggcgcagaggagagacacgacagtggcagaccgctgtgattatcggccccgacggtcaacccttgacggtctacccttgccatatctgtaccaagaagttcaagagccggggtttcctgaagcgacatatgaagaatcatccagaccacctgatgagaaaaaaataccagtgcaccgactgtgatttcaccaccaacaaaaaagtgtccttccataaccatctagagtcacataagcttatcaataaggtcgacaagacgcatgaattcacagagtacacaagacgctacagggaggctagcccgctgtcaagcaacaaactgattctccgcgacaaagaaccaaagatgcataaatgcaaatactgtgactatgagaccgccgagcagggcctgctgaaccggcacctgcttgcagttcatagcaagaacttcccccatgtctgcgtggagtgcggtaaggggttcaggcatccctcagaactcaaaaaacatatgaggacccataccggggaaaagccctaccagtgtcagtattgcatatttcgttgcgccgatcagtcgaatctcaagacgcatatcaagtccaagcacggtaataatctgccatataagtgcgaacactgcccgcaggcctttggagacgagcgcgaacttcagaggcatctggacctcttccaaggacataagacccaccaatgtccacactgcgaccataaatctacgaactccagcgacctgaagcgccatatcattagtgtccacacaaaggactttcctcacaaatgtgaggtgtgtgataaggggttccataggccctccgagcttaagaagcactctgacattcacaaaggacggaagatccatcagtgcaggcactgcgattttaaaacatcggaccctttcattttgtctggccacattctgagtgtacacacaaaggaccagcccctgaagtgtaagaggtgtaagcgggggttcagacagcagaacgaactcaagaagcacatgaagacacacactggcaggaaaatctaccagtgcgagtactgcgaatactccacaactgacgcctctggtttcaaaagacacgtcatcagcatccacaccaaagattatccacatcgttgtgaattttgtaaaaagggcttcagacgccctagcgaaaaaaaccagcacatcatgcgacatcataaggaagcactgatgtag

SEQ ID NO: 210868 - DNA, 2286 bp, Artificial Sequence
  derived and/or modified sequence
atggacagcggcggcggcagcctgggcctgcacacccccgacagccgaatggcccataccatgatcatgcaggatttcgtagccgggatggcagggactgcccacattgacggggatcatatcgtagtgagtgtgccggaggccgttctggtgtccgacgtagtaactgacgatgggatcactctggaccatggtttggcggccgaggtggtgcacggacccgatattattaccgagaccgatgtcgtgactgagggagtaattgtcccagaggctgtgctcgaagccgacgtggcaatcgaagaagatctggaagaggacgatggtgaccacattttaacatcagagctgatcacagagacggttcgggttccagagcaggtgtttgtggctgatctggtcacagggcccaacggccacctggagcatgtggtccaggattgcgtgagtggtgttgattcccccaccatggtgtcagaggaagttctggtcacaaacagtgacacagaaacagtgattcaggcagccgggggtgtgcctggatcaactgtgacaataaagaccgaggacgacgacgatgacgacgtgaaaagtacatcagaggattacttgatgatctctctggacgacgtcggcgaaaagctagagcatatggggaacactccactcaagattggcagtgatggcagtcaggaagatgcaaaggaggacggctttggctctgaagtcataaaggtgtatatattcaaggcagaggccgaggacgacgtggagataggggggactgaaatcgtgacagaatcggagtatacaagtggccattcagtcgctggagtgttggaccaaagcagaatgcagcgcgagaaaatggtgtacatggcagttaaagactcctcccaggaagaggatgacattagagacgagcggagagtgagccggcggtacgaggactgtcaggccagcggaaacactctcgactctgcactggagagccggagttcaaccgcagcccagtacttgcagatctgcgacggaattaacaccaataaagttctgaagcagaaggcgaaaaagaggagacgcggcgaaacccgccaatggcagacagcggttataatcgggcccgatgggcagcccctaactgtttatccctgccatatttgcacaaaaaagttcaaaagccgtggattcctcaagaggcatatgaagaaccatccagatcatttgatgagaaagaagtatcagtgcaccgattgcgatttcacaaccaacaaaaaagtgagctttcataatcacttagagtcccacaagcttatcaataaggtggataagactcatgagtttaccgagtacacccgcaggtatcgggaagccagcccccttagttccaacaagttgattctcagagacaaagagcctaagatgcacaagtgcaagtactgcgattatgagaccgctgagcagggcctgctaaaccggcacctgctcgcagtacactccaagaattttccccacgtctgcgttgagtgcggtaaaggtttcagacaccctagcgaattaaagaaacacatgcgcactcatacaggagaaaaaccctaccagtgccagtattgcatttttcgatgcgccgatcagagcaacctcaaaacacacattaaaagcaaacacggcaataacctgccgtacaaatgtgaacattgtcctcaggcttttggcgatgagcgtgaactacaacgtcatttggacttatttcaaggacacaagactcatcagtgcccacattgcgatcataagagcacaaactcatcagatttgaagagacacatcattagtgtccacactaaggacttcccccataagtgtgaagtgtgcgacaaagggtttcaccgcccgagcgaactcaagaagcactccgatattcacaaagggcggaagatccatcagtgtagacactgcgacttcaaaaccagtgacccgtttatcctttctggacacatactcagtgtgcacaccaaagatcaacccctaaaatgcaaacgatgtaaacgcggcttccggcaacagaacgaactgaaaaagcacatgaagactcatacaggcaggaagatttatcagtgcgaatactgcgagtactcaacaaccgacgcctcaggttttaaacgccatgtgatctccatccacaccaaagactacccccacagatgtgagttttgcaaaaagggctttcgacggccatccgaaaagaaccaacatataatgaggcaccataaggaggcactgatgtag

SEQ ID NO: 210869 - DNA, 2286 bp, Artificial Sequence
  derived and/or modified sequence
atggattcgggaggaggtagtctgggcctacacacccctgatagccggatggcccacacaatgataatgcaggactttgtagcgggaatggctgggactgcccacatagatggcgaccatatcgtcgtatcagtgcccgaggcggtccttgtgagtgatgttgtgacggacgacggcattacactggaccatggcctagcagccgaagttgtgcacggcccagacattatcacagaaactgacgttgttacagagggcgtaatcgtgcccgaggccgtcctcgaggctgacgttgctatcgaggaggatctagaggaggacgacggggatcacatcctaactagcgagctcattaccgaaactgtccgggtgcctgaacaggtgtttgtcgccgacctcgtgacaggaccaaatggtcacttagaacatgtagtgcaagactgtgtatctggcgttgattccccaacaatggtgtcagaggaggtcctcgttaccaatagcgacacggagacagttatccaggctgccggaggggtgccaggaagcaccgtgacgattaaaaccgaagacgacgatgacgacgacgttaaaagtacatctgaggattacctcatgatcagtctggacgatgtcggagaaaaactggaacatatgggcaacaccccactgaagatcggttccgatggaagccaggaagacgccaaggaagacgggtttggcagtgaagtgattaaagtgtatatctttaaagctgaagccgaggacgacgtggaaatcggcggtaccgaaatcgtgaccgaatccgaatatacctcaggacacagcgtcgcgggtgtcctggatcagagcagaatgcagagggagaagatggtgtatatggcagtgaaagatagtagccaagaggaggacgatatccgcgatgaacggcgtgtgtcaaggaggtacgaggactgtcaggctagcgggaatacactggactctgctttagaaagcagatcaagtacagctgcccagtacctgcagatttgcgatgggatcaataccaacaaggtccttaagcagaaagctaaaaaacgaaggcgaggagaaaccaggcaatggcagaccgcagtcatcatcggtcctgatggccagccactgactgtctatccctgtcatatatgtactaagaagttcaaatcacgaggttttctgaaacggcacatgaagaaccatccggaccatctgatgcggaagaagtaccagtgcaccgactgcgatttcacaaccaataagaaggtttccttccataatcatctggaatctcataagctaataaacaaggtggataagactcacgagtttaccgaatacactcgcagatatcgcgaagcatcccccttaagttctaataagttaatcttgcgggacaaagaaccgaagatgcataagtgtaagtactgtgattatgaaaccgctgaacagggattgttgaatcgacacctgctggccgtgcatagcaaaaactttccacatgtgtgtgtcgaatgtgggaaggggtttagacaccctagtgagctgaagaaacacatgagaacacatacgggggaaaagccctatcaatgccaatattgcattttcaggtgcgccgaccagagcaacctgaaaacgcatatcaaatcgaagcacggaaacaatctaccgtataagtgtgaacactgccctcaggcgtttggagacgagcgagagttgcagaggcacctcgatctgtttcaaggccacaagactcaccaatgccctcattgcgaccacaagtccaccaattcttctgacctgaaacgtcacattatttcagtgcatactaaggactttccccacaagtgcgaagtgtgtgacaaaggctttcaccggccatcagagttaaaaaagcattccgacatccataaggggaggaaaatccaccagtgcagacactgtgacttcaagacaagtgaccccttcatcctgtctggacacattctctctgtacacaccaaggatcagcccttaaaatgcaagcgttgtaagagaggatttcgccagcagaacgagttgaaaaagcatatgaagacccatactggccgtaagatctaccagtgcgagtactgtgagtactccactactgacgcctctgggttcaaaaggcacgtcataagtatacacacaaaagactacccccaccgctgtgaattttgcaagaaaggttttcggcgacccagcgagaagaaccaacacattatgagacaccataaagaggctctgatgtag

SEQ ID NO: 210870 - DNA, 2286 bp, Artificial Sequence
  derived and/or modified sequence
atggacagtgggggaggatcactgggcctccatacgccagacagtagaatggcgcatacaatgataatgcaagattttgtagccggaatggccggtaccgcacacatagacggggatcatatcgtcgtttccgtacctgaggctgtgttggtgagcgatgtggttacagatgatggcatcacactagatcacgggttggccgcagaggtcgtgcacggtcctgacatcatcaccgaaactgatgtggtgactgaaggcgtaattgtacctgaggctgtcctcgaagccgacgtggccatcgaggaggacctcgaggaggatgatggcgaccatatactgaccagtgaacttatcaccgagacggtgagagtgcctgagcaggtgttcgtcgctgaccttgtgaccggccctaatggccacctcgagcatgttgttcaagattgtgttagcggggtggactctcctactatggtgtccgaggaagtgctcgtaactaattctgataccgagacagtgatccaagccgcagggggagtgccgggatctactgtgaccatcaaaaccgaagatgacgacgacgatgatgtaaaatctacatctgaagactatcttatgatctctctggatgatgtgggagagaagctggaacacatgggcaatactcccctcaagatcggatcggatggaagccaagaggatgctaaggaagacggctttggatctgaggttattaaggtgtatatcttcaaggccgaggccgaagacgatgtcgaaataggcggaactgagattgtgacagagagcgaatacacttcaggtcactcagtcgcaggagtcctagatcagtcccggatgcagcgagagaagatggtctatatggccgtgaaagactcttcacaggaagaagacgatattcgggatgaacgacgtgtgtccagacgatatgaggactgccaagccagcggaaatacactggactccgcattagagagcaggagctcgactgccgcacagtatctccagatttgcgacggcattaacactaataaagtccttaaacaaaaggccaagaagcggagaagaggagaaacaaggcagtggcagacagccgtgattatcggccctgacggacaaccgctgaccgtgtacccttgccatatttgcactaagaagtttaagtcccgcggtttcctgaagcgacacatgaagaaccaccccgaccacctgatgcgcaagaagtatcagtgcacagattgtgatttcacaacaaacaaaaaagttagctttcataatcacctcgaaagccacaagctaattaataaggtcgacaagacccacgagtttactgagtatactaggcggtatagggaagccagtccactgtccagcaacaaacttatcctacgtgataaggagcctaaaatgcacaagtgcaagtattgcgattatgaaaccgcggagcagggtctgctgaacagacacctcttagccgttcacagcaagaatttcccacatgtgtgtgtggagtgtggcaaaggcttccgccatccttctgaactgaaaaaacacatgcgcacacacactggagagaagccataccaatgtcagtactgcattttcaggtgtgccgatcagtcgaacctgaagacgcacatcaagtccaagcacggtaataatctgccttacaaatgcgagcactgccctcaagcctttggagatgagcgggagctgcagcgccacttggatcttttccaaggacataagacccatcaatgtccacactgtgatcacaagtctacgaactcctcagatctgaagcgccacattattagtgtgcatacaaaggattttcctcacaaatgcgaagtctgtgacaagggcttccaccgtccatcagagttgaagaagcactccgacatacacaagggacgtaagattcatcaatgtaggcactgtgattttaaaacaagcgacccatttattttaagcggccacattctatccgtacatactaaagaccagccactgaagtgcaaacgttgtaaaagagggttccgtcagcaaaacgagttgaagaagcatatgaagacacatacgggacgcaagatctatcagtgtgagtactgtgagtatagcaccactgatgcctcagggttcaagaggcacgtgatttccattcatacaaaggactatccgcaccgctgtgaattttgtaagaaagggttccgaaggccaagtgaaaagaaccagcacattatgcggcaccacaaagaagccctaatgtag

SEQ ID NO: 210871 - DNA, 2887 bp, Artificial Sequence
  derived and/or modified sequence
gccatccagagcgcggtcacagtccgactggcggcacggaggcggcggcggcggcggcggcggcagcggcggcggcagcggcggcggcagctgtagctgcagcagcaggtaaagagagcgttttcccaaagaaaataacatagcacagaaggaaaaataaaaagaaattgctgcagattttactttatgtgagaaaatctacaatttcttcgagacactcatataaaggaagcagtcatgtttcatgagtcctcaaaactgagacaagagaatgtagtagagtgaggccagaagtccttactggttcaaagaactccggggaaactgggatagaacattttacattataagtagaaccctgggagccagaggtgaatacaagtttatctgcagagctccgctgcagggctgatctgggtctggaagaaatggatgagagccagtggatgaaattcactaatactagacatctgagtcctctaatattggtgaatgaactttgctaagtatggattcaggcggtggaagtcttggattgcacacgccagactctagaatggcccataccatgattatgcaagattttgtggctggaatggctggtactgcacatatcgatggagaccatattgttgtttcagttcctgaagctgttttagtttctgatgttgtcacagatgatgggataactcttgatcatggccttgcagctgaagttgtccatggacctgatatcatcacagagactgatgtagtaacagaaggtgtgattgttcctgaagcggtacttgaagctgatgttgccattgaagaggatttagaggaagatgatggtgatcacatcttgacttctgaactaattacagaaaccgttagggtaccagagcaggttttcgtggctgaccttgttactggtcctaatggacacttagaacatgtggtccaagattgtgtttcaggagtcgactctcccacaatggtatcagaggaggttcttgtaactaattcagatacagaaactgtgattcaagcagctggaggtgttcctggttctacagttactataaaaaccgaagatgatgatgatgatgatgtcaagagcacttctgaagactacttaatgatatctttggatgatgttggagaaaaattagagcatatggggaatacaccattaaaaattggcagtgatggttcacaagaagatgctaaagaagatgggtttggttctgaagttataaaagtgtatatatttaaagcggaggctgaagatgatgttgaaataggtggaacagaaattgtcacagagagtgagtacaccagtggacattcagtagctggagtgcttgaccagagccgaatgcagcgggagaagatggtttacatggcagttaaagattcttctcaagaagaagatgatatcagagatgaaagaagagtttcccgaaggtatgaagattgtcaagcatcaggaaatactttggactcagcattagaaagcagaagtagtacagcagcacagtaccttcaaatttgtgacggcattaatacaaataaagtacttaaacaaaaagccaaaaagaggagaaggggagaaaccaggcagtggcaaacagctgttataataggtcctgatggacagcccctcacagtgtacccttgccatatttgcacaaaaaagtttaaatccaggggattcttaaaaagacacatgaagaatcatcctgatcatttaatgagaaaaaaatatcagtgtacagattgtgactttacaactaacaagaaagtgagtttccataaccacttagaaagccataagctcataaacaaagtcgacaaaacccatgaatttacagaatacacacgaagatacagagaggctagtccactgagttccaataaacttattttaagagacaaggagccgaagatgcacaagtgcaaatactgtgactatgaaactgcagaacaaggactgttaaacaggcatttgttggccgttcacagcaagaattttcctcatgtttgtgttgagtgtgggaagggttttcgacatccttctgaactcaagaaacatatgagaacccatactggtgagaagccatatcagtgtcagtattgtattttcaggtgtgcagatcaatcaaatctgaaaactcacattaagtctaaacatggtaacaatttgccatataaatgtgagcattgtccccaagcatttggtgatgagagggagcttcaacgccatctggatttgtttcaaggacataagacacaccagtgtcctcattgtgaccataagagcaccaattcaagtgaccttaagcggcacatcatatctgtccatactaaggattttcctcacaaatgtgaggtctgtgataaaggttttcatcgtccttctgagctcaaaaagcatagtgatatccataagggtaggaagattcatcagtgcaggcactgtgactttaaaacatccgatccatttattcttagtggccatatcctttcagttcatactaaagatcagccattgaaatgtaaaaggtgcaagagaggattcagacaacaaaatgagctaaaaaaacatatgaagacccatactggaaggaagatttaccaatgtgagtattgtgaatacagcactacagatgcatctggctttaaacgacatgtgatatcaatacatacaaaagactatccacacaggtgtgaattctgcaagaagggattccgaagaccatcagaaaaaaatcagcatattatgaggcaccacaaagaggctcttatgtaataagatcaatataaagaaagaagctatttaggagatatgatatgctacttgggagaaaactctcactaactgtctcaccgggtttcaaagctt

SEQ ID NO: 210872 - DNA, 4124 bp, Artificial Sequence
  derived and/or modified sequence
cggaaacccgaatgtgaggaccttaagggatccacagctgccgccccccgcagccatccagagcgcggtcacagtccgactggcggcacggaggcggcggcggcggcggcggcggcagcggcggcggcagcggcggcggcagctgtagctgcagcagcaggtaaagagagcgttttcccaaagaaaataacatagcacagaaggaaaaataaaaagaaattgctgcagattttactttatgtgagaaaatctacaatttcttcgagacactcatataaagatattggtgaatgaactttgctaagtatggattcaggcggtggaagtcttggattgcacacgccagactctagaatggcccataccatgattatgcaagattttgtggctggaatggctggtactgcacatatcgatggagaccatattgttgtttcagttcctgaagctgttttagtttctgatgttgtcacagatgatgggataactcttgatcatggccttgcagctgaagttgtccatggacctgatatcatcacagagactgatgtagtaacagaaggtgtgattgttcctgaagcggtacttgaagctgatgttgccattgaagaggatttagaggaagatgatggtgatcacatcttgacttctgaactaattacagaaaccgttagggtaccagagcaggttttcgtggctgaccttgttactggtcctaatggacacttagaacatgtggtccaagattgtgtttcaggagtcgactctcccacaatggtatcagaggaggttcttgtaactaattcagatacagaaactgtgattcaagcagctggaggtgttcctggttctacagttactataaaaaccgaagatgatgatgatgatgatgtcaagagcacttctgaagactacttaatgatatctttggatgatgttggagaaaaattagagcatatggggaatacaccattaaaaattggcagtgatggttcacaagaagatgctaaagaagatgggtttggttctgaagttataaaagtgtatatatttaaagcggaggctgaagatgatgttgaaataggtggaacagaaattgtcacagagagtgagtacaccagtggacattcagtagctggagtgcttgaccagagccgaatgcagcgggagaagatggtttacatggcagttaaagattcttctcaagaagaagatgatatcagagatgaaagaagagtttcccgaaggtatgaagattgtcaagcatcaggaaatactttggactcagcattagaaagcagaagtagtacagcagcacagtaccttcaaatttgtgacggcattaatacaaataaagtacttaaacaaaaagccaaaaagaggagaaggggagaaaccaggcagtggcaaacagctgttataataggtcctgatggacagcccctcacagtgtacccttgccatatttgcacaaaaaagtttaaatccaggggattcttaaaaagacacatgaagaatcatcctgatcatttaatgagaaaaaaatatcagtgtacagattgtgactttacaactaacaagaaagtgagtttccataaccacttagaaagccataagctcataaacaaagtcgacaaaacccatgaatttacagaatacacacgaagatacagagaggctagtccactgagttccaataaacttattttaagagacaaggagccgaagatgcacaagtgcaaatactgtgactatgaaactgcagaacaaggactgttaaacaggcatttgttggccgttcacagcaagaattttcctcatgtttgtgttgagtgtgggaagggttttcgacatccttctgaactcaagaaacatatgagaacccatactggtgagaagccatatcagtgtcagtattgtattttcaggtgtgcagatcaatcaaatctgaaaactcacattaagtctaaacatggtaacaatttgccatataaatgtgagcattgtccccaagcatttggtgatgagagggagcttcaacgccatctggatttgtttcaaggacataagacacaccagtgtcctcattgtgaccataagagcaccaattcaagtgaccttaagcggcacatcatatctgtccatactaaggattttcctcacaaatgtgaggtctgtgataaaggttttcatcgtccttctgagctcaaaaagcatagtgatatccataagggtaggaagattcatcagtgcaggcactgtgactttaaaacatccgatccatttattcttagtggccatatcctttcagttcatactaaagatcagccattgaaatgtaaaaggtgcaagagaggattcagacaacaaaatgagctaaaaaaacatatgaagacccatactggaaggaagatttaccaatgtgagtattgtgaatacagcactacagatgcatctggctttaaacgacatgtgatatcaatacatacaaaagactatccacacaggtgtgaattctgcaagaagggattccgaagaccatcagaaaaaaatcagcatattatgaggcaccacaaagaggctcttatgtaataagatcaatataaagaaagaagctatttaggagatatgatatgctacttgggagaaaactctcactaactgtctcaccgggtttcaaagcttgatactaaaccatgactttacattctttgtattaaagatcttaaaatatttgaattcacaggggatcccatagccctttgaaaattacttaaagaatttaagaagcactatagaatggttacagaaaaacttcttaagtatctgtgtaatagtattatatgcatacttaaactacagaggggaaaagcaaagacaaatactttatttggctgattatgttagatacaaatgtttctgagaagagaatacataattgagtttagtgatgctttgctatagcaagcaaacccacttttatgcaattttagaaatggggcagggaaacaaaatgtggtcattcatcagtcacttagtcattgagccttttatattgtacctggaaattaaattccagcaatgacaaaagttttgtgtattcattaaaagaaaactaactggaaaacaggttagattaattcagtactattaaaaaagaattcagagctgttaatattttatcacaggataggatacttaaaatatagcattctgtgctgagatctaaggtgaagtctataaagattaaagttcccttttttctgatgttcaagttgattgttgttcagtatggcatatatgacaaaagtatatttgagtcaaatgtggctttctaaaatggatgcaacattagcgttgcaaacaaaatcagcactatatttcttaatgatctaaagattaatttgagagaacacagttttcttaaatattataatgtctagagtttttttaggacagtcttagcaagtatgattgttctagtcttacttgctctaatgtttaaaggtgcaattttatgccattattgaaattgatttttaaaatctatataccatatgattaacatgcattttcaatatgaggcagtgtttatgcagtatttaacagagcaatctgctgccaatagagtttggaggtggatatttagtttacagtgtataaacttaaaatatgcatccctttaacaacgctttgtgttagcatgctgcaaatcaaaatggcacttaatattaaaagctggtttagggaaattttatgaaaatcctgttcataaatgtaatgcatatgatatgtacttttaagttttagttgcttcatgtttacattcagctgttcaacataattaaaatgtaattttacttcatgctatattgtggctttgtgtttcaaataatgttcacctttctgtttttgcaccagataagaatcagttccttgagaataaattttttatctttcttaacttcagaatattaaatttggaatatctactaaaattgtgtgttatgtggctgtaaatgatgtacacgctgtaaaataagatcgctactgttatgtgggattattatttctaaatgttactcattgaaatgagcatacaataaaaagcatttattgcactt

SEQ ID NO: 210873 - protein, 266 aa, Artificial Sequence
  derived and/or modified sequence
MVKVTFNSALAQKEAKKDEPKSGEEALIIPPDAVAVDCKDPDDVVPVGQRRAWCWCMCFGLAFMLAGVILGGAYLYKYFALQPDDVYYCGIKYIKDDVILNEPSADAPAALYQTIEENIKIFEEEEVEFISVPVPEFADSDPANIVHDFNKKLTAYLDLNLDKCYVIPLNTSIVMPPRNLLELLINIKAGTYLPQSYLIHEHMVITDRIENIDHLGFFIYRLCHDKETYKLQRRETIKGIQKREASNCFAIRHFENKFAVETLICS

SEQ ID NO: 210874 - DNA, 801 bp, Artificial Sequence
  derived and/or modified sequence
atggtgaaagtgacgtttaactctgccctcgcgcaaaaggaagccaaaaaggacgagccaaagtccggcgaagaggcccttatcatcccgcctgacgcggttgcagttgactgcaaagaccctgatgacgtagtcccagtgggacagcgacgcgcctggtgttggtgcatgtgtttcggtttagcctttatgctggcaggggtgatcctcggtggcgcatatctatataagtactttgctctgcagcccgatgatgtgtattactgtgggatcaaatacataaaggacgacgtgattctgaatgagccatccgcggatgccccagctgccctgtatcagacgatcgaggaaaacattaaaatattcgaggaagaggaggttgaatttatctctgtacccgtacctgaattcgctgattccgacccagccaacatcgtgcacgactttaacaaaaagttaacagcttatctggaccttaatctcgacaaatgctacgtgatacccctgaacacaagcatagttatgcctccaaggaacctactggaactactcatcaacatcaaggcgggcacctacctgccccagtcgtacctaatccacgagcacatggttataactgatagaattgaaaatatcgaccatctcggcttttttatctaccggttgtgtcatgacaaagagacctataaactccagcggcgcgagaccattaagggaattcagaaacgggaagcttccaattgcttcgccataagacactttgagaacaagttcgctgtagagaccctgatctgtagctag

SEQ ID NO: 210875 - DNA, 1876 bp, Artificial Sequence
  derived and/or modified sequence
agtctccgccctcgcgcgggagctgggaggctgcgagatccctaccgcagtagccgcctctgccgccgcggagcttcccgaacctcttcagccgcccggagccgctcccggagcccggccgtagaggctgcaatcgcagccgggagcccgcagcccgcgccccgagcccgccgccgcccttcgagggcgccccaggccgcgccatggtgaaggtgacgttcaactccgctctggcccagaaggaggccaagaaggacgagcccaagagcggcgaggaggcgctcatcatcccccccgacgccgtcgcggtggactgcaaggacccagatgatgtggtaccagttggccaaagaagagcctggtgttggtgcatgtgctttggactagcatttatgcttgcaggtgttattctaggaggagcatacttgtacaaatattttgcacttcaaccagatgacgtgtactactgtggaataaagtacatcaaagatgatgtcatcttaaatgagccctctgcagatgccccagctgctctctaccagacaattgaagaaaatattaaaatctttgaagaagaagaagttgaatttatcagtgtgcctgtcccagagtttgcagatagtgatcctgccaacattgttcatgactttaacaagaaacttacagcctatttagatcttaacctggataagtgctatgtgatccctctgaacacttccattgttatgccacccagaaacctactggagttacttattaacatcaaggctggaacctatttgcctcagtcctatctgattcatgagcacatggttattactgatcgcattgaaaacattgatcacctgggtttctttatttatcgactgtgtcatgacaaggaaacttacaaactgcaacgcagagaaactattaaaggtattcagaaacgtgaagccagcaattgtttcgcaattcggcattttgaaaacaaatttgccgtggaaactttaatttgttcttgaacagtcaagaaaaacattattgaggaaaattaatatcacagcataaccccaccctttacattttgtgcagtgattattttttaaagtcttctttcatgtaagtagcaaacagggctttactatcttttcatctcattaattcaattaaaaccattaccttaaaatttttttctttcgaagtgtggtgtcttttatatttgaattagtaactgtatgaagtcatagataatagtacatgtcaccttaggtagtaggaagaattacaatttctttaaatcatttatctggatttttatgttttattagcattttcaagaagacggattatctagagaataatcatatatatgcatacgtaaaaatggaccacagtgacttatttgtagttgttagttgccctgctacctagtttgttagtgcatttgagcacacattttaattttcctctaattaaaatgtgcagtattttcagtgtcaaatatatttaactatttagagaatgatttccacctttatgttttaatatcctaggcatctgctgtaataatattttagaaaatgtttggaatttaagaaataacttgtgttactaatttgtataacccatatctgtgcaatggaatataaatatcacaaagttgtttaactagactgcgtgttgtttttcccgtataataaaaccaaagaatagtttggttcttcaaatcttaagagaatccacataaaagaagaaactattttttaaaaattcacttctatatatacaatgagtaaaatcacagattttttctttaaataaaaataagtcattttaataactaaaccagattctttgtggatactattaaagtaacatttaagcctcaaccttg

SEQ ID NO: 210876 - DNA, 801 bp, Artificial Sequence
  derived and/or modified sequence
atggtgaaggtgaccttcaacagcgccctggcccagaaggaggccaagaaggatgagcccaagagcggggaggaggccctgatcatccccccagatgctgtggccgtggactgcaaggaccctgatgatgtggtgcctgtgggccagaggcgggcctggtgctggtgcatgtgcttcggcctggccttcatgctggccggggtcatcctgggcggggcctacctgtacaagtactttgccctgcagccagatgatgtgtactactgcggcatcaagtacatcaaggatgatgtgatcctgaatgagcccagcgcagatgccccagctgccctgtaccagaccatcgaggagaacatcaagatctttgaggaggaggaggtggagttcatctctgtgcctgtgcctgagtttgctgacagcgaccctgccaacatcgtgcatgacttcaacaagaagctgacagcctacctggacctgaacctggacaagtgctacgtgatccccctgaacaccagcatcgtgatgccacccaggaacctgctggagctgctgatcaacatcaaggccggcacctacctgccccagagctacctgatccacgagcacatggtgatcacagacagaattgagaacatcgaccacctgggcttcttcatctaccgcctgtgccacgacaaggagacctacaagctgcagaggcgggagaccatcaagggcatccagaagcgggaggccagcaactgctttgccatccgccactttgagaacaagtttgctgtggagaccctcatctgcagctag

SEQ ID NO: 210877 - DNA, 801 bp, Artificial Sequence
  derived and/or modified sequence
atggtgaaggtgaccttcaacagcgccctggcccagaaggaggccaaaaaggatgagcctaaaagtggtgaggaggcattgattatccccccggacgccgtggctgtcgattgcaaagacccagatgatgttgtgcctgtgggacagaggagggcctggtgctggtgtatgtgctttggactggcgtttatgttagctggagtgattctgggaggggcatatctgtacaagtactttgccctccaaccagacgatgtgtactattgcggtatcaaatatatcaaagacgacgtaattctcaacgagccttctgcggatgcgccggccgccctttaccagaccatcgaggagaacataaagatttttgaagaggaagaggtcgagttcatttcggtccctgtccctgagtttgcagatagcgaccccgcaaatatcgtgcatgatttcaacaagaagttgaccgcatatctggacctaaatctggataagtgctacgtgattcccctgaataccagcatagttatgcctccacgaaacctgcttgagttgctaataaatatcaaggctggcacttatttaccacaatcttatcttattcacgagcatatggtgattactgatcgcatcgagaatatcgaccatctcggattcttcatttatagactttgtcacgacaaggaaacctacaagctgcaacgtagggaaactatcaagggaatccaaaagcgagaggcctcaaactgcttcgctatccgtcatttcgagaataagttcgccgtggagactctgatttgttcttag

SEQ ID NO: 210878 - DNA, 801 bp, Artificial Sequence
  derived and/or modified sequence
atggttaaggtcacttttaattctgcattggcacaaaaggaggccaagaaggacgaacccaagagtggcgaagaagccctgataattccacctgatgccgtggcggttgattgcaaggatccagatgatgtagtgcctgttgggcagcggagagcctggtgttggtgcatgtgtttcggacttgcgttcatgcttgctggtgttatcctgggtggagcctacctgtataagtatttcgccctgcagcccgatgacgtatattattgtggcatcaaatatattaaggacgatgtgattcttaacgagcccagcgcagatgcccctgccgcactgtaccagactatagaggagaatattaaaatttttgaagaggaagaggtggaatttatcagcgttcccgtacccgaatttgccgattccgatcccgcaaacatagttcacgatttcaacaagaagctgaccgcttacctggatctgaatttagataaatgctatgttatcccactgaacacatccattgtcatgcctcccagaaacctgttagaacttcttataaacataaaagctggcacctatcttccccagtcctatctgatccacgagcatatggtgataacagacagaattgaaaacattgatcatctggggttcttcatctaccgtctgtgccatgacaaggagacttataaactccagaggagagaaaccattaaagggatccagaagagggaggcttccaattgctttgctatcagacattttgaaaacaagtttgcagtcgagaccctaatctgctcctag

SEQ ID NO: 210879 - DNA, 801 bp, Artificial Sequence
  derived and/or modified sequence
atggtgaaggtgaccttcaacagcgccctggcccagaaggaggccaagaaggacgagcccaagagcggcgaggaggccctgatcatcccccccgacgccgtggccgtggactgcaaggaccccgacgacgtggtgcccgtgggccagagaagagcctggtgctggtgcatgtgcttcggcctggccttcatgctggccggcgtgatcctgggcggcgcctacctgtacaagtacttcgccctgcagcccgacgacgtgtactactgcggcatcaagtacatcaaggacgacgtgatcctgaacgagcccagcgccgacgcccccgccgccctgtaccagaccatcgaggagaacatcaagatcttcgaggaggaggaggtggagttcatcagcgtgcccgtgcccgagttcgccgacagcgaccccgccaacatcgtgcacgacttcaacaagaagctgaccgcctacctggacctgaacctggacaagtgctacgtgatccccctgaacaccagcatcgtgatgccccccagaaacctgctggagctgctgatcaacatcaaggccggcacctacctgccccagagctacctgatccacgagcacatggtgatcaccgacagaatcgagaacatcgaccacctgggcttcttcatctacagactgtgccacgacaaggagacctacaagctgcagagaagagagaccatcaagggcatccagaagagagaggccagcaactgcttcgccatcagacacttcgagaacaagttcgccgtggagaccctgatctgcagctag

SEQ ID NO: 210880 - protein, 473 aa, Artificial Sequence
  derived and/or modified sequence
MTVTRTHHFKEGSLRAPAIPLHSAAAELASNHPRGPEANLEVRPKESWNHADFVHCEDTESVPGKPSVNADEEVGGPQICRVCGDKATGYHFNVMTCEGCKGFFRRAMKRNARLRCPFRKGACEITRKTRRQCQACRLRKCLESGMKKEMIMSDEAVEERRALIKRKKSERTGTQPLGVQGLTEEQRMMIRELMDAQMKTFDTTFSHFKNFRLPGVLSSGCELPESLQAPSREEAAKWSQVRKDLCSLKVSLQLRGEDGSVWNYKPPADSGGKEIFSLLPHMADMSTYMFKGIISFAKVISYFRDLPIEDQISLLKGAAFELCQLRFNTVFNAETGTWECGRLSYCLEDTAGGFQQLLLEPMLKFHYMLKKLQLHEEEYVLMQAISLFSPDRPGVLQHRVVDQLQEQFAITLKSYIECNRPQPAHRFLFLKIMAMLTELRSINAQHTQRLLRIQDIHPFATPLMQELFGITGS

SEQ ID NO: 210881 - protein, 434 aa, Artificial Sequence
  derived and/or modified sequence
LEVRPKESWNHADFVHCEDTESVPGKPSVNADEEVGGPQICRVCGDKATGYHFNVMTCEGCKGFFRRAMKRNARLRCPFRKGACEITRKTRRQCQACRLRKCLESGMKKEMIMSDEAVEERRALIKRKKSERTGTQPLGVQGLTEEQRMMIRELMDAQMKTFDTTFSHFKNFRLPGVLSSGCELPESLQAPSREEAAKWSQVRKDLCSLKVSLQLRGEDGSVWNYKPPADSGGKEIFSLLPHMADMSTYMFKGIISFAKVISYFRDLPIEDQISLLKGAAFELCQLRFNTVFNAETGTWECGRLSYCLEDTAGGFQQLLLEPMLKFHYMLKKLQLHEEEYVLMQAISLFSPDRPGVLQHRVVDQLQEQFAITLKSYIECNRPQPAHRFLFLKIMAMLTELRSINAQHTQRLLRIQDIHPFATPLMQELFGITGS

SEQ ID NO: 210882 - DNA, 2772 bp, Artificial Sequence
  derived and/or modified sequence
ggcctgctgggttagtgctggcagccccctgaggccaaggacagcagcatgacagtcaccaggactcaccacttcaaggaggggtccctcagagcacctgccatacccctgcacagtgctgcggctgagttggcttcaaaccatccaagaggcccagaagcaaacctggaggtgagacccaaagaaagctggaaccatgctgactttgtacactgtgaggacacagagtctgttcctggaaagcccagtgtcaacgcagatgaggaagtcggaggtccccaaatctgccgtgtatgtggggacaaggccactggctatcacttcaatgtcatgacatgtgaaggatgcaagggctttttcaggagggccatgaaacgcaacgcccggctgaggtgccccttccggaagggcgcctgcgagatcacccggaagacccggcgacagtgccaggcctgccgcctgcgcaagtgcctggagagcggcatgaagaaggagatgatcatgtccgacgaggccgtggaggagaggcgggccttgatcaagcggaagaaaagtgaacggacagggactcagccactgggagtgcaggggctgacagaggagcagcggatgatgatcagggagctgatggacgctcagatgaaaacctttgacactaccttctcccatttcaagaatttccggctgccaggggtgcttagcagtggctgcgagttgccagagtctctgcaggccccatcgagggaagaagctgccaagtggagccaggtccggaaagatctgtgctctttgaaggtctctctgcagctgcggggggaggatggcagtgtctggaactacaaacccccagccgacagtggcgggaaagagatcttctccctgctgccccacatggctgacatgtcaacctacatgttcaaaggcatcatcagctttgccaaagtcatctcctacttcagggacttgcccatcgaggaccagatctccctgctgaagggggccgctttcgagctgtgtcaactgagattcaacacagtgttcaacgcggagactggaacctgggagtgtggccggctgtcctactgcttggaagacactgcaggtggcttccagcaacttctactggagcccatgctgaaattccactacatgctgaagaagctgcagctgcatgaggaggagtatgtgctgatgcaggccatctccctcttctccccagaccgcccaggtgtgctgcagcaccgcgtggtggaccagctgcaggagcaattcgccattactctgaagtcctacattgaatgcaatcggccccagcctgctcataggttcttgttcctgaagatcatggctatgctcaccgagctccgcagcatcaatgctcagcacacccagcggctgctgcgcatccaggacatacacccctttgctacgcccctcatgcaggagttgttcggcatcacaggtagctgagcggctgcccttgggtgacacctccgagaggcagccagacccagagccctctgagccgccactcccgggccaagacagatggacactgccaagagccgacaatgccctgctggcctgtctccctagggaattcctgctatgacagctggctagcattcctcaggaaggacatgggtgccccccacccccagttcagtctgtagggagtgaagccacagactcttacgtggagagtgcactgacctgtaggtcaggaccatcagagaggcaaggttgccctttccttttaaaaggccctgtggtctggggagaaatccctcagatcccactaaagtgtcaaggtgtggaagggaccaagcgaccaaggatgggccatctggggtctatgcccacatacccacgtttgttcgcttcctgagtcttttcattgctacctctaatagtcctgtctcccacttcccactcgttcccctcctcttccgagctgctttgtgggctccaggcctgtactcatcggcaggcgcatgagtatctgtgggagtcctctagagagatgagaagccaggaggcctgcaccaaatgtcagaagcttggcatgacctcattccggccacatcattctgtgtctctgcatccatttgaacacattattaagcaccgataataggtagcctgctgtggggtatacagcattgactcagatatagatcctgagctcacagagtttatagttaaaaaaacaaacagaaacacaaacaatttggatcaaaaggagaaatgataagtgacaaaagcagcacaaggaatttccctgtgtggatgctgagctgtgatggcgggcactgggtacccaagtgaaggttcccgaggacatgagtctgtaggagcaagggcacaaactgcagctgtgagtgcgtgtgtgtgatttggtgtaggtaggtctgtttgccacttgatggggcctgggtttgttcctggggctggaatgctgggtatgctctgtgacaaggctacgctgacaatcagttaaacacaccggagaagaaccatttacatgcaccttatatttctgtgtacacatctattctcaaagctaaagggtatgaaagtgcctgccttgtttatagccacttgtgagtaaaaatttttttgcattttcacaaattatactttatataaggcattccacacctaagaactagttttgggaaatgtagccctgggtttaatgtcaaatcaaggcaaaaggaattaaataatgtacttttggctaaaaaaaaaaaaaaaaaaaaaaaaaaaaaa

SEQ ID NO: 210883 - DNA, 4446 bp, Artificial Sequence
  derived and/or modified sequence
ttcttaaccctttccagctttcccaccctctttggctttagccatggccttctgatctgtgtttctcaggggacctgcaggccccagatatagccccatgctgtcctcctaccccagagcacactgttcaggctacttccactggtactgaaatccagtatttcacttactctttttctttccaatatcctcatgacattcaatatttcacttactctaggtcctccctgcctaaggcccaagtcaactttctgtccagtgggatttgtaatccaatacctcctagccctagcagaatcccatgtggataatcagaaatgtgactggaaaaaggacagagctctatggctgtgggtcccagtccccactgctggcagtaagtccccagcagtgagctgtgtaagcaccttacattctgcgcttggttgaaaacagcaaggcaagcatccacttgagaaatgtcaacccctaggaaatcccagcctcaagtctttctcatcccttgggaagtgcaaattggatagagaagaaaccaattaaaaacaaaacaaacaaatcatacttagatattctggcttttctcaccagggctggattaaagcatgtacttcaaaataataacaacttaagtcaataaataaatgtaaggaagtccaaatgttcacctgaagacaactgtggtcattttttggcaatcccaggttctcttttctacctgtttgctcaatcgtggtctccctctccctctcttgttggggcccatgcccctgctttactgttgccagaggcttgtacttgtttgccttttaggtaggagcagttacttccactcccctcacctgccataaagcatctttataaacaaagcaagtagaagaaacacatcctggtatccaccacattcggcttttgttgattctgttcacttgggagcacctgctgctagggaataagaaggttgaggctgaagagtgaggactcttcagctcccctctggcaggacccgggagaggaaagagccctcagctggtccatcctccccactcctggtcagccttctgttctgagatcaaagtggtggggtcacattctcgagaactgtgctcagccccctcatctcacaccctttccctctccctgtgtgcctgcccccctcttacataaccatgctggtgattggcaccgtcataaatcaatactttgctcactttcacatcaagtaacactatccagggaggtggtttcaacaaaggaggaagtataaggagatctaggttcaaattaatgttgcccctagtggtaaaggacagagaccctcagactgatgaaatgcactcagaattacttagacaaagcggatatttgccactctcttccccttttcctgtgtttttgtagtgaagagacctgaaagaaaaaagtagggagaacataatgagaacaaatacggtaatctcttcatttgctagttcaagtgctggacttgggacttaggaggggcaatggagccgcttagtgcctacatctgacttggactgaaatataggtgagagacaagattgtctcatatccggggaaatcataacctatgactaggacgggaagaggaagcactgcctttacttcagtgggaatctcggcctcagcctgcaagccaagtgttcacagtgagaaaagcaagagaataagctaatactcctgtcctgaacaaggcagcggctccttggtaaagctactccttgatcgatcctttgcaccggattgttcaaagtggaccccaggggagaagtcggagcaaagaacttaccaccaagcagtccaagaggcccagaagcaaacctggaggtgagacccaaagaaagctggaaccatgctgactttgtacactgtgaggacacagagtctgttcctggaaagcccagtgtcaacgcagatgaggaagtcggaggtccccaaatctgccgtgtatgtggggacaaggccactggctatcacttcaatgtcatgacatgtgaaggatgcaagggctttttcaggagggccatgaaacgcaacgcccggctgaggtgccccttccggaagggcgcctgcgagatcacccggaagacccggcgacagtgccaggcctgccgcctgcgcaagtgcctggagagcggcatgaagaaggagatgatcatgtccgacgaggccgtggaggagaggcgggccttgatcaagcggaagaaaagtgaacggacagggactcagccactgggagtgcaggggctgacagaggagcagcggatgatgatcagggagctgatggacgctcagatgaaaacctttgacactaccttctcccatttcaagaatttccggctgccaggggtgcttagcagtggctgcgagttgccagagtctctgcaggccccatcgagggaagaagctgccaagtggagccaggtccggaaagatctgtgctctttgaaggtctctctgcagctgcggggggaggatggcagtgtctggaactacaaacccccagccgacagtggcgggaaagagatcttctccctgctgccccacatggctgacatgtcaacctacatgttcaaaggcatcatcagctttgccaaagtcatctcctacttcagggacttgcccatcgaggaccagatctccctgctgaagggggccgctttcgagctgtgtcaactgagattcaacacagtgttcaacgcggagactggaacctgggagtgtggccggctgtcctactgcttggaagacactgcaggtggcttccagcaacttctactggagcccatgctgaaattccactacatgctgaagaagctgcagctgcatgaggaggagtatgtgctgatgcaggccatctccctcttctccccagaccgcccaggtgtgctgcagcaccgcgtggtggaccagctgcaggagcaattcgccattactctgaagtcctacattgaatgcaatcggccccagcctgctcataggttcttgttcctgaagatcatggctatgctcaccgagctccgcagcatcaatgctcagcacacccagcggctgctgcgcatccaggacatacacccctttgctacgcccctcatgcaggagttgttcggcatcacaggtagctgagcggctgcccttgggtgacacctccgagaggcagccagacccagagccctctgagccgccactcccgggccaagacagatggacactgccaagagccgacaatgccctgctggcctgtctccctagggaattcctgctatgacagctggctagcattcctcaggaaggacatgggtgccccccacccccagttcagtctgtagggagtgaagccacagactcttacgtggagagtgcactgacctgtaggtcaggaccatcagagaggcaaggttgccctttccttttaaaaggccctgtggtctggggagaaatccctcagatcccactaaagtgtcaaggtgtggaagggaccaagcgaccaaggatgggccatctggggtctatgcccacatacccacgtttgttcgcttcctgagtcttttcattgctacctctaatagtcctgtctcccacttcccactcgttcccctcctcttccgagctgctttgtgggctccaggcctgtactcatcggcaggcgcatgagtatctgtgggagtcctctagagagatgagaagccaggaggcctgcaccaaatgtcagaagcttggcatgacctcattccggccacatcattctgtgtctctgcatccatttgaacacattattaagcaccgataataggtagcctgctgtggggtatacagcattgactcagatatagatcctgagctcacagagtttatagttaaaaaaacaaacagaaacacaaacaatttggatcaaaaggagaaatgataagtgacaaaagcagcacaaggaatttccctgtgtggatgctgagctgtgatggcgggcactgggtacccaagtgaaggttcccgaggacatgagtctgtaggagcaagggcacaaactgcagctgtgagtgcgtgtgtgtgatttggtgtaggtaggtctgtttgccacttgatggggcctgggtttgttcctggggctggaatgctgggtatgctctgtgacaaggctacgctgacaatcagttaaacacaccggagaagaaccatttacatgcaccttatatttctgtgtacacatctattctcaaagctaaagggtatgaaagtgcctgccttgtttatagccacttgtgagtaaaaatttttttgcattttcacaaattatactttatataaggcattccacacctaagaactagttttgggaaatgtagccctgggtttaatgtcaaatcaaggcaaaaggaattaaataatgtacttttggctaaaaaaaaaaaaaaaaaaaaaaaaaaaaaa

SEQ ID NO: 210884 - DNA, 1422 bp, Artificial Sequence
  derived and/or modified sequence
atgaccgtgacacggacgcaccactttaaggagggcagccttagagcaccagccatccccctccactcagccgctgcggaactcgcttcgaaccaccctagagggcctgaagcgaatttggaggtcaggccaaaggaaagctggaaccacgcagacttcgtgcactgcgaggataccgaatctgtgcccggtaaacctagcgtgaacgccgatgaggaagttggagggccgcaaatatgtagggtgtgtggcgataaagctacagggtatcatttcaatgtaatgacctgcgaaggatgtaagggctttttccggagagctatgaagcggaacgctcgcttgagatgccccttcagaaaaggcgcttgcgagattactcgcaagacaaggcgtcagtgtcaggcctgtcggctcagaaagtgcctggagagtggaatgaaaaaagagatgataatgtccgatgaggccgtggaagaacgcagggcacttattaaacgcaaaaagtcagaaagaaccggaacgcaacccctgggtgtgcagggtctgactgaggaacagaggatgatgatccgagagttaatggacgcccagatgaagacctttgatactacctttagtcactttaaaaattttcggctgcccggagttctgtcatccggctgcgaactccccgaatcacttcaggccccatctcgcgaagaagcagctaaatggagtcaggtgcggaaagacttgtgttctcttaaagtgtccctgcagctgcgaggagaggatggaagcgtttggaactacaaaccacccgccgattccggcgggaaggagattttttctctcctgccacacatggccgacatgagtacttatatgttcaagggcataatcagtttcgccaaggtgatcagctactttcgcgatctccctattgaagaccaaatatccctactcaagggggccgcctttgaactgtgccagctgaggttcaatactgttttcaatgcagaaaccgggacatgggagtgcggccggctgtcttactgtctcgaagatacagctggcggattccagcaactcctcctggagccaatgctgaaattccattacatgctgaagaaactgcagcttcacgaggaggagtatgtcctcatgcaagccataagtctatttagccctgatagaccaggcgtccttcagcaccgagttgttgatcagttgcaggagcaatttgccattactctgaagagctatattgaatgtaaccggccgcagcccgcccacaggtttttgttcttaaaaataatggcaatgctcaccgagcttagatcaataaatgctcagcatacccagagactactcaggatacaggacatccacccctttgctaccccgctgatgcaagaactgtttgggattaccgggtcttag

SEQ ID NO: 210885 - DNA, 1305 bp, Artificial Sequence
  derived and/or modified sequence
ctggaggtgcgtcccaaagaatcctggaaccatgctgacttcgttcattgcgaggacacagagtctgttcctggcaaaccttcagtgaacgctgacgaagaggtgggtggccctcagatctgcagagtgtgcggcgacaaggctacaggatatcatttcaacgttatgacctgcgaagggtgcaagggtttttttcggcgagccatgaagcgcaacgcaagactccggtgtcccttccgcaaaggtgcctgtgaaatcacccgaaagacccggcgccagtgccaggcttgccggcttcggaagtgtctcgagtccgggatgaagaaagagatgattatgtcggacgaggctgtcgaggaacggagggcacttattaaaaggaagaaatctgagcggacaggaacccaaccactcggcgtgcagggcctaaccgaggaacagaggatgatgatcagagagctgatggacgcccagatgaagactttcgatacaaccttctcacattttaaaaacttcaggcttccgggtgtactgtcaagcggctgcgagctgcctgaatccttgcaggccccctctcgggaggaagctgcaaaatggagccaggtgcgtaaagacctatgctcattgaaggtgtcgctgcaactacggggtgaggacggatctgtttggaactacaaaccgcccgcggactcgggcggcaaggagatttttagtctgctacctcacatggccgacatgagcacttacatgttcaaaggaattattagctttgcaaaagttatcagttacttccgcgatttgcccattgaggatcagatctcactgttaaaaggggccgcttttgagctatgtcagcttcgtttcaatacagtcttcaatgctgagaccggcacatgggaatgtggtcgcctgagctattgcctagaagacacggccgggggttttcaacagctgttgctcgagccaatgctcaaatttcactacatgctgaagaaattacagctgcacgaagaagagtacgtcttgatgcaggccatatcactgttctcccctgaccggccaggggtgctccagcatcgagttgtggaccagctgcaggagcagttcgctattacattgaagtcttatatcgagtgtaaccggccgcaaccagcccaccggttcctgttcctgaagattatggccatgctgacagagctccggagcatcaatgcgcaacacacccagagactgctgaggatccaagatatccaccccttcgccactcccctgatgcaggaactgttcgggattaccggctcctag

SEQ ID NO: 210886 - DNA, 1422 bp, Artificial Sequence
  derived and/or modified sequence
atgacagtgaccaggacccaccacttcaaggagggcagcctgcgggccccagccatccccctgcacagcgctgctgctgagctggccagcaaccacccccggggccctgaggccaacctggaggtgcggcccaaggagagctggaaccacgccgactttgtgcactgtgaggacacagaatctgtgcctgggaagcccagcgtgaatgctgatgaggaggtgggcggcccccagatctgccgggtgtgtggggacaaggccaccggctaccacttcaacgtgatgacctgtgagggctgcaagggcttcttcagaagagccatgaagagaaatgcccggctgcgctgccccttcaggaagggggcctgtgagatcaccaggaagacccggcggcagtgccaggcctgccgcctgaggaagtgcctggagagcggcatgaagaaggagatgatcatgtctgatgaggccgtggaggagcggcgggccctgatcaagaggaagaagtctgagaggacaggcacccagcccctgggcgtgcagggcctgacagaggagcagaggatgatgatccgggagctgatggatgcccagatgaagacctttgacaccaccttcagccacttcaagaacttccggctgcccggggtgctgagcagcggctgtgagctgcctgagagcctgcaggcccccagccgggaggaggccgccaagtggagccaggtgaggaaggacctgtgcagcctgaaggtgtccctgcagctgcggggagaagatggctctgtgtggaactacaagcccccagctgacagcggcggcaaggagatcttcagcctgctgccccacatggctgacatgagcacctacatgttcaagggcatcatcagctttgccaaggtgatctcctacttccgggacctgcccatcgaggaccagatcagcctgctgaagggggccgcctttgagctgtgccagctgcgcttcaacacagtgttcaatgctgagaccggcacctgggagtgtggccgcctgagctactgcctggaggacacagctgggggcttccagcagctgctgctggagcccatgctgaagttccactacatgctgaagaagctgcagctgcacgaggaggagtatgtgctgatgcaggccatcagcctcttctccccagacaggcctggggtgctgcagcaccgggtggtggaccagctgcaggagcagtttgccatcaccctgaagagctacatcgagtgcaaccggccccagcctgcccaccgcttcctgttcctgaagatcatggccatgctgacagagctgcggagcatcaatgcccagcacacccagaggctgctgcgcatccaggacatccacccctttgccacccccctgatgcaggagctgtttggcatcaccggcagctag

SEQ ID NO: 210887 - DNA, 1305 bp, Artificial Sequence
  derived and/or modified sequence
ctggaggtgcggcccaaggagagctggaaccacgccgactttgtgcactgtgaggacacagagagcgtgcctgggaagcccagcgtgaatgctgatgaggaggtgggcggcccccagatctgccgggtgtgtggggacaaggccaccggctaccacttcaacgtgatgacctgtgagggctgcaagggcttcttccggcgggccatgaagagaaatgcccggctgcgctgccccttcagaaaaggagcctgtgagatcaccaggaagacccggcggcagtgccaggcctgccgcctgaggaagtgcctggagagcggcatgaagaaggagatgatcatgtctgatgaagctgtggaggagcggcgggccctgatcaagaggaagaagtctgagaggacaggcacccagcccctgggcgtgcagggcctgacagaggagcagaggatgatgatccgggagctgatggatgcccagatgaagacctttgacaccaccttcagccacttcaagaacttccggctgcccggggtgctgagcagcggctgtgagctgcctgagagcctgcaggcccccagccgggaggaggccgccaagtggagccaggtgaggaaggacctgtgcagcctgaaggtgtccctgcagctgcggggggaggatggctctgtgtggaactacaagcccccagctgacagcggcggcaaggagatcttcagcctgctgccccacatggctgacatgagcacctacatgttcaagggcatcatcagctttgccaaggtgatctcctacttccgggacctgcccatcgaggaccagatcagcctgctgaagggagctgcctttgagctgtgccagctgcgcttcaacacagtgttcaatgctgagaccggcacctgggagtgtggccgcctgagctactgcctggaggacacagctgggggcttccagcagctgctgctggagcccatgctgaagttccactacatgctgaagaagctgcagctgcacgaggaggagtatgtgctgatgcaggccatcagcctcttctccccagacaggcctggggtgctgcagcaccgggtggtggaccagctgcaggagcagtttgccatcaccctgaagagctacatcgagtgcaaccggccccagcctgcccaccgcttcctgttcctgaagatcatggccatgctgacagagctgcggagcatcaatgcccagcacacccagaggctgctgcgcatccaggacatccacccctttgccacccccctgatgcaggagctgtttggcatcaccggcagctag

SEQ ID NO: 210888 - DNA, 1422 bp, Artificial Sequence
  derived and/or modified sequence
atgaccgtgacccggacccaccacttcaaggagggcagcctgcgggctcctgcgatcccactgcatagcgccgcagccgaattggcttctaaccatccccgggggccagaggccaatctggaggtgaggcctaaggaatcgtggaatcatgcagattttgtgcactgcgaggatacagagtctgtgcccggcaaaccttcggtcaatgcagatgaggaagtgggagggccgcagatttgtcgggtgtgcggtgacaaagctaccggataccacttcaatgttatgacctgtgaagggtgcaaaggcttttttagaagggcaatgaagcgcaacgctaggcttagatgcccgttcagaaagggggcatgtgagatcaccagaaagactaggaggcaatgtcaggcttgtagacttcggaaatgtctagaatctggaatgaagaaagagatgataatgtctgacgaggcagtcgaggagcggcgcgccctaatcaagcgaaaaaaatccgagcgaacaggaactcagcccctaggcgtgcagggattgacagaagagcagcggatgatgatacgagaactcatggacgcgcagatgaagacctttgacacaactttctctcacttcaagaactttcgactgccgggagttcttagctctgggtgtgaactgcccgagtcccttcaggctccttcgcgtgaggaggccgctaaatggtctcaggtcagaaaggatctgtgttctctgaaagtctctctgcagctcagaggagaggatggctccgtctggaactataaaccacccgcggactcaggaggcaaagaaatcttttctctgctgccacacatggcagatatgagcacgtacatgtttaaaggcatcatttcattcgccaaagtgattagctatttcagagacttacctattgaagatcagatcagtctgctgaaaggtgctgccttcgagctgtgccagctgaggttcaatactgtcttcaatgctgagactggaacttgggagtgtggaagactgagctattgcctagaggatactgccgggggcttccagcagctgcttttggagccaatgctcaagtttcactacatgctgaagaaattgcagcttcatgaagaagagtatgtcctgatgcaggccatctctctgttctctcccgatcggccaggcgtgctccagcatcgcgtggtcgaccagttgcaagagcagttcgctatcaccttaaaatcttacatcgagtgtaacaggccccagccagcccatagattcctgttcctgaaaataatggcaatgctcaccgagctcagaagtataaacgctcagcatacccaacgcttactcaggatacaggatatacaccccttcgctaccccactcatgcaagaactgtttggaatcacaggaagttag

SEQ ID NO: 210889 - DNA, 1305 bp, Artificial Sequence
  derived and/or modified sequence
ctggaggtgcggcccaaggagagctggaaccacgccgacttcgtgcactgcgaggacaccgagtccgtgcccggcaagccctccgtaaatgccgacgaagaagtggggggaccccaaatctgtagagtctgcggcgacaaggccaccggctatcatttcaatgtgatgacttgcgaaggatgcaaggggttcttccggcgggccatgaagagaaatgctcgactccgttgtcccttccggaagggtgcctgcgaaattactagaaagacacgccgccagtgtcaggcctgtcgactaagaaagtgcctcgagtccggtatgaaaaaggagatgattatgtccgatgaggccgttgaggagaggcgggctctgataaagaggaagaaatctgagcggacggggactcagccattaggcgtgcaaggcttaactgaggagcaacggatgatgatccgcgagctcatggacgctcagatgaagacctttgataccaccttcagccacttcaaaaattttcggctgcccggagtcctgtcctccggttgcgagctgcccgaatccctccaggccccatcccgggaggaggcagcaaagtggtctcaggtacgtaaggacctgtgtagtctaaaggtgtccctgcagcttcgaggggaggacgggtccgtgtggaactacaagccccctgctgattcaggcgggaaagagattttctccctactgcctcacatggctgacatgtccacttacatgtttaagggaattatctcctttgccaaggttatcagttactttcgggatctgcccatcgaggaccagatcagccttctcaaaggtgcggccttcgagctttgccagctgaggtttaacaccgtcttcaacgccgaaacaggaacctgggaatgtggaaggctgagttattgcctggaggacacagctggcggattccaacagcttctgctggagcctatgcttaaatttcattatatgcttaaaaaactgcaactgcatgaagaagagtacgtcttaatgcaagcgatttccctcttctccccagacagacccggcgtgttacagcacagggtggtggatcagctgcaggagcagttcgccatcacgctcaagagctacatagaatgtaatcgcccacagcctgctcatagatttctgtttctcaagataatggccatgcttaccgagctgcgctcaataaacgctcaacatacccagcggttgctgaggatccaggacattcacccgtttgccacccccctcatgcaggagctgttcgggattaccgggtcatag

SEQ ID NO: 210890 - DNA, 2743 bp, Artificial Sequence
  derived and/or modified sequence
ggcctgctgggttagtgctggcagccccctgaggccaaggacagcagcatgacagtcaccaggactcaccacttcaaggaggggtccctcagagcacctgccatacccctgcacagtgctgcggctgagttggcttcaaaccatccaagaggcccagaagcaaacctggaggtgagacccaaagaaagctggaaccatgctgactttgtacactgtgaggacacagagtctgttcctggaaagcccagtgtcaacgcagatgaggaagtcggaggtccccaaatctgccgtgtatgtggggacaaggccactggctatcacttcaatgtcatgacatgtgaaggatgcaagggctttttcaggagggccatgaaacgcaacgcccggctgaggtgccccttccggaagggcgcctgcgagatcacccggaagacccggcgacagtgccaggcctgccgcctgcgcaagtgcctggagagcggcatgaagaaggagatgatcatgtccgacgaggccgtggaggagaggcgggccttgatcaagcggaagaaaagtgaacggacagggactcagccactgggagtgcaggggctgacagaggagcagcggatgatgatcagggagctgatggacgctcagatgaaaacctttgacactaccttctcccatttcaagaatttccggctgccaggggtgcttagcagtggctgcgagttgccagagtctctgcaggccccatcgagggaagaagctgccaagtggagccaggtccggaaagatctgtgctctttgaaggtctctctgcagctgcggggggaggatggcagtgtctggaactacaaacccccagccgacagtggcgggaaagagatcttctccctgctgccccacatggctgacatgtcaacctacatgttcaaaggcatcatcagctttgccaaagtcatctcctacttcagggacttgcccatcgaggaccagatctccctgctgaagggggccgctttcgagctgtgtcaactgagattcaacacagtgttcaatgcggagactggaacctgggagtgtggccggctgtcctactgcttggaagacactgcaggtggcttccagcaacttctactggagcccatgctgaaattccactacatgctgaagaagctgcagctgcatgaggaggagtatgtgctgatgcaggccatctccctcttctccccagaccgcccaggtgtgctgcagcaccgcgtggtggaccagctgcaggagcaattcgccattactctgaagtcctacattgaatgcaatcggccccagcctgctcataggttcttgttcctgaagatcatggctatgctcaccgagctccgcagcatcaatgctcagcacacccagcggctgctgcgcatccaggacatacacccctttgctacgcccctcatgcaggagttgttcggcatcacaggtagctgagcggctgcccttgggtgacacctccgagaggcagccagacccagagccctctgagccgccactcccgggccaagacagatggacactgccaagagccgacaatgccctgctggcctgtctccctagggaattcctgctatgacagctggctagcattcctcaggaaggacatgggtgccccccacccccagttcagtctgtagggagtgaagccacagactcttacgtggagagtgcactgacctgtaggtcaggaccatcagagaggcaaggttgccctttccttttaaaaggccctgtggtctggggagaaatccctcagatcccactaaagtgtcaaggtgtggaagggaccaagcgaccaaggatgggccatctggggtctatgcccacatacccacgtttgttcgcttcctgagtcttttcattgctacctctaatagtcctgtctcccacttcccactcgttcccctcctcttccgagctgctttgtgggctccaggcctgtactcatcggcaggcgcatgagtatctgtgggagtcctctagagagatgagaagccaggaggcctgcaccaaatgtcagaagcttggcatgacctcattccggccacatcattctgtgtctctgcatccatttgaacacattattaagcaccgataataggtagcctgctgtggggtatacagcattgactcagatatagatcctgagctcacagagtttatagttaaaaaaacaaacagaaacacaaacgatttggatcaaaaggagaaatgataagtgacaaaagcagcacaaggaatttccctgtgtggatgctgagctgtgatggcgggcactgggtacccaagtgaaggttcccaaggacatgagtctgtaggagcaagggcacaaactgcagctgtgagtgcgtgtgtgtgatttggtgtaggtaggtctgtttgccacttgatggggcctgggtttgttcctggggctggaatgctgggtatgctctgtgacaaggctacgctgacaatcagttaaacacaccggagaagaaccatttacatgcaccttatatttctgtgtacacatctattctcaaagctaaagggtatgaaagtgcctgccttgtttatagccacttgtgagtaaaaatttttttgcattttcacaaattatactttatataaggcattccacacctaagaactagttttgggaaatgtagccctgggtttaatgtcaaatcaaggcaaaaggaattaaataatgtacttttggcta

SEQ ID NO: 210891 - DNA, 4417 bp, Artificial Sequence
  derived and/or modified sequence
ttcttaaccctttccagctttcccaccctctttggctttagccatggccttctgatctgtgtttctcaggggacctgcaggccccagatatagccccatgctgtcctcctaccccagagcacactgttcaggctacttccactggtactgaaatccagtatttcacttactctttttctttccaatatcctcatgacattcaatatttcacttactctaggtcctccctgcctaaggcccaagtcaactttctgtccagtgggatttgtaatccaatacctcctagccctagcagaatcccatgtggataatcagaaatgtgactggaaaaaggacagagctctatggctgtgggtcccagtccccactgctggcagtaagtccccagcagtgagctgtgtaagcaccttacattctgcgcttggttgaaaacagcaaggcaagcatccacttgagaaatgtcaacccctaggaaatcccagcctcaagtctttctcatcccttgggaagtgcaaattggatagagaagaaaccaattaaaaacaaaacaaacaaatcatacttagatattctggcttttctcaccagggctggattaaagcatgtacttcaaaataataacaacttaagtcaataaataaatgtaaggaagtccaaatgttcacctgaagacaactgtggtcattttttggcaatcccaggttctcttttctacctgtttgctcaatcgtggtctccctctccctctcttgttggggcccatgcccctgctttactgttgccagaggcttgtacttgtttgccttttaggtaggagcagttacttccactcccctcacctgccataaagcatctttataaacaaagcaagtagaagaaacacatcctggtatccaccacattcggcttttgttgattctgttcacttgggagcacctgctgctagggaataagaaggttgaggctgaagagtgaggactcttcagctcccctctggcaggacccgggagaggaaagagccctcagctggtccatcctccccactcctggtcagccttctgttctgagatcaaagtggtggggtcacattctcgagaactgtgctcagccccctcatctcacaccctttccctctccctgtgtgcctgcccccctcttacataaccatgctggtgattggcaccgtcataaatcaatactttgctcactttcacatcaagtaacactatccagggaggtggtttcaacaaaggaggaagtataaggagatctaggttcaaattaatgttgcccctagtggtaaaggacagagaccctcagactgatgaaatgcactcagaattacttagacaaagcggatatttgccactctcttccccttttcctgtgtttttgtagtgaagagacctgaaagaaaaaagtagggagaacataatgagaacaaatacggtaatctcttcatttgctagttcaagtgctggacttgggacttaggaggggcaatggagccgcttagtgcctacatctgacttggactgaaatataggtgagagacaagattgtctcatatccggggaaatcataacctatgactaggacgggaagaggaagcactgcctttacttcagtgggaatctcggcctcagcctgcaagccaagtgttcacagtgagaaaagcaagagaataagctaatactcctgtcctgaacaaggcagcggctccttggtaaagctactccttgatcgatcctttgcaccggattgttcaaagtggaccccaggggagaagtcggagcaaagaacttaccaccaagcagtccaagaggcccagaagcaaacctggaggtgagacccaaagaaagctggaaccatgctgactttgtacactgtgaggacacagagtctgttcctggaaagcccagtgtcaacgcagatgaggaagtcggaggtccccaaatctgccgtgtatgtggggacaaggccactggctatcacttcaatgtcatgacatgtgaaggatgcaagggctttttcaggagggccatgaaacgcaacgcccggctgaggtgccccttccggaagggcgcctgcgagatcacccggaagacccggcgacagtgccaggcctgccgcctgcgcaagtgcctggagagcggcatgaagaaggagatgatcatgtccgacgaggccgtggaggagaggcgggccttgatcaagcggaagaaaagtgaacggacagggactcagccactgggagtgcaggggctgacagaggagcagcggatgatgatcagggagctgatggacgctcagatgaaaacctttgacactaccttctcccatttcaagaatttccggctgccaggggtgcttagcagtggctgcgagttgccagagtctctgcaggccccatcgagggaagaagctgccaagtggagccaggtccggaaagatctgtgctctttgaaggtctctctgcagctgcggggggaggatggcagtgtctggaactacaaacccccagccgacagtggcgggaaagagatcttctccctgctgccccacatggctgacatgtcaacctacatgttcaaaggcatcatcagctttgccaaagtcatctcctacttcagggacttgcccatcgaggaccagatctccctgctgaagggggccgctttcgagctgtgtcaactgagattcaacacagtgttcaatgcggagactggaacctgggagtgtggccggctgtcctactgcttggaagacactgcaggtggcttccagcaacttctactggagcccatgctgaaattccactacatgctgaagaagctgcagctgcatgaggaggagtatgtgctgatgcaggccatctccctcttctccccagaccgcccaggtgtgctgcagcaccgcgtggtggaccagctgcaggagcaattcgccattactctgaagtcctacattgaatgcaatcggccccagcctgctcataggttcttgttcctgaagatcatggctatgctcaccgagctccgcagcatcaatgctcagcacacccagcggctgctgcgcatccaggacatacacccctttgctacgcccctcatgcaggagttgttcggcatcacaggtagctgagcggctgcccttgggtgacacctccgagaggcagccagacccagagccctctgagccgccactcccgggccaagacagatggacactgccaagagccgacaatgccctgctggcctgtctccctagggaattcctgctatgacagctggctagcattcctcaggaaggacatgggtgccccccacccccagttcagtctgtagggagtgaagccacagactcttacgtggagagtgcactgacctgtaggtcaggaccatcagagaggcaaggttgccctttccttttaaaaggccctgtggtctggggagaaatccctcagatcccactaaagtgtcaaggtgtggaagggaccaagcgaccaaggatgggccatctggggtctatgcccacatacccacgtttgttcgcttcctgagtcttttcattgctacctctaatagtcctgtctcccacttcccactcgttcccctcctcttccgagctgctttgtgggctccaggcctgtactcatcggcaggcgcatgagtatctgtgggagtcctctagagagatgagaagccaggaggcctgcaccaaatgtcagaagcttggcatgacctcattccggccacatcattctgtgtctctgcatccatttgaacacattattaagcaccgataataggtagcctgctgtggggtatacagcattgactcagatatagatcctgagctcacagagtttatagttaaaaaaacaaacagaaacacaaacgatttggatcaaaaggagaaatgataagtgacaaaagcagcacaaggaatttccctgtgtggatgctgagctgtgatggcgggcactgggtacccaagtgaaggttcccaaggacatgagtctgtaggagcaagggcacaaactgcagctgtgagtgcgtgtgtgtgatttggtgtaggtaggtctgtttgccacttgatggggcctgggtttgttcctggggctggaatgctgggtatgctctgtgacaaggctacgctgacaatcagttaaacacaccggagaagaaccatttacatgcaccttatatttctgtgtacacatctattctcaaagctaaagggtatgaaagtgcctgccttgtttatagccacttgtgagtaaaaatttttttgcattttcacaaattatactttatataaggcattccacacctaagaactagttttgggaaatgtagccctgggtttaatgtcaaatcaaggcaaaaggaattaaataatgtacttttggcta

SEQ ID NO: 210892 - DNA, 1422 bp, Artificial Sequence
  derived and/or modified sequence
atgactgtgacacgcacccaccatttcaaggaaggctcccttagggcccctgcgattccactgcacagcgccgctgccgagctagccagtaatcaccctcgcggaccagaggcgaatcttgaggtgagaccaaaggagagctggaatcatgcagatttcgtgcactgtgaagatacggagagcgtccccggtaagccctcagtcaatgccgacgaggaggtgggcggaccacagatctgccgcgtctgcggggataaagctacaggataccactttaacgtgatgacctgcgaggggtgcaagggatttttcagacgcgctatgaaaaggaacgctcgcctgaggtgccctttccgcaagggagcttgcgagattacccggaaaaccaggcgtcagtgtcaagcttgcagattgcgaaaatgtcttgaaagcggcatgaaaaaagagatgattatgtcagatgaagccgtggaagagcggcgtgctctgattaaacggaaaaagagtgagagaactggcactcagcccctcggcgtccagggcctgaccgaggagcagcgaatgatgattcgtgagctcatggatgcccagatgaagacatttgataccacttttagtcatttcaaaaatttccggctaccaggggttctttcctcaggctgcgagctgccggagagcctgcaagctccaagtcgggaagaggcagctaagtggtcgcaggttaggaaggacttatgttctttaaaggtcagtctccagttaagaggtgaagatggaagcgtctggaactacaagccgccagccgattcgggaggaaaggaaatattcagcctgctgccccacatggccgacatgtcaacttacatgttcaaaggcataatctcctttgctaaggtgatttcatacttcagggatcttcccattgaggaccagataagcttattgaaaggcgctgccttcgagctgtgtcagctgagatttaatactgtattcaacgccgaaaccggaacctgggagtgtggaagactctcttactgcctggaggacaccgccggaggatttcaacagctactactggaacccatgctgaaattccactacatgttgaaaaagctacagcttcacgaagaagaatatgtgctgatgcaggcgatctctctcttttcacccgataggcctggggtcttgcaacacagagtggtagatcagctgcaggagcagttcgcaatcactctgaagtcttatatcgagtgtaacagaccccagcctgcacataggttcctcttcctcaagatcatggccatgctgacggagttacgctccatcaacgcgcaacatactcagcggttgctccgcatacaggatatacacccattcgccaccccactgatgcaggaactgtttggaattaccggctcttag

SEQ ID NO: 210893 - DNA, 1305 bp, Artificial Sequence
  derived and/or modified sequence
ctggaggttaggccgaaagaatcatggaatcacgccgattttgttcactgtgaagatactgagagcgtgccaggcaaaccctccgtgaatgcagacgaggaagtcggtggccctcaaatatgccgcgtttgcggcgacaaagccactgggtatcactttaatgttatgacgtgtgagggctgcaaagggttttttcgcagggccatgaagcgcaacgcccgtctgaggtgtccatttcgaaagggcgcttgcgaaattacaaggaaaacgcgccgacaatgccaggcttgccggcttcggaaatgcctagaaagcggaatgaaaaaagagatgatcatgagcgatgaggccgtcgaggaacgccgtgccctcattaagaggaagaagtccgagcgtaccgggactcagcctctgggtgtgcaaggccttactgaagaacagcggatgatgatccgtgagctgatggacgcccagatgaagacttttgatacgactttctcccatttcaagaactttcgtctgccaggcgtattgagcagtggctgtgagctgcccgagtccttgcaggcaccctcacgggaagaggctgcaaagtggtcccaggttcgcaaagacctctgtagcttgaaggtctccctgcagcttcgcggagaagatggcagtgtctggaactacaagcctccagccgactcgggtggcaaagagatatttagcctgctaccacatatggcggacatgtctacatatatgtttaaaggaattataagtttcgcaaaggtcatctcctacttccgtgacctccccattgaggatcagatctccctcctgaagggagcagccttcgagctatgccagctgcgctttaacaccgtatttaatgctgagactggtacttgggagtgcgggaggctgtcctactgcctggaagacaccgcaggcggatttcagcagctcttactcgagcccatgcttaagttccactatatgctcaagaaactccagctccacgaagaagagtatgtcctaatgcaagccatttctctgttcagccccgatcgccctggtgttctgcaacatcgggtggtggaccagctccaagaacagtttgccattaccctgaaatcgtacatcgagtgtaatcgccctcaaccagcccatcgcttccttttcttgaagatcatggctatgcttacagaactacgctcaataaacgcgcagcacacccagaggttgcttagaatacaggacatccacccgttcgccactccactcatgcaagagctcttcgggatcactggaagctag

SEQ ID NO: 210894 - DNA, 1422 bp, Artificial Sequence
  derived and/or modified sequence
atgaccgtgaccagaacccaccacttcaaggagggcagcctgagagcccccgccatccccctgcacagcgccgccgccgagctggccagcaaccaccccagaggccccgaggccaacctggaggtgagacccaaggagagctggaaccacgccgacttcgtgcactgcgaggacaccgagagcgtgcccggcaagcccagcgtgaacgccgacgaggaggtgggcggcccccagatctgcagagtgtgcggcgacaaggccaccggctaccacttcaacgtgatgacctgcgagggctgcaagggcttcttcagaagagccatgaagagaaacgccagactgagatgccccttcagaaagggcgcctgcgagatcaccagaaagaccagaagacagtgccaggcctgcagactgagaaagtgcctggagagcggcatgaagaaggagatgatcatgagcgacgaggccgtggaggagagaagagccctgatcaagagaaagaagagcgagagaaccggcacccagcccctgggcgtgcagggcctgaccgaggagcagagaatgatgatcagagagctgatggacgcccagatgaagaccttcgacaccaccttcagccacttcaagaacttcagactgcccggcgtgctgagcagcggctgcgagctgcccgagagcctgcaggcccccagcagagaggaggccgccaagtggagccaggtgagaaaggacctgtgcagcctgaaggtgagcctgcagctgagaggcgaggacggcagcgtgtggaactacaagccccccgccgacagcggcggcaaggagatcttcagcctgctgccccacatggccgacatgagcacctacatgttcaagggcatcatcagcttcgccaaggtgatcagctacttcagagacctgcccatcgaggaccagatcagcctgctgaagggcgccgccttcgagctgtgccagctgagattcaacaccgtgttcaacgccgagaccggcacctgggagtgcggcagactgagctactgcctggaggacaccgccggcggcttccagcagctgctgctggagcccatgctgaagttccactacatgctgaagaagctgcagctgcacgaggaggagtacgtgctgatgcaggccatcagcctgttcagccccgacagacccggcgtgctgcagcacagagtggtggaccagctgcaggagcagttcgccatcaccctgaagagctacatcgagtgcaacagaccccagcccgcccacagattcctgttcctgaagatcatggccatgctgaccgagctgagaagcatcaacgcccagcacacccagagactgctgagaatccaggacatccaccccttcgccacccccctgatgcaggagctgttcggcatcaccggcagctag

SEQ ID NO: 210895 - DNA, 1305 bp, Artificial Sequence
  derived and/or modified sequence
ctggaggtgagacccaaggagagctggaaccacgccgacttcgtgcactgcgaggacaccgagagcgtgcccggcaagcccagcgtgaacgccgacgaggaggtgggcggcccccagatctgcagagtgtgcggcgacaaggccaccggctaccacttcaacgtgatgacctgcgagggctgcaagggcttcttcagaagagccatgaagagaaacgccagactgagatgccccttcagaaagggcgcctgcgagatcaccagaaagaccagaagacagtgccaggcctgcagactgagaaagtgcctggagagcggcatgaagaaggagatgatcatgagcgacgaggccgtggaggagagaagagccctgatcaagagaaagaagagcgagagaaccggcacccagcccctgggcgtgcagggcctgaccgaggagcagagaatgatgatcagagagctgatggacgcccagatgaagaccttcgacaccaccttcagccacttcaagaacttcagactgcccggcgtgctgagcagcggctgcgagctgcccgagagcctgcaggcccccagcagagaggaggccgccaagtggagccaggtgagaaaggacctgtgcagcctgaaggtgagcctgcagctgagaggcgaggacggcagcgtgtggaactacaagccccccgccgacagcggcggcaaggagatcttcagcctgctgccccacatggccgacatgagcacctacatgttcaagggcatcatcagcttcgccaaggtgatcagctacttcagagacctgcccatcgaggaccagatcagcctgctgaagggcgccgccttcgagctgtgccagctgagattcaacaccgtgttcaacgccgagaccggcacctgggagtgcggcagactgagctactgcctggaggacaccgccggcggcttccagcagctgctgctggagcccatgctgaagttccactacatgctgaagaagctgcagctgcacgaggaggagtacgtgctgatgcaggccatcagcctgttcagccccgacagacccggcgtgctgcagcacagagtggtggaccagctgcaggagcagttcgccatcaccctgaagagctacatcgagtgcaacagaccccagcccgcccacagattcctgttcctgaagatcatggccatgctgaccgagctgagaagcatcaacgcccagcacacccagagactgctgagaatccaggacatccaccccttcgccacccccctgatgcaggagctgttcggcatcaccggcagctag

SEQ ID NO: 210896 - protein, 241 aa, Artificial Sequence
  derived and/or modified sequence
MGHNSTVEIIYITEDDVIQSQNALGKYNTSMALFESNSFEKTILESPYYVDLNQTLFVQVSLHTSDPNLVVFLDTCRASPTSDFASPTYDLIKSGCSRDETCKVYPLFGHYGRFQFNAFKFLRSMSSVYLQCKVLICDSSDHQSRCNQGCVSRSKRDISSYKWKTDSIIGPIRLKRDRSASGNSGFQHETHAEETPNQPFNSVHLFSFMVLALNVVTVATITVRHFVNQRADYKYQKLQNY

SEQ ID NO: 210897 - protein, 326 aa, Artificial Sequence
  derived and/or modified sequence
MRVIISKSYLEAFNSNGNNLQLKDPTCRPKLSNVVEFSVPLNGCGTIRKVEDQSITYTNIITFSASSTSEVITRQKQLQIIVKCEMGHNSTVEIIYITEDDVIQSQNALGKYNTSMALFESNSFEKTILESPYYVDLNQTLFVQVSLHTSDPNLVVFLDTCRASPTSDFASPTYDLIKSGCSRDETCKVYPLFGHYGRFQFNAFKFLRSMSSVYLQCKVLICDSSDHQSRCNQGCVSRSKRDISSYKWKTDSIIGPIRLKRDRSASGNSGFQHETHAEETPNQPFNSVHLFSFMVLALNVVTVATITVRHFVNQRADYKYQKLQNY

SEQ ID NO: 210898 - protein, 607 aa, Artificial Sequence
  derived and/or modified sequence
MELVRRLMPLTLLILSCLAELTMAEAEGNASCTVSLGGANMAETHKAMILQLNPSENCTWTIERPENKSIRIIFSYVQLDPDGSCESENIKVFDGTSSNGPLLGQVCSKNDYVPVFESSSSTLTFQIVTDSARIQRTVFVFYYFFSPNISIPNCGGYLDTLEGSFTSPNYPKPHPELAYCVWHIQVEKDYKIKLNFKEIFLEIDKQCKFDFLAIYDGPSTNSGLIGQVCGRVTPTFESSSNSLTVVLSTDYANSYRGFSASYTSIYAENINTTSLTCSSDRMRVIISKSYLEAFNSNGNNLQLKDPTCRPKLSNVVEFSVPLNGCGTIRKVEDQSITYTNIITFSASSTSEVITRQKQLQIIVKCEMGHNSTVEIIYITEDDVIQSQNALGKYNTSMALFESNSFEKTILESPYYVDLNQTLFVQVSLHTSDPNLVVFLDTCRASPTSDFASPTYDLIKSGCSRDETCKVYPLFGHYGRFQFNAFKFLRSMSSVYLQCKVLICDSSDHQSRCNQGCVSRSKRDISSYKWKTDSIIGPIRLKRDRSASGNSGFQHETHAEETPNQPFNSVHLFSFMVLALNVVTVATITVRHFVNQRADYKYQKLQNY

SEQ ID NO: 210899 - DNA, 1368 bp, Artificial Sequence
  derived and/or modified sequence
gaggccacctgtttgtgatgtgcaggcacagaagaaaggcacagctccccatcagtttcatggaaaataactcagtgcctgctgggaaccagctgctggagatccctacagagagcttccactgggggcaacccttccaggaaggagttggggagagagaaccctcactgtggggaatgctgataaaccagtcacacagctgctctattctcacacaaatctaccccttgcgtggctggaactgacgtttccctggaggtgtccagaaagctgatgtaacacagagcctataaaagctgtcggtccttaaggctgcccagcgccttgccaaaatggagcttgtaagaaggctcatgccattgaccctcttaattctctcctgtttggcggagctgacaatggcggaggctgaaggtagaagatcagtcaattacttacaccaatataatcaccttttctgcatcctcaacttctgaagtgatcacccgtcagaaacaactccagattattgtgaagtgtgaaatgggacataattctacagtggagataatatacataacagaagatgatgtaatacaaagtcaaaatgcactgggcaaatataacaccagcatggctctttttgaatccaattcatttgaaaagactatacttgaatcaccatattatgtggatttgaaccaaactctttttgttcaagttagtctgcacacctcagatccaaatttggtggtgtttcttgatacctgtagagcctctcccacctctgactttgcatctccaacctacgacctaatcaagagtggatgtagtcgagatgaaacttgtaaggtgtatcccttatttggacactatgggagattccagtttaatgcctttaaattcttgagaagtatgagctctgtgtatctgcagtgtaaagttttgatatgtgatagcagtgaccaccagtctcgctgcaatcaaggttgtgtctccagaagcaaacgagacatttcttcatataaatggaaaacagattccatcataggacccattcgtctgaaaagggatcgaagtgcaagtggcaattcaggatttcagcatgaaacacatgcggaagaaactccaaaccagcctttcaacagtgtgcatctgttttccttcatggttctagctctgaatgtggtgactgtagcgacaatcacagtgaggcattttgtaaatcaacgggcagactacaaataccagaagctgcagaactattaactaacaggtccaaccctaagtgagacatgtttctccaggatgccaaaggaaatgctacctcgtggctacacatattatgaataaatgaggaagggcctgaaagtgacacacaggcctgca

SEQ ID NO: 210900 - DNA, 2057 bp, Artificial Sequence
  derived and/or modified sequence
cttactggggaaaggagagaccaagggctgcttcatgaaggctgtttctgagctgagctttgaacaatagcatgacgagggtaggtggaggtgggagtcagggaagaggactcacctctgctggagctgacagctgaggagtcatgggaagaaagggaggatagaacagaaggccatgaagtagtggcggatgagactggaaagctgagctggtgagagtgaggaagagccttcaagggagggtgtgactttattttctatggcgcaattcaggtaatgggagtctctccagatgcaacacatgttacagcacaactttaatatgattcgtttggcaatagtataaagattccctctctgccctgcaccagtggacagaaatttcaatgataaaaaaggatgaaaacctcaatatgtgacccatgggaaagatagagatggaatcatactcaggagagatgtgttaagctcaatgcacaacacagaaattaaaagcagtctctattttgatgttcattcttgaccaccttcacatccatttcagctattccaaactgtggcggttacctggataccttggaaggatccttcaccagccccaattacccaaagccgcatcctgagctggcttattgtgtgtggcacatacaagtggagaaagattacaagataaaactaaacttcaaagagattttaggccctcattctctagcctagaaatagacaaacagtgcaaatttgattttcttgccatctatgatggcccctccaccaactctggcctgattggacaagtctgtggccgtgtgactcccaccttcgaatcgtcatcaaactctctgactgtcgtgttgtctacagattatgccaattcttaccggggattttctgcttcctacacctcaatttatgcagaaaacatcaacactacatctttaacttgctcttctgacaggatgagagttattataagcaaatcctacctagaggcttttaactctaatgggaataacttgcaactaaaagacccaacttgcagaccaaaattatcaaatgttgtggaattttctgtccctcttaatggatgtggtacaatcagaaaggtagaagatcagtcaattacttacaccaatataatcaccttttctgcatcctcaacttctgaagtgatcacccgtcagaaacaactccagattattgtgaagtgtgaaatgggacataattctacagtggagataatatacataacagaagatgatgtaatacaaagtcaaaatgcactgggcaaatataacaccagcatggctctttttgaatccaattcatttgaaaagactatacttgaatcaccatattatgtggatttgaaccaaactctttttgttcaagttagtctgcacacctcagatccaaatttggtggtgtttcttgatacctgtagagcctctcccacctctgactttgcatctccaacctacgacctaatcaagagtggatgtagtcgagatgaaacttgtaaggtgtatcccttatttggacactatgggagattccagtttaatgcctttaaattcttgagaagtatgagctctgtgtatctgcagtgtaaagttttgatatgtgatagcagtgaccaccagtctcgctgcaatcaaggttgtgtctccagaagcaaacgagacatttcttcatataaatggaaaacagattccatcataggacccattcgtctgaaaagggatcgaagtgcaagtggcaattcaggatttcagcatgaaacacatgcggaagaaactccaaaccagcctttcaacagtgtgcatctgttttccttcatggttctagctctgaatgtggtgactgtagcgacaatcacagtgaggcattttgtaaatcaacgggcagactacaaataccagaagctgcagaactattaactaacaggtccaaccctaagtgagacatgtttctccaggatgccaaaggaaatgctacctcgtggctacacatattatgaataaatgaggaagggcctgaaagtgacacacaggcctgca

SEQ ID NO: 210901 - DNA, 1976 bp, Artificial Sequence
  derived and/or modified sequence
gaggccacctgtttgtgatgtgcaggcacagaagaaaggcacagctccccatcagtttcatggaaaataactcagtgcctgctgggaaccagctgctggagatccctacagagagcttccactgggggcaacccttccaggaaggagttggggagagagaaccctcactgtggggaatgctgataaaccagtcacacagctgctctattctcacacaaatctaccccttgcgtggctggaactgacgtttccctggaggtgtccagaaagctgatgtaacacagagcctataaaagctgtcggtccttaaggctgcccagcgccttgccaaaatggagcttgtaagaaggctcatgccattgaccctcttaattctctcctgtttggcggagctgacaatggcggaggctgaaggcttgatccagatggaagctgtgaaagtgaaaacattaaagtctttgacggaacctccagcaatgggcctctgctagggcaagtctgcagtaaaaacgactatgttcctgtatttgaatcatcatccagtacattgacgtttcaaatagttactgactcagcaagaattcaaagaactgtctttgtcttctactacttcttctctcctaacatctctattccaaactgtggcggttacctggataccttggaaggatccttcaccagccccaattacccaaagccgcatcctgagctggcttattgtgtgtggcacatacaagtggagaaagattacaagataaaactaaacttcaaagagattttattatgccaattcttaccggggattttctgcttcctacacctcaatttatgcagaaaacatcaacactacatctttaacttgctcttctgacaggatgagagttattataagcaaatcctacctagaggcttttaactctaatgggaataacttgcaactaaaagacccaacttgcagaccaaaattatcaaatgttgtggaattttctgtccctcttaatggatgtggtacaatcagaaaggtagaagatcagtcaattacttacaccaatataatcaccttttctgcatcctcaacttctgaagtgatcacccgtcagaaacaactccagattattgtgaagtgtgaaatgggacataattctacagtggagataatatacataacagaagatgatgtaatacaaagtcaaaatgcactgggcaaatataacaccagcatggctctttttgaatccaattcatttgaaaagactatacttgaatcaccatattatgtggatttgaaccaaactctttttgttcaagttagtctgcacacctcagatccaaatttggtggtgtttcttgatacctgtagagcctctcccacctctgactttgcatctccaacctacgacctaatcaagagtggatgtagtcgagatgaaacttgtaaggtgtatcccttatttggacactatgggagattccagtttaatgcctttaaattcttgagaagtatgagctctgtgtatctgcagtgtaaagttttgatatgtgatagcagtgaccaccagtctcgctgcaatcaaggttgtgtctccagaagcaaacgagacatttcttcatataaatggaaaacagattccatcataggacccattcgtctgaaaagggatcgaagtgcaagtggcaattcaggatttcagcatgaaacacatgcggaagaaactccaaaccagcctttcaacagtgtgcatctgttttccttcatggttctagctctgaatgtggtgactgtagcgacaatcacagtgaggcattttgtaaatcaacgggcagactacaaataccagaagctgcagaactattaactaacaggtccaaccctaagtgagacatgtttctccaggatgccaaaggaaatgctacctcgtggctacacatattatgaataaatgaggaagggcctgaaagtgacacacaggcctgca

SEQ ID NO: 210902 - DNA, 2125 bp, Artificial Sequence
  derived and/or modified sequence
gaggccacctgtttgtgatgtgcaggcacagaagaaaggcacagctccccatcagtttcatggaaaataactcagtgcctgctgggaaccagctgctggagatccctacagagagcttccactgggggcaacccttccaggaaggagttggggagagagaaccctcactgtggggaatgctgataaaccagtcacacagctgctctattctcacacaaatctaccccttgcgtggctggaactgacgtttccctggaggtgtccagaaagctgatgtaacacagagcctataaaagctgtcggtccttaaggctgcccagcgccttgccaaaatggagcttgtaagaaggctcatgccattgaccctcttaattctctcctgtttggcggagctgacaatggcggaggctgaaggcttgatccagatggaagctgtgaaagtgaaaacattaaagtctttgacggaacctccagcaatgggcctctgctagggcaagtctgcagtaaaaacgactatgttcctgtatttgaatcatcatccagtacattgacgtttcaaatagttactgactcagcaagaattcaaagaactgtctttgtcttctactacttcttctctcctaacatctctattccaaactgtggcggttacctggataccttggaaggatccttcaccagccccaattacccaaagccgcatcctgagctggcttattgtgtgtggcacatacaagtggagaaagattacaagataaaactaaacttcaaagagattttcctagaaatagacaaacagtgcaaatttgattttcttgccatctatgatggcccctccaccaactctggcctgattggacaagtctgtggccgtgtgactcccaccttcgaatcgtcatcaaactctctgactgtcgtgttgtctacagattatgccaattcttaccggggattttctgcttcctacacctcaatttatgcagaaaacatcaacactacatctttaacttgctcttctgacaggatgagagttattataagcaaatcctacctagaggcttttaactctaatgggaataacttgcaactaaaagacccaacttgcagaccaaaattatcaaatgttgtggaattttctgtccctcttaatggatgtggtacaatcagaaaggtagaagatcagtcaattacttacaccaatataatcaccttttctgcatcctcaacttctgaagtgatcacccgtcagaaacaactccagattattgtgaagtgtgaaatgggacataattctacagtggagataatatacataacagaagatgatgtaatacaaagtcaaaatgcactgggcaaatataacaccagcatggctctttttgaatccaattcatttgaaaagactatacttgaatcaccatattatgtggatttgaaccaaactctttttgttcaagttagtctgcacacctcagatccaaatttggtggtgtttcttgatacctgtagagcctctcccacctctgactttgcatctccaacctacgacctaatcaagagtggatgtagtcgagatgaaacttgtaaggtgtatcccttatttggacactatgggagattccagtttaatgcctttaaattcttgagaagtatgagctctgtgtatctgcagtgtaaagttttgatatgtgatagcagtgaccaccagtctcgctgcaatcaaggttgtgtctccagaagcaaacgagacatttcttcatataaatggaaaacagattccatcataggacccattcgtctgaaaagggatcgaagtgcaagtggcaattcaggatttcagcatgaaacacatgcggaagaaactccaaaccagcctttcaacagtgtgcatctgttttccttcatggttctagctctgaatgtggtgactgtagcgacaatcacagtgaggcattttgtaaatcaacgggcagactacaaataccagaagctgcagaactattaactaacaggtccaaccctaagtgagacatgtttctccaggatgccaaaggaaatgctacctcgtggctacacatattatgaataaatgaggaagggcctgaaagtgacacacaggcctgca

SEQ ID NO: 210903 - DNA, 2903 bp, Artificial Sequence
  derived and/or modified sequence
ccttctctctggactttgcatttccattccttttcattgacaaactgactttttttatttctttttttccatctctgggccagcttgggatcctaggccgccctgggaagacatttgtgttttacacacataaggatctgtgtttggggtttcttcttcctcccctgacattggcattgcttagtggttgtgtggggagggagaccacgtgggctcagtgcttgcttgcacttatctgcctaggtacatcgaagtcttttgacctccatacagtgattatgcctgtcatcgctggtggtatcctggcggccttgctcctgctgatagttgtcgtgctctgtctttacttcaaaatacacaacgcgctaaaagctgcaaaggaacctgaagctgtggctgtaaaaaatcacaacccagacaaggtgtggtgggccaagaacagccaggccaaaaccattgccacggagtcttgtcctgccctgcagtgctgtgaaggatatagaatgtgtgccagttttgattccctgccaccttgctgttgcgacataaatgagggcctctgagttaggaaaggctcccttctcaaagcagagccctgaagacttcaatgatgtcaatgaggccacctgtttgtgatgtgcaggcacagaagaaaggcacagctccccatcagtttcatggaaaataactcagtgcctgctgggaaccagctgctggagatccctacagagagcttccactgggggcaacccttccaggaaggagttggggagagagaaccctcactgtggggaatgctgataaaccagtcacacagctgctctattctcacacaaatctaccccttgcgtggctggaactgacgtttccctggaggtgtccagaaagctgatgtaacacagagcctataaaagctgtcggtccttaaggctgcccagcgccttgccaaaatggagcttgtaagaaggctcatgccattgaccctcttaattctctcctgtttggcggagctgacaatggcggaggctgaaggcaatgcaagctgcacagtcagtctagggggtgccaatatggcagagacccacaaagccatgatcctgcaactcaatcccagtgagaactgcacctggacaatagaaagaccagaaaacaaaagcatcagaattatcttttcctatgtccagcttgatccagatggaagctgtgaaagtgaaaacattaaagtctttgacggaacctccagcaatgggcctctgctagggcaagtctgcagtaaaaacgactatgttcctgtatttgaatcatcatccagtacattgacgtttcaaatagttactgactcagcaagaattcaaagaactgtctttgtcttctactacttcttctctcctaacatctctattccaaactgtggcggttacctggataccttggaaggatccttcaccagccccaattacccaaagccgcatcctgagctggcttattgtgtgtggcacatacaagtggagaaagattacaagataaaactaaacttcaaagagattttcctagaaatagacaaacagtgcaaatttgattttcttgccatctatgatggcccctccaccaactctggcctgattggacaagtctgtggccgtgtgactcccaccttcgaatcgtcatcaaactctctgactgtcgtgttgtctacagattatgccaattcttaccggggattttctgcttcctacacctcaatttatgcagaaaacatcaacactacatctttaacttgctcttctgacaggatgagagttattataagcaaatcctacctagaggcttttaactctaatgggaataacttgcaactaaaagacccaacttgcagaccaaaattatcaaatgttgtggaattttctgtccctcttaatggatgtggtacaatcagaaaggtagaagatcagtcaattacttacaccaatataatcaccttttctgcatcctcaacttctgaagtgatcacccgtcagaaacaactccagattattgtgaagtgtgaaatgggacataattctacagtggagataatatacataacagaagatgatgtaatacaaagtcaaaatgcactgggcaaatataacaccagcatggctctttttgaatccaattcatttgaaaagactatacttgaatcaccatattatgtggatttgaaccaaactctttttgttcaagttagtctgcacacctcagatccaaatttggtggtgtttcttgatacctgtagagcctctcccacctctgactttgcatctccaacctacgacctaatcaagagtggatgtagtcgagatgaaacttgtaaggtgtatcccttatttggacactatgggagattccagtttaatgcctttaaattcttgagaagtatgagctctgtgtatctgcagtgtaaagttttgatatgtgatagcagtgaccaccagtctcgctgcaatcaaggttgtgtctccagaagcaaacgagacatttcttcatataaatggaaaacagattccatcataggacccattcgtctgaaaagggatcgaagtgcaagtggcaattcaggatttcagcatgaaacacatgcggaagaaactccaaaccagcctttcaacagtgtgcatctgttttccttcatggttctagctctgaatgtggtgactgtagcgacaatcacagtgaggcattttgtaaatcaacgggcagactacaaataccagaagctgcagaactattaactaacaggtccaaccctaagtgagacatgtttctccaggatgccaaaggaaatgctacctcgtggctacacatattatgaataaatgaggaagggcctgaaagtgacacacaggcctgcatgtcactgt

SEQ ID NO: 210904 - DNA, 726 bp, Artificial Sequence
  derived and/or modified sequence
atgggccacaacagcaccgtggagatcatctacatcaccgaggacgacgtgatccagagccagaacgccctgggcaagtacaacaccagcatggccctgttcgagagcaacagcttcgagaagaccatcctggagagcccctactacgtggacctgaaccagaccctgttcgtgcaggtgagcctgcacaccagcgaccccaacctggtggtgttcctggacacctgcagagccagccccaccagcgacttcgccagccccacctacgacctgatcaagagcggctgcagcagagacgagacctgcaaggtgtaccccctgttcggccactacggcagattccagttcaacgccttcaagttcctgagaagcatgagcagcgtgtacctgcagtgcaaggtgctgatctgcgacagcagcgaccaccagagcagatgcaaccagggctgcgtgagcagaagcaagagagacatcagcagctacaagtggaagaccgacagcatcatcggccccatcagactgaagagagacagaagcgccagcggcaacagcggcttccagcacgagacccacgccgaggagacccccaaccagcccttcaacagcgtgcacctgttcagcttcatggtgctggccctgaacgtggtgaccgtggccaccatcaccgtgagacacttcgtgaaccagagagccgactacaagtaccagaagctgcagaactactag

SEQ ID NO: 210905 - DNA, 981 bp, Artificial Sequence
  derived and/or modified sequence
atgagagtgatcatcagcaagagctacctggaggccttcaacagcaacggcaacaacctgcagctgaaggaccccacctgcagacccaagctgagcaacgtggtggagttcagcgtgcccctgaacggctgcggcaccatcagaaaggtggaggaccagagcatcacctacaccaacatcatcaccttcagcgccagcagcaccagcgaggtgatcaccagacagaagcagctgcagatcatcgtgaagtgcgagatgggccacaacagcaccgtggagatcatctacatcaccgaggacgacgtgatccagagccagaacgccctgggcaagtacaacaccagcatggccctgttcgagagcaacagcttcgagaagaccatcctggagagcccctactacgtggacctgaaccagaccctgttcgtgcaggtgagcctgcacaccagcgaccccaacctggtggtgttcctggacacctgcagagccagccccaccagcgacttcgccagccccacctacgacctgatcaagagcggctgcagcagagacgagacctgcaaggtgtaccccctgttcggccactacggcagattccagttcaacgccttcaagttcctgagaagcatgagcagcgtgtacctgcagtgcaaggtgctgatctgcgacagcagcgaccaccagagcagatgcaaccagggctgcgtgagcagaagcaagagagacatcagcagctacaagtggaagaccgacagcatcatcggccccatcagactgaagagagacagaagcgccagcggcaacagcggcttccagcacgagacccacgccgaggagacccccaaccagcccttcaacagcgtgcacctgttcagcttcatggtgctggccctgaacgtggtgaccgtggccaccatcaccgtgagacacttcgtgaaccagagagccgactacaagtaccagaagctgcagaactactag

SEQ ID NO: 210906 - DNA, 1824 bp, Artificial Sequence
  derived and/or modified sequence
atggagctggtgagaagactgatgcccctgaccctgctgatcctgagctgcctggccgagctgaccatggccgaggccgagggcaacgccagctgcaccgtgagcctgggcggcgccaacatggccgagacccacaaggccatgatcctgcagctgaaccccagcgagaactgcacctggaccatcgagagacccgagaacaagagcatcagaatcatcttcagctacgtgcagctggaccccgacggcagctgcgagagcgagaacatcaaggtgttcgacggcaccagcagcaacggccccctgctgggccaggtgtgcagcaagaacgactacgtgcccgtgttcgagagcagcagcagcaccctgaccttccagatcgtgaccgacagcgccagaatccagagaaccgtgttcgtgttctactacttcttcagccccaacatcagcatccccaactgcggcggctacctggacaccctggagggcagcttcaccagccccaactaccccaagccccaccccgagctggcctactgcgtgtggcacatccaggtggagaaggactacaagatcaagctgaacttcaaggagatcttcctggagatcgacaagcagtgcaagttcgacttcctggccatctacgacggccccagcaccaacagcggcctgatcggccaggtgtgcggcagagtgacccccaccttcgagagcagcagcaacagcctgaccgtggtgctgagcaccgactacgccaacagctacagaggcttcagcgccagctacaccagcatctacgccgagaacatcaacaccaccagcctgacctgcagcagcgacagaatgagagtgatcatcagcaagagctacctggaggccttcaacagcaacggcaacaacctgcagctgaaggaccccacctgcagacccaagctgagcaacgtggtggagttcagcgtgcccctgaacggctgcggcaccatcagaaaggtggaggaccagagcatcacctacaccaacatcatcaccttcagcgccagcagcaccagcgaggtgatcaccagacagaagcagctgcagatcatcgtgaagtgcgagatgggccacaacagcaccgtggagatcatctacatcaccgaggacgacgtgatccagagccagaacgccctgggcaagtacaacaccagcatggccctgttcgagagcaacagcttcgagaagaccatcctggagagcccctactacgtggacctgaaccagaccctgttcgtgcaggtgagcctgcacaccagcgaccccaacctggtggtgttcctggacacctgcagagccagccccaccagcgacttcgccagccccacctacgacctgatcaagagcggctgcagcagagacgagacctgcaaggtgtaccccctgttcggccactacggcagattccagttcaacgccttcaagttcctgagaagcatgagcagcgtgtacctgcagtgcaaggtgctgatctgcgacagcagcgaccaccagagcagatgcaaccagggctgcgtgagcagaagcaagagagacatcagcagctacaagtggaagaccgacagcatcatcggccccatcagactgaagagagacagaagcgccagcggcaacagcggcttccagcacgagacccacgccgaggagacccccaaccagcccttcaacagcgtgcacctgttcagcttcatggtgctggccctgaacgtggtgaccgtggccaccatcaccgtgagacacttcgtgaaccagagagccgactacaagtaccagaagctgcagaactactag

SEQ ID NO: 210907 - DNA, 726 bp, Artificial Sequence
  derived and/or modified sequence
atggggcacaactccactgtggaaatcatttacattaccgaagacgatgtgatacagtcccagaacgcattaggcaaatacaacacaagtatggccctttttgagtctaatagtttcgaaaaaacgatactggagagcccctactacgtcgatctgaaccaaacacttttcgtccaagtatcgttacacacgtcggatccaaatctcgtggtatttcttgacacctgcagggcttctccaacatcagactttgcctcaccaacctatgacctaatcaaaagcgggtgttcgcgggatgaaacctgtaaggtctaccctctgttcggacattacggtcgatttcagttcaacgccttcaaatttctgaggtcaatgtcctccgtatatttgcagtgtaaggtactgatctgtgacagctccgaccaccagagtaggtgtaatcagggatgcgttagccgaagcaagagggatatcagcagctacaaatggaagacagatagcatcatcgggccaattaggcttaaacgcgacaggagtgctagcggcaattcaggctttcaacacgaaacacatgctgaagagacgccaaatcaaccatttaattccgtgcacttgttctcatttatggtgctggctctcaatgtggtcactgtcgccactattaccgtccgacactttgtgaatcagcgggcagactataaataccagaagcttcagaattattag

SEQ ID NO: 210908 - DNA, 981 bp, Artificial Sequence
  derived and/or modified sequence
atgcgcgtcatcatttcaaagagctatctggaggcattcaattcgaacggtaataaccttcagcttaaggatcccacttgtaggcccaagctttcaaacgtagtggagttctccgttccgcttaatggatgtggcactattagaaaggtagaggaccaatctatcacctatacgaacattatcacattttctgcctcttccacgagcgaggtcatcacacgccagaaacagttacaaattatagtgaaatgtgaaatggggcacaatagtactgtcgaaatcatctacatcactgaggacgatgtcatccagtcccagaatgccttgggcaagtataatacctcaatggcactcttcgaatccaattctttcgagaagacgattcttgaatcaccatactatgtggatttgaatcagacacttttcgttcaagtgagcctacatacatcggaccctaacctggttgtttttttagatacctgcagagcctcccccacatctgacttcgcttctcctacctacgatttaattaagtcagggtgctctcgagatgagacctgcaaggtgtacccactctttggacactatggacggtttcagttcaacgccttcaagttccttcggtcgatgagcagcgtgtacctgcaatgcaaggtgttaatctgcgactcctcagaccaccagagtcggtgtaaccagggctgtgtctcaagatcaaaacgagacatcagcagctataagtggaagactgacagtataatcggccctattaggcttaagagggacagatcagcatctggaaacagcgggttccagcatgagacccacgcagaggaaacccccaatcagcctttcaactcagtgcacttgttctctttcatggtcctggccctgaatgtcgttacggtggccactataacagtgagacattttgttaatcagcgcgcagactataaatatcagaagctgcagaactactag

SEQ ID NO: 210909 - DNA, 981 bp, Artificial Sequence
  derived and/or modified sequence
atgagggttattatctcaaagagctacttagaggccttcaactcaaatgggaataacctgcagcttaaggaccccacatgccgcccaaaattgtccaatgtggttgaattttctgtccctttaaacggttgtggaacaatacgaaaggtggaagaccagtctattacatatacaaatatcattactttcagcgcctcaagcacctccgaggttattaccaggcaaaaacagctgcagattatcgtgaagtgtgagatggggcacaacagcacagtcgaaattatttacataacagaagacgatgtgatccaaagccagaatgctctgggcaagtacaatacttctatggcactctttgaatcaaacagctttgagaaaaccattctggaatctccatattacgtcgatcttaaccagacactgttcgtccaggttagcctacatacctctgacccaaatttggtggtgttcctggatacctgtcgggcctcccccacgtctgatttcgcttccccaacctatgatttgatcaagtctggctgcagcagagacgagacctgtaaggtgtaccccttatttggtcactacggtaggttccaatttaacgcttttaagttcctgaggtcaatgtctagcgtgtacctgcaatgcaaggtcctcatctgtgatagttcagatcatcagtctaggtgtaaccagggatgtgtttcccgaagcaaacgcgatatcagtagctataagtggaagacagactccattattgggcctatacgcctgaaacgcgatcgttcagcctctggaaactccgggttccagcatgaaacccacgctgaggaaacccctaaccaaccctttaatagtgtccacctgttcagtttcatggtgctggctttgaacgtggtcacagtggcaaccataacggtacgccacttcgtaaatcagcgcgctgactataaatatcagaagctgcagaattactag

SEQ ID NO: 210910 - DNA, 981 bp, Artificial Sequence
  derived and/or modified sequence
atgagggtgattatctcaaaaagctacttagaagcttttaacagcaatgggaacaaccttcagttgaaggatccaacgtgtagacccaaattgagcaatgtcgtggaattctcagtacccctgaatggatgcggcacaatccggaaggttgaagaccaatccatcacctacacgaatattataacgttctcagcatcctcaacatcagaggtgattacaaggcagaagcagctgcagattattgtgaagtgtgaaatggggcacaactctaccgtagagatcatttatattaccgaggatgatgtcatccaatcacagaacgccctgggtaaatacaatacctccatggctctattcgagtccaactctttcgagaaaacaatcctggaatctccatattatgtggatctgaatcaaacactcttcgtccaggtgtccctgcacacaagcgacccaaacctggttgtattcctggacacttgccgagcttcacctacctccgattttgcttcaccgacttatgacctgatcaagagcggatgctcaagggatgagacctgcaaggtgtaccctctgtttggtcactacgggcgatttcagtttaatgcattcaagttccttcgatccatgagcagcgtatacttgcagtgcaaagtgctgatatgcgattctagcgatcatcagtcgcggtgtaaccagggatgtgttagccgcagcaagcgcgatatttcttcttataagtggaaaacagattccataatcggccccatacggttgaagagggatcggtccgcatcagggaattccggattccagcacgagacccatgccgaagaaacacctaatcagcctttcaactccgtccaccttttcagttttatggtactcgctctcaacgtcgttacagtggctactattacagtgaggcactttgttaaccagagagctgactacaaataccagaaactgcagaactactag

SEQ ID NO: 210911 - DNA, 1824 bp, Artificial Sequence
  derived and/or modified sequence
atggaactagtgcgacgtttaatgccacttacgctcctaatcctgagttgcctggcagagcttacaatggccgaagcagaaggcaacgcaagttgtaccgtctccctggggggggccaatatggccgagacccacaaggcaatgatcctccagttgaaccctagcgagaactgtacctggacaattgaaaggccagagaacaaatccatcaggatcatcttcagttatgtacagctggatccggacggtagttgtgaatcggagaacatcaaggtatttgacgggacgtcctccaatggacctctgctgggacaggtttgctcaaagaatgattacgtaccagtatttgagtcttctagcagcactctgacatttcagattgtgaccgactccgcacggattcagaggacagtgtttgtattttactactttttctcaccaaatatatctatcccgaactgcggcggctatctggacacactcgaggggtcgttcacgtctcccaactaccccaagccccacccggagcttgcgtattgtgtgtggcacattcaagtggaaaaagactacaaaatcaaactgaacttcaaggaaatatttctggaaatcgacaagcagtgcaaatttgattttctggcaatttacgatggacctagtaccaactcgggtttgatcggtcaggtgtgcggacgcgtgacccccacctttgaaagctcctctaactctttaacggtcgtactgagcacggattatgccaactcctaccgaggattcagtgcaagctacacttcaatttatgccgaaaatatcaataccaccagcctgacatgttcaagcgaccgcatgcgggttataatcagcaaaagttacttagaggcctttaatagcaatgggaacaatctgcaactcaaggatccaacatgtaggcctaagctttccaacgtagtagagttctctgtgcccttaaatggctgcggtacaatcaggaaggtcgaagaccagtccatcacctatactaacatcatcaccttctccgcgtctagtacgtcagaagtgataacccgacagaaacagttacagataatcgtgaaatgtgagatgggccacaattccacagtggagatcatttatatcaccgaagatgacgtcattcaatctcaaaacgcgctggggaagtacaatacatcaatggccttattcgaatccaactccttcgaaaagacaatactggagagcccatactacgtggacctgaatcagacactgtttgttcaggtgtctctccatacaagcgaccccaatctcgttgtgttcctggatacttgtcgcgcgagtcctacctcggacttcgctagtcctacgtacgatttaatcaaaagcgggtgctccagggacgaaacctgcaaggtctacccactgttcgggcactacggtaggttccaattcaacgccttcaagttcttgaggtcaatgtcctccgtttacctccagtgtaaagtcctgatctgtgatagttctgatcaccaatctcggtgcaaccaggggtgtgtctcccgatcgaagcgggatatctcgtcatataaatggaagactgattccattatcggccccattcgcttgaagcgggaccggtccgcctcaggaaattcaggttttcagcacgaaacacatgcggaagagaccccaaatcaacccttcaattctgtgcacctcttcagtttcatggtgctggccttgaacgtggtcactgtagcgaccatcaccgtgaggcacttcgtcaaccaaagagctgattacaagtatcagaagttgcagaattactag

SEQ ID NO: 210912 - DNA, 726 bp, Artificial Sequence
  derived and/or modified sequence
atgggccacaacagcacagtggagatcatctacatcacagaagatgatgtgatccagagccagaatgccctgggcaagtacaacacctccatggccctgtttgagagcaacagctttgagaagaccatcctggagagcccctactacgtggacctgaaccagaccctgtttgtgcaggtgtccctgcacaccagtgaccccaacctggtggtgttcctggacacctgccgggccagccccaccagtgactttgccagccccacctatgacctgatcaagagcggctgcagcagagatgagacctgcaaggtgtaccccctgtttggccactacggccgcttccagttcaatgccttcaagttcctgcgctccatgagctctgtgtacctgcagtgcaaggtgctgatctgtgacagcagtgaccaccagagccgctgcaaccagggctgtgtgagccgcagcaagagggacatcagcagctacaagtggaagacagacagcatcatcggccccatccggctgaagagggacagaagtgccagcggcaacagcggcttccagcacgagacccacgccgaggagacccccaaccagcccttcaacagcgtgcacctgttctccttcatggtgctggccctgaatgtggtgacagtggccaccatcaccgtgcgccactttgtgaaccagagagctgactacaagtaccagaagctgcagaactactag

SEQ ID NO: 210913 - DNA, 981 bp, Artificial Sequence
  derived and/or modified sequence
atgagggtcatcatcagcaagagctacctggaggccttcaacagcaatggaaacaacctgcagctgaaggaccccacctgccggcccaagctgagcaatgtggtggagttctctgtgcccctgaatggctgcggcaccatcaggaaggtggaggaccagagcatcacctacaccaacatcatcaccttcagcgccagcagcaccagcgaggtgatcacccggcagaagcagctgcagatcatcgtgaagtgtgagatgggccacaacagcacagtggagatcatctacatcacagaagatgatgtgatccagagccagaatgccctgggcaagtacaacacctccatggccctgtttgagagcaacagctttgagaagaccatcctggagagcccctactacgtggacctgaaccagaccctgtttgtgcaggtgtccctgcacaccagtgaccccaacctggtggtgttcctggacacctgccgggccagccccaccagtgactttgccagccccacctatgacctgatcaagagcggctgcagcagagatgagacctgcaaggtgtaccccctgtttggccactacggccgcttccagttcaatgccttcaagttcctgcgctccatgagctctgtgtacctgcagtgcaaggtgctgatctgtgacagcagtgaccaccagagccgctgcaaccagggctgtgtgagccgcagcaagagggacatcagcagctacaagtggaagacagacagcatcatcggccccatccggctgaagagggacagaagtgccagcggcaacagcggcttccagcacgagacccatgctgaggagacccccaaccagcccttcaacagcgtgcacctgttctccttcatggtgctggccctgaatgtggtgacagtggccaccatcaccgtgcgccactttgtgaaccagagagctgactacaagtaccagaagctgcagaactactag

SEQ ID NO: 210914 - DNA, 1824 bp, Artificial Sequence
  derived and/or modified sequence
atggagctggtgcggcggctgatgcccctgaccctgctgatcctgagctgcctggccgagctgaccatggccgaggccgagggcaatgccagctgcaccgtgtccctgggcggggccaacatggccgagacccacaaggccatgatcctgcagctgaaccccagcgagaactgcacctggaccatcgagaggcctgagaacaagagcatccgcatcatcttctcctatgtgcagctggaccctgatggcagctgtgagagcgagaacatcaaggtgtttgatggcaccagcagcaatggccccctgctgggccaggtgtgcagcaagaatgactatgtgcctgtgtttgagagcagcagcagcaccctgaccttccagatcgtgacagattctgcccgcatccagaggacagtgtttgtgttctactacttcttcagccccaacatcagcatccccaactgtggcggctacctggacaccctggagggcagcttcaccagccccaactaccccaagccccaccctgagctggcctactgtgtgtggcacatccaggtggagaaggactacaagatcaagctgaacttcaaggagatcttcctggagattgacaagcagtgcaagtttgacttcctggccatctatgatggccccagcaccaacagcggcctgattggccaggtgtgtggccgggtgacccccacctttgagagcagcagcaacagcctgactgtggtgctgagcacagattatgccaacagctaccggggcttcagcgccagctacaccagcatctatgcagagaacatcaacaccaccagcctgacctgcagcagtgacaggatgagggtcatcatcagcaagagctacctggaggccttcaacagcaatggaaacaacctgcagctgaaggaccccacctgccggcccaagctgagcaatgtggtggagttctctgtgcccctgaatggctgcggcaccatcaggaaggtggaggaccagagcatcacctacaccaacatcatcaccttcagcgccagcagcaccagcgaggtgatcacccggcagaagcagctgcagatcatcgtgaagtgtgagatgggccacaacagcacagtggagatcatctacatcacagaagatgatgtgatccagagccagaatgccctgggcaagtacaacacctccatggccctgtttgagagcaacagctttgagaagaccatcctggagagcccctactacgtggacctgaaccagaccctgtttgtgcaggtgtccctgcacaccagtgaccccaacctggtggtgttcctggacacctgccgggccagccccaccagtgactttgccagccccacctatgacctgatcaagagcggctgcagcagagatgagacctgcaaggtgtaccccctgtttggccactacggccgcttccagttcaatgccttcaagttcctgcgctccatgagctctgtgtacctgcagtgcaaggtgctgatctgtgacagcagtgaccaccagagccgctgcaaccagggctgtgtgagccgcagcaagagggacatcagcagctacaagtggaagacagacagcatcatcggccccatccggctgaagagggacagaagtgccagcggcaacagcggcttccagcacgagacccacgccgaggagacccccaaccagcccttcaacagcgtgcacctgttctccttcatggtgctggccctgaatgtggtgacagtggccaccatcaccgtgcgccactttgtgaaccagagagctgactacaagtaccagaagctgcagaactactag

SEQ ID NO: 210915 - DNA, 726 bp, Artificial Sequence
  derived and/or modified sequence
atgggccacaacagcaccgtggagatcatctacatcaccgaggacgatgtaatacagtctcagaatgccctgggaaagtacaatacaagcatggcactattcgaaagcaattccttcgaaaagactattttggaaagcccttattacgtggacctgaaccaaacattgttcgttcaagtttctctccatacctctgatccaaatcttgtggtattcctcgacacttgccgcgctagtcccacatctgatttcgcttctccaacctacgatcttatcaagtctggctgctcccgtgatgaaacctgtaaagtttacccactgtttggacactacggccggtttcagttcaacgctttcaaattcctgcggagtatgagctctgtctaccttcagtgcaaggtgcttatttgtgatagctccgaccaccagagtaggtgcaaccagggatgcgtgtcgcggtcaaagcgagatatcagttcttacaaatggaaaactgactccattatcggtccgatccgtctcaaaagagaccgcagtgcttctggaaatagcggatttcaacacgaaacacacgctgaggagacccccaatcagccatttaacagtgtgcatttattctcttttatggtcctggctttgaatgtcgtcaccgtggccactattaccgtgaggcacttcgtaaatcagagagccgactataaataccagaagcttcagaactactag

SEQ ID NO: 210916 - DNA, 981 bp, Artificial Sequence
  derived and/or modified sequence
atgcgggtgatcatcagcaagagctacctggaggccttcaacagcaatggaaataaccttcagttgaaggaccctacctgtcgtcccaaattaagcaacgtggtggagttttcagtacccctgaacgggtgcgggactatccgaaaagtggaggatcagagtatcacttacacgaatatcatcacattcagcgcgtccagcacctccgaggttattacccggcaaaagcaattacagataatcgtcaagtgtgaaatgggacacaatagcaccgtcgagatcatctacattaccgaagatgacgtcatacagagtcagaacgctctggggaagtataacactagcatggctctgtttgagtctaattcatttgaaaagacaattttggagagcccttactatgtcgacctgaaccagaccttgtttgtgcaggtgtctctccacactagcgatccaaatctcgtcgtatttttggacacatgccgggcctcccccacctcagattttgcttcccccacatatgatctgatcaaatctggctgttcccgagacgagacctgtaaggtctacccactcttcggccattatggaagatttcagtttaacgcgttcaaatttctgcgttctatgtcaagcgtctacctacagtgtaaagtccttatttgtgatagctctgaccaccaaagccgctgtaatcagggctgcgtttccagaagcaagagggacatcagctcttacaagtggaagactgactccatcattggaccaatcaggctgaaacgggatcgcagtgcatccggtaactcaggctttcaacacgagacccacgctgaggaaacccccaatcagccttttaatagcgtgcacctgttttcttttatggtgctcgcactgaacgtggtcactgtggctaccatcacagtgcgccactttgtaaatcagcgcgccgattataaatatcaaaagcttcagaactactag

SEQ ID NO: 210917 - DNA, 981 bp, Artificial Sequence
  derived and/or modified sequence
atgcgggtgatcatcagcaagagctacctggaggccttcaacagcaacgggaataatcttcaactgaaggatcccacatgccggccaaagctcagtaatgtggtggaattttctgtccctctgaatgggtgtggaaccatcagaaaggtggaagaccaatccatcacttataccaacatcataacattcagcgcgagttctaccagcgaggtgatcaccagacaaaagcagctgcagatcatcgtgaaatgtgagatgggtcataactccacagtggaaatcatttacataaccgaagatgatgttattcagtctcagaatgctctagggaaatacaatacctcgatggcgctctttgagagcaattcttttgagaaaaccatccttgaaagcccctattacgtggaccttaaccagaccctcttcgtgcaagtgtccctgcacaccagcgaccctaatctcgtcgttttcctggatacctgtagagcatcacctactagcgatttcgcctcccccacctacgacctaattaagtcagggtgctctagggatgaaacatgtaaggtgtaccctctatttggacattatggccgatttcaatttaacgcattcaagtttctgcgttcaatgagcagtgtttacctccagtgcaaggtgttgatctgtgacagctcagatcaccagagccgctgcaatcaggggtgtgtgagtaggtcaaaaagggacattagttcctataaatggaaaacagattccatcatcggacccattagactcaaacgcgaccgctctgcctctggtaactctggatttcagcacgaaactcatgctgaagagacacctaaccagccctttaacagcgtccacctgttctctttcatggtgcttgctctgaatgtagttaccgtcgcaaccattactgttcgccatttcgtgaatcagcgcgcagattacaaataccagaagttgcagaattactag

SEQ ID NO: 210918 - DNA, 981 bp, Artificial Sequence
  derived and/or modified sequence
atgcgggtgatcatcagcaagagctacctggaggccttcaacagcaacggtaataatctccagctgaaggatccaacatgtcgaccaaaattgtccaacgtcgtggaattctctgtcccactaaacggttgtggtactatccgtaaagtcgaagatcaatctatcacatatactaatattattaccttcagcgcatcatccacatctgaagtcattacaagacagaaacagcttcagattattgtgaagtgcgaaatggggcataacagcacagtggaaatcatttacatcacggaggacgacgtgatacagtcccagaacgccctggggaaatacaacaccagtatggcactattcgagtctaatagcttcgagaagactattcttgagtcaccctattatgtcgatctaaatcaaacactctttgtgcaggtgtcgctgcatactagtgacccaaatctggtggtttttttggacacttgccgggctagccctacatcagacttcgctagccccacgtacgaccttataaagtcaggttgctccagagacgagacttgcaaagtgtaccccctgtttggacattatggacggtttcagttcaacgcctttaagtttcttcgctcaatgtcctccgtgtaccttcaatgcaaggtcttgatctgtgacagctctgatcaccaatcgcgttgcaaccagggctgcgtttcacgatccaagagggacatcagttcctataagtggaagaccgattctattatcggtcccattcggctgaagcgggatcggtccgccagtggaaatagcggatttcaacacgagacccacgctgaggaaacccccaaccagcccttcaactccgtgcacctgttctcgttcatggtgctcgccctcaacgtggtaaccgtggccactattacggtgcggcacttcgtgaatcagcgggcagattataaatatcagaaactccagaactattag

SEQ ID NO: 210919 - DNA, 1824 bp, Artificial Sequence
  derived and/or modified sequence
atggagctggtgcggcggctgatgcccctgaccctgctgatcctgagttgtctggccgaactgaccatggctgaagccgagggcaacgcatcttgtaccgtgagtctgggaggagccaacatggctgaaacccataaggcgatgatcctgcagctcaacccctccgagaattgtacatggacaatagaacggccggagaataagagtatcaggattatcttctcctatgtgcagctcgatccagacgggagttgtgagagcgaaaacattaaggtcttcgacgggacttcatcgaacggtcctctgctgggccaggtttgttctaagaatgattatgttcctgtgttcgaatcatctagcagcaccttgacctttcaaatcgtcaccgactcagcgcgcattcagcggactgtctttgtcttctactactttttttctcccaacatctctattcctaactgtggggggtatctggatacacttgagggaagtttcacatccccgaattacccgaagccgcaccctgagctagcctactgcgtgtggcatatacaggtcgaaaaggattacaaaattaagcttaattttaaggaaatctttttggaaatcgacaaacagtgtaaattcgattttctggccatctacgatgggccttccactaacagcggcctgatcggacaggtctgcgggagggtcaccccaacctttgaaagtagctcaaactctttgaccgtggtgctctccactgattatgctaatagttatagaggcttttccgcctcatacacctctatctatgctgaaaacataaacactacctccctcacctgctcctctgaccgtatgcgcgttataatcagcaaatcttatcttgaagcgttcaatagcaacgggaataacctgcagttgaaagatccgacttgtcgacccaaattaagcaacgtagtagaattttctgttcctctgaacgggtgtggaacaatcaggaaagttgaggatcagtcgattacctatacgaacattatcaccttcagtgcctcttccacatcagaagtcattactcgccaaaagcaacttcaaattatcgtgaagtgcgaaatgggacacaacagcactgtcgagatcatctacataactgaagatgacgtcattcagagtcagaatgcactaggcaaatacaacacctccatggcactctttgagtccaacagcttcgagaaaactatcctggaaagcccttattacgtggaccttaaccagacactgtttgtccaggttagtcttcacaccagcgaccctaacttggtagtctttttggacacatgccgggcatctccgacatcagatttcgcttcgccaacctatgacctgatcaaaagtggctgctcccgggacgagacttgtaaggtctaccccctgttcgggcattatgggaggttccagttcaatgcctttaaatttctgcgctctatgtcctccgtgtacctccagtgcaaagtccttatatgcgacagcagcgaccaccagtcaaggtgcaatcagggttgtgtgagtaggagcaaaagggacattagttcatacaagtggaaaactgacagcatcatcggcccgattaggctgaagagagaccgatcagcaagcggcaatagtgggtttcagcacgagacccacgcggaggagacacctaaccagccattcaattccgtgcacctgtttagcttcatggtgctggccctgaacgtggtgactgtggcaaccattacagtgagacatttcgtgaatcaaagggccgattataaataccaaaagctacagaactactag

SEQ ID NO: 210920 - DNA, 726 bp, Artificial Sequence
  derived and/or modified sequence
atgggacacaacagcactgttgaaattatctatatcaccgaggatgacgttatacagtcccagaacgcactgggtaagtacaatacatcaatggccctctttgagagtaacagtttcgagaagactatcctggagtccccgtattatgtcgatctgaatcagacactctttgtgcaggtgagcttacacacctccgatcccaatttagtcgttttcctggatacatgccgagcctcacctacttcagactttgcatctcctacgtatgacctcatcaagagtggctgctcccgcgacgaaacctgtaaggtgtatcctctgtttggacactatggacggttccagtttaacgctttcaaatttttacgctcaatgtccagcgtttatctacagtgtaaagtgctgatctgtgatagtagcgatcatcagtccaggtgtaaccagggttgcgtgtcaaggagtaaacgcgacatctcttcttacaaatggaagaccgactcaattataggtcctattcgtctcaagcgcgaccgctctgccagtggcaattcaggattccaacacgagacgcacgccgaggaaacacccaaccaacccttcaattcggttcacctcttctctttcatggtgctggcattgaatgtagtaaccgtggccacaattactgttagacattttgtaaatcaacgagcggactacaaatatcagaagttgcagaactattag

SEQ ID NO: 210921 - DNA, 981 bp, Artificial Sequence
  derived and/or modified sequence
atgcgggtgattatatcaaaaagttacctggaagcgttcaactccaatgggaacaatcttcagcttaaggatcccacatgccgcccaaagcttagtaatgtggtagaatttagcgttcccctaaacgggtgtggcaccatcaggaaagttgaagatcagagcatcacctatactaatatcatcacattctcagcgtcaagtacatctgaagtaattacccgacagaagcagctccaaatcatcgtgaagtgtgagatgggccacaattccacggtcgagatcatatatattaccgaagatgatgtgattcagtcgcagaatgccttgggcaagtataacactagtatggcactcttcgagtctaacagtttcgaaaaaacaatcctcgaaagcccctactacgtggatcttaaccaaactttgttcgttcaggtatcactgcatacttctgaccccaacttggtggtgttcttggatacgtgccgcgcttccccaacctccgacttcgctagtcctacatatgatctgattaagtcaggatgttccagagacgagacttgcaaggtgtatcccctctttggtcactacggcaggtttcaatttaacgccttcaagtttctacggagcatgagcagcgtgtaccttcagtgtaaagtgctgatctgtgattctagtgaccatcagagccggtgcaaccagggatgcgttagccgttcgaaaagagatatcagcagctacaagtggaaaacagactctatcatcggccctatcagacttaagcgggacaggtcagcctccggcaattccgggtttcagcatgaaacacatgccgaggagacgcctaatcagcctttcaacagcgtacatctattttccttcatggtactggctctgaacgtggtaacagtggcaacaataaccgtccgccacttcgtcaatcagcgcgcagattacaagtaccagaagctccagaattattag

SEQ ID NO: 210922 - DNA, 981 bp, Artificial Sequence
  derived and/or modified sequence
atgcgcgtcattatatccaaatcctatcttgaggcattcaatagtaatgggaacaatctgcagctgaaagaccccacctgccgaccgaagctatcgaacgtggtggaattttctgttcctcttaatggatgcgggacaatccgaaaagtggaagaccaatccattacatacactaatatcataactttctctgcctcttccacttccgaggtgattacacgtcagaagcagctgcagataatcgtcaaatgtgagatgggccacaatagcaccgtcgagattatctatattacagaggatgatgtaattcagtcccagaacgccctgggcaagtacaacacgagcatggcactgtttgagagcaatagttttgaaaagaccattctggagtccccttactatgtggacttgaaccagacccttttcgtccaagtctcactgcatacaagcgaccctaatctggtcgtgtttctggacacttgtcgcgcaagcccaacctccgacttcgccagccctacatacgatctgatcaaatctggttgctccagggacgaaacttgcaaggtctaccccctgttcggccactacggcaggttccagtttaacgcttttaaattcctccggagcatgagcagtgtctatctgcagtgcaaggtccttatctgcgattcctccgaccatcaatctcggtgtaaccagggatgcgtctcccgctcaaaacgggatatcagcagctataaatggaagacagactccatcattggacccatccgcctgaagagagacaggtccgcttccggcaattccggttttcagcacgaaacccatgcggaggaaactcctaatcagccttttaatagtgttcatctgttcagcttcatggtcctcgcgcttaatgtcgtgaccgtggctacaatcacggtcaggcattttgtcaaccagagggctgactacaaatatcaaaagctgcagaattactag

SEQ ID NO: 210923 - DNA, 981 bp, Artificial Sequence
  derived and/or modified sequence
atgcgcgtgataattagcaaaagttacctggaggccttcaatagtaatggaaataacctccagctcaaagatcccacatgtcgcccaaaactctcaaatgtggtggaattcagcgtgccactcaacgggtgcgggactattaggaaggtggaggatcagtccatcacctacaccaacattatcaccttctcagccagctccaccagcgaggtgattacacgtcagaaacagctgcagatcatcgttaaatgcgaaatggggcacaatagcacagttgagatcatatacatcactgaagacgacgttattcagagccagaacgccctaggcaagtacaatacgagcatggctctgtttgaatcaaacagctttgagaagaccattcttgaatccccctattacgtggacctgaatcagaccctgttcgttcaggtgtcactgcacacaagtgatcctaacctagtagtgttcctcgacacctgtagggcctcacctacttcagattttgccagccccacttacgatctcatcaagtctggctgcagcagagacgagacatgtaaggtgtatccgctttttgggcactacggcagattccagttcaatgcctttaaatttctgcgtagcatgtcttcagtctatctgcagtgtaaggtcttgatctgcgactccagcgatcaccagagtaggtgtaatcagggatgcgtgtcccgatcaaagagggacataagctcctataagtggaagacagatagcatcataggcccaatcagacttaaaagagaccgctctgcatctggtaattcagggtttcagcacgagacccatgcagaagagacccccaatcagcctttcaattcggttcatcttttcagtttcatggttctggccttaaacgtggttaccgttgcaacaatcacggttagacacttcgtgaaccagcgcgcagactacaagtatcagaaactgcagaattattag

SEQ ID NO: 210924 - DNA, 1824 bp, Artificial Sequence
  derived and/or modified sequence
atggaactcgtgcgtaggctgatgccgctgaccctcctcattctctcctgcctcgcggaactaacaatggcagaggctgaaggcaacgcgtcctgcaccgtttcactgggaggtgccaacatggccgagacgcataaggccatgattctacagctcaaccccagtgagaattgcacatggactattgagagaccagaaaataagtccatccgtataatcttttcttatgtccaactggatcccgacggttcatgcgagagtgagaacatcaaggtctttgacgggaccagcagtaatggcccattgttaggtcaggtctgctctaaaaacgattacgtgccggtcttcgaatcctccagttcaactctgacatttcaaatcgttacagactccgcacgaattcagcggactgttttcgtcttctattactttttttccccaaacatctcaattcccaattgcggaggatacctggacaccttggagggctcatttacttctcctaattacccgaaaccccatcctgagctcgcttactgcgtgtggcacatccaggtggagaaagactacaaaatcaagcttaactttaaagaaatctttttagaaatagataaacaatgtaagtttgacttccttgccatatacgatgggccatcgactaattcaggactgattggccaagtgtgcggtcgtgtcactccaacttttgagtctagctccaactcactaacagtggtgctgagtacagattacgccaattcatacaggggattcagcgcctcttatactagcatctacgctgaaaatattaacactacttcacttacctgtagtagcgatcggatgagagtgattatctccaagtcttatctcgaagcctttaattctaatgggaataacctgcagttgaaagatccaacgtgccggcctaaactcagtaacgtggtagagtttagcgttcctctgaacgggtgcgggaccattcgtaaagttgaggatcagtctatcacttacaccaacatcatcaccttctcggcaagctctaccagtgaggtgatcaccagacaaaagcagctccaaataatcgtcaagtgcgagatgggccacaactctactgtcgagattatttacatcactgaggatgatgtgatccagtctcaaaacgcactgggaaagtataatacttctatggcccttttcgagtctaattctttcgagaagacgatcctggagagcccctactatgtcgacctgaatcaaaccctgtttgtgcaggtatctctgcacacatctgatccaaacctggtggtctttctcgatacatgccgggcttcccccacgagtgactttgcaagtccaacctatgatctgataaagtctgggtgtagtagggacgaaacatgcaaagtgtatcctctgttcggccattatggacgtttccaattcaatgctttcaaattcctgcgatctatgtcttccgtttatctgcagtgcaaagtactaatctgtgacagcagtgaccaccaaagtcgatgcaatcaggggtgcgtcagtagatccaagcgggatatctcctcctacaagtggaagactgatagtatcataggccctatacgcttgaaaagagatcgatctgcatccggcaactctgggtttcagcacgaaacccacgctgaggagacccctaaccaaccatttaatagcgtccatctcttcagctttatggttctcgctctcaatgtggttactgtcgccaccattactgtgagacacttcgtgaatcagagggccgactacaaatatcaaaagctccagaactattag

SEQ ID NO: 210925 - DNA, 2275 bp, Artificial Sequence
  derived and/or modified sequence
gaggccacctgtttgtgatgtgcaggcacagaagaaaggcacagctccccatcagtttcatggaaaataactcagtgcctgctgggaaccagctgctggagatccctacagagagcttccactgggggcaacccttccaggaaggagttggggagagagaaccctcactgtggggaatgctgataaaccagtcacacagctgctctattctcacacaaatctaccccttgcgtggctggaactgacgtttccctggaggtgtccagaaagctgatgtaacacagagcctataaaagctgtcggtccttaaggctgcccagcgccttgccaaaatggagcttgtaagaaggctcatgccattgaccctcttaattctctcctgtttggcggagctgacaatggcggaggctgaaggcaatgcaagctgcacagtcagtctagggggtgccaatatggcagagacccacaaagccatgatcctgcaactcaatcccagtgagaactgcacctggacaatagaaagaccagaaaacaaaagcatcagaattatcttttcctatgtccagcttgatccagatggaagctgtgaaagtgaaaacattaaagtctttgacggaacctccagcaatgggcctctgctagggcaagtctgcagtaaaaacgactatgttcctgtatttgaatcatcatccagtacattgacgtttcaaatagttactgactcagcaagaattcaaagaactgtctttgtcttctactacttcttctctcctaacatctctattccaaactgtggcggttacctggataccttggaaggatccttcaccagccccaattacccaaagccgcatcctgagctggcttattgtgtgtggcacatacaagtggagaaagattacaagataaaactaaacttcaaagagattttcctagaaatagacaaacagtgcaaatttgattttcttgccatctatgatggcccctccaccaactctggcctgattggacaagtctgtggccgtgtgactcccaccttcgaatcgtcatcaaactctctgactgtcgtgttgtctacagattatgccaattcttaccggggattttctgcttcctacacctcaatttatgcagaaaacatcaacactacatctttaacttgctcttctgacaggatgagagttattataagcaaatcctacctagaggcttttaactctaatgggaataacttgcaactaaaagacccaacttgcagaccaaaattatcaaatgttgtggaattttctgtccctcttaatggatgtggtacaatcagaaaggtagaagatcagtcaattacttacaccaatataatcaccttttctgcatcctcaacttctgaagtgatcacccgtcagaaacaactccagattattgtgaagtgtgaaatgggacataattctacagtggagataatatacataacagaagatgatgtaatacaaagtcaaaatgcactgggcaaatataacaccagcatggctctttttgaatccaattcatttgaaaagactatacttgaatcaccatattatgtggatttgaaccaaactctttttgttcaagttagtctgcacacctcagatccaaatttggtggtgtttcttgatacctgtagagcctctcccacctctgactttgcatctccaacctacgacctaatcaagagtggatgtagtcgagatgaaacttgtaaggtgtatcccttatttggacactatgggagattccagtttaatgcctttaaattcttgagaagtatgagctctgtgtatctgcagtgtaaagttttgatatgtgatagcagtgaccaccagtctcgctgcaatcaaggttgtgtctccagaagcaaacgagacatttcttcatataaatggaaaacagattccatcataggacccattcgtctgaaaagggatcgaagtgcaagtggcaattcaggatttcagcatgaaacacatgcggaagaaactccaaaccagcctttcaacagtgtgcatctgttttccttcatggttctagctctgaatgtggtgactgtagcgacaatcacagtgaggcattttgtaaatcaacgggcagactacaaataccagaagctgcagaactattaactaacaggtccaaccctaagtgagacatgtttctccaggatgccaaaggaaatgctacctcgtggctacacatattatgaataaatgaggaagggcctgaaagtgacacacaggcctgc

SEQ ID NO: 210926 - DNA, 2608 bp, Artificial Sequence
  derived and/or modified sequence
actggcaggccctcgctcagcctttggagaccatgcgcaggcgcggtgcactgtgcgcgggcaccacggcggtttttcgacgctggcggtggacgcaggcagcatggaccacggttgctgggcggatggggagcgtctatggtcagttgccttagaagtggtgagatgggaagctgcagttggaagaccctggaggatgcctgacaaggggatgtctgacacatgattggagctctttttgaaatgtttcttgcccttcctggagcagaggagccattatttatgcaggctcccttctcaaagcagagccctgaagacttcaatgatgtcaatgaggccacctgtttgtgatgtgcaggcacagaagaaaggcacagctccccatcagtttcatggaaaataactcagtgcctgctgggaaccagctgctggagatccctacagagagcttccactgggggcaacccttccaggaaggagttggggagagagaaccctcactgtggggaatgctgataaaccagtcacacagctgctctattctcacacaaatctaccccttgcgtggctggaactgacgtttccctggaggtgtccagaaagctgatgtaacacagagcctataaaagctgtcggtccttaaggctgcccagcgccttgccaaaatggagcttgtaagaaggctcatgccattgaccctcttaattctctcctgtttggcggagctgacaatggcggaggctgaaggcaatgcaagctgcacagtcagtctagggggtgccaatatggcagagacccacaaagccatgatcctgcaactcaatcccagtgagaactgcacctggacaatagaaagaccagaaaacaaaagcatcagaattatcttttcctatgtccagcttgatccagatggaagctgtgaaagtgaaaacattaaagtctttgacggaacctccagcaatgggcctctgctagggcaagtctgcagtaaaaacgactatgttcctgtatttgaatcatcatccagtacattgacgtttcaaatagttactgactcagcaagaattcaaagaactgtctttgtcttctactacttcttctctcctaacatctctattccaaactgtggcggttacctggataccttggaaggatccttcaccagccccaattacccaaagccgcatcctgagctggcttattgtgtgtggcacatacaagtggagaaagattacaagataaaactaaacttcaaagagattttcctagaaatagacaaacagtgcaaatttgattttcttgccatctatgatggcccctccaccaactctggcctgattggacaagtctgtggccgtgtgactcccaccttcgaatcgtcatcaaactctctgactgtcgtgttgtctacagattatgccaattcttaccggggattttctgcttcctacacctcaatttatgcagaaaacatcaacactacatctttaacttgctcttctgacaggatgagagttattataagcaaatcctacctagaggcttttaactctaatgggaataacttgcaactaaaagacccaacttgcagaccaaaattatcaaatgttgtggaattttctgtccctcttaatggatgtggtacaatcagaaaggtagaagatcagtcaattacttacaccaatataatcaccttttctgcatcctcaacttctgaagtgatcacccgtcagaaacaactccagattattgtgaagtgtgaaatgggacataattctacagtggagataatatacataacagaagatgatgtaatacaaagtcaaaatgcactgggcaaatataacaccagcatggctctttttgaatccaattcatttgaaaagactatacttgaatcaccatattatgtggatttgaaccaaactctttttgttcaagttagtctgcacacctcagatccaaatttggtggtgtttcttgatacctgtagagcctctcccacctctgactttgcatctccaacctacgacctaatcaagagtggatgtagtcgagatgaaacttgtaaggtgtatcccttatttggacactatgggagattccagtttaatgcctttaaattcttgagaagtatgagctctgtgtatctgcagtgtaaagttttgatatgtgatagcagtgaccaccagtctcgctgcaatcaaggttgtgtctccagaagcaaacgagacatttcttcatataaatggaaaacagattccatcataggacccattcgtctgaaaagggatcgaagtgcaagtggcaattcaggatttcagcatgaaacacatgcggaagaaactccaaaccagcctttcaacagtgtgcatctgttttccttcatggttctagctctgaatgtggtgactgtagcgacaatcacagtgaggcattttgtaaatcaacgggcagactacaaataccagaagctgcagaactattaactaacaggtccaaccctaagtgagacatgtttctccaggatgccaaaggaaatgctacctcgtggctacacatattatgaataaatgaggaagggcctgaaagtgacacacaggcctgc

SEQ ID NO: 210927 - DNA, 1824 bp, Artificial Sequence
  derived and/or modified sequence
atggagctagtacgccggctgatgcctctaaccctcttgattctgagctgcctggctgagctgaccatggcagaagctgagggtaacgccagttgcaccgtgagcctgggcggggccaatatggcagagacacacaaagccatgattctgcaacttaatccgtctgagaactgtacatggacgatcgaacggccagagaataagtccatcaggatcatcttctcttatgtccagcttgaccctgatgggtcttgtgaaagtgagaatatcaaggtctttgatggcacgagcagtaacggacccttgctcggccaggtttgcagtaagaatgattacgtgccggtctttgagagcagttcgtctaccctcaccttccagattgtcactgactcggctcgcattcagcgcacagtatttgtgttctactacttcttttctccaaacatcagtatcccgaattgtggaggctacttggacacccttgaggggtcttttacttcacctaactacccaaagccacaccctgaactggcatactgcgtgtggcatatccaggttgagaaagattacaagataaagctcaactttaaggagatctttctcgagatcgataaacaatgtaaattcgatttcctggccatttacgatgggcccagtaccaattctggtttgatcgggcaggtttgcgggcgcgtgacccccacatttgaaagttccagtaatagtcttaccgtggtcctctcgactgactatgccaacagctacagaggcttctcagctagctatacatccatctacgctgagaatattaatactactagccttacttgtagctccgaccgaatgcgagtgatcatctctaagagctatcttgaagcttttaattctaatggaaataatctgcagcttaaagatcctacttgccggccgaaactcagtaacgtggttgagtttagtgtccctctgaacgggtgcggtacaatcagaaaagtagaggaccagtctatcacttatacaaacattataaccttcagtgcatctagcacttccgaagtcattacacggcagaagcaactgcagattattgtgaagtgtgagatggggcataattccaccgttgaaataatctatatcacagaggacgacgtcattcagtcccagaacgcactgggtaaatataacactagcatggctttattcgagtccaacagctttgagaagactattctggagagcccctactacgtcgaccttaatcagaccctgttcgtccaggtctccctacacacaagcgacccaaatttggttgtgtttctggatacttgtagagcctccccgaccagcgactttgcttcgcccacttacgatttgattaaatcagggtgctcacgcgacgagacctgcaaagtatatccactcttcggtcactacggtcggtttcagtttaacgctttcaagttcctgcgctccatgtcaagcgtgtatctccaatgcaaggtcctgatatgtgattcatctgatcatcagagccggtgcaatcagggttgcgtctcacgaagtaagagggatatatcctcatacaagtggaagacagattctattatcggtcccatccgccttaagagagacaggtctgcctctgggaatagcggtttccagcatgagactcatgcagaagaaacccccaatcagcctttcaattctgtccaccttttttcatttatggtcctggctctcaacgtagtgactgtagcaacaatcacagtgcgccactttgtaaaccagcgagcagattacaaatatcagaagttgcagaactactag

SEQ ID NO: 210928 - DNA, 1824 bp, Artificial Sequence
  derived and/or modified sequence
atggagctggtacggcgattgatgccgcttacccttcttatcctaagttgcctggcagagctcactatggccgaagcggagggcaacgcgtcttgtaccgtgagccttggcggcgccaacatggccgaaactcataaggctatgatcttgcaacttaatccctcagagaattgcacatggacgattgaacggccagaaaacaaatccataaggattatcttttcatatgtgcaactcgatcccgacgggtcatgcgagtccgaaaacatcaaggtcttcgacgggaccagctccaatgggccgctcctgggccaggtgtgtagcaaaaatgattacgtgcctgtcttcgaatcgtcaagcagcacactgacatttcagattgtcacagattctgctaggatccaacggactgtgtttgtgttttattatttttttagtccaaatatctcaatacctaactgcggaggatatctggacacgttggagggaagcttcaccagtccaaactacccaaagccccaccctgaactcgcatactgtgtttggcacattcaggtggagaaagactataagatcaagctaaatttcaaagagatattcctggaaattgataagcaatgcaagtttgactttctcgcaatctacgatggacctagcacaaattctgggctgatagggcaggtctgtgggcgagtcacacctacctttgaaagctctagtaattcactgacagtcgttctgagtaccgactacgccaattcctacagggggttcagtgcctcttacacttccatctacgctgagaatattaatactaccagccttacctgtagttctgatcgcatgcgagtaattatcagcaagagttacctggaagcgtttaattccaacggcaataacctgcagctgaaggatcccacttgtagacccaaactgtctaatgtcgtggaatttagcgtccccctgaacgggtgcggaacgatccggaaggtcgaggaccaatcgataacttatacaaatatcatcacgtttagcgctagcagcacaagtgaagtgataacacgtcagaagcagcttcaaatcattgtgaagtgcgagatgggacacaacagcaccgtggaaatcatttatataaccgaagacgatgtgatccagagccagaatgccctcggaaagtacaacacatcaatggcgctgttcgaatccaatagcttcgagaagaccatcttggaatccccttactatgttgacctgaaccaaaccctgttcgtgcaggtgagcctccacacctctgaccccaacctggtagttttcttggatacttgtcgggcttctccgacttctgacttcgcatcacctacatacgatctaatcaagtccggctgctccagagatgagacctgcaaggtgtaccccctgtttggacattatggacgattccaattcaatgcatttaagtttttacgctcaatgagcagtgtatacttgcagtgcaaggtcctgatttgcgattcctccgaccatcagtctagatgtaatcaggggtgcgtctcccggtccaaacgcgacatctccagctacaagtggaaaaccgactcaattatagggcctattcgcttgaaaagggataggtctgccagcggcaattctggcttccagcacgaaacacacgcggaagagactccaaaccagcctttcaactccgtgcacttgttctcattcatggtgctggcattgaacgtggtaacagtcgctaccattaccgttcgacactttgttaatcagagagccgactacaagtaccagaagctgcagaattattag

SEQ ID NO: 210929 - DNA, 1824 bp, Artificial Sequence
  derived and/or modified sequence
atggagctggtgcggcggctgatgcccctgaccctgctgatcctgtcctgtctggccgaactgacgatggccgaggctgaggggaacgcctcctgcacagtgtcccttggtggggccaatatggccgagacccataaggcaatgatactgcagctcaacccttcagaaaattgcacgtggactatagagaggcccgagaacaagtctattaggatcatcttctcctatgttcagttggatcccgacggaagttgtgagagcgagaacataaaagtgtttgacggcacctcctccaacgggcccctgctgggccaggtgtgcagcaaaaacgattacgtgccggttttcgagagcagctcctcaactctcacatttcagattgtgaccgattctgccagaatccagcgcaccgttttcgtgttctactactttttcagcccgaacataagcattccgaactgtggcggctacctggacaccctggagggatcctttacatcacctaattaccctaaaccacatcccgaactcgcctactgcgtctggcatattcaggtagaaaaggattacaaaattaagcttaattttaaggagatcttcttggaaattgacaagcagtgcaagttcgactttttagctatctacgacggtccaagtaccaactccggcctcattggtcaagtctgtggacgcgtgacgcctactttcgaaagctcgtctaatagtctgacggtagtgttgagcaccgattacgccaattcctatcgtgggttttcagcatcctataccagcatttacgccgaaaacatcaatactacctcactgacctgcagctccgaccgcatgcgggttatcatctctaagtcttacctagaagccttcaattcaaatggaaacaatctccagctcaaggatcctacctgcagaccaaagttgagtaacgtcgttgagttctcagtgcctcttaacggctgcggtactatccgcaaggttgaggaccagagcatcacctatacgaatattatcaccttctccgcctctagcacatcagaggtgattacgcgtcaaaagcagttgcagattatagtgaagtgcgagatggggcacaactcaaccgtagagatcatttatatcaccgaagatgacgttattcagagtcagaatgcacttgggaagtacaatactagtatggccttattcgaatctaacagttttgagaagacgatccttgaaagcccctattacgtggacctaaatcaaactctgtttgtgcaggtcagtctacatacctccgatcctaacttagtggtgtttttggacacatgccgcgcatcacctacctccgactttgcctcccctacttacgatctgatcaagtcaggctgcagtcgagacgagacatgtaaggtctatcccctttttggccattatggccgattccagtttaatgccttcaaattcctacgttctatgagtagtgtgtatttacagtgcaaagtgctgatctgtgactcctcggatcatcagagtcgctgcaaccagggctgcgttagcagatctaaaagggacatttccagctacaagtggaaaactgattctattattgggccaatcaggctgaagagagatcgaagtgcaagcggaaattctggcttccaacatgaaacccacgctgaggagacccccaaccagccatttaactcagttcatttattctctttcatggtgctagcactgaacgtggttacggtggcgaccattaccgtacggcattttgttaaccaaagagctgactacaagtaccaaaaactccagaactactag

SEQ ID NO: 210930 - DNA, 1824 bp, Artificial Sequence
  derived and/or modified sequence
atggagctggtgcggcggctgatgcccctgaccctgctgatcctgtcatgtctggcggaactaacgatggccgaagccgaagggaacgcctcatgtacagtgtccctcggcggtgccaacatggcagagactcataaggccatgattcttcagctcaacccgtccgaaaactgcacctggaccattgagaggccagaaaacaaaagtatcaggattattttttcatacgtacagcttgaccccgacggctcctgtgagagcgagaatatcaaggtctttgacgggacatcctcaaacggccccttgctcgggcaagtatgcagtaagaatgattacgtacctgtgttcgagagctctagcagtaccttgaccttccagatcgtgaccgactctgctagaatccagcgcacggtatttgtgttttactatttcttcagcccaaacatttcgatacccaactgcggaggatacctggatactctggagggctccttcaccagcccgaattaccccaagccccacccagagctagcatactgcgtatggcacatccaggtggagaaggattataaaatcaagctgaacttcaaagaaatctttctggagatcgacaaacagtgcaagttcgattttctggcaatctacgatggaccctctaccaattccggtctcatcggacaagtttgtggccgagtaactccaacatttgagagcagcagcaattctctgactgtggtcctgagcacagactatgctaatagctacagagggttttccgcaagttatacgtctatctacgcagaaaacattaataccacctcactcacctgtagcagcgacagaatgcgtgtcatcatctccaaatcatacctggaagcctttaactctaacggaaataacctgcagctcaaagacccgacttgcaggcctaaattgtccaatgtcgttgaattcagcgtgcccctgaatggatgtggaactattaggaaggtggaggatcagtctattacctatactaatatcatcaccttctccgccagcagcactagcgaagtgatcacccgccaaaaacagctgcaaatcatcgtgaagtgcgagatgggacacaacagcacggtggaaatcatctacattactgaggatgacgtaatccagtcacagaatgccctgggaaagtacaacactagtatggccttgtttgaaagtaattcatttgaaaaaaccatcctcgagagcccatactacgtcgaccttaatcagaccctgtttgtgcaagttagtctacacacttccgacccgaaccttgtggtgtttttggacacgtgcagggcgagtcccacaagcgatttcgccagtccaacctacgacttgatcaaatccggctgctcacgggacgagacatgcaaggtctaccctttgtttggccactatggacgcttccagtttaacgccttcaaattcctgcggagcatgagtagcgtataccttcaatgtaaagtactcatttgtgatagctctgaccaccagagccggtgcaatcaaggctgtgtgagccggagcaagagagatatttcgtcttacaaatggaagaccgatagtatcattggccctatcaggctaaaacgggacaggtcggcatccgggaattcaggcttccaacatgagacccacgcggaggaaacccctaatcagccgtttaactccgtccatctgttctctttcatggttctcgctctcaacgtcgtgacggtggcaaccataaccgtcaggcattttgttaaccagcgggcggactacaaataccagaaactccagaattactag

SEQ ID NO: 210931 - DNA, 1824 bp, Artificial Sequence
  derived and/or modified sequence
atggaactggttagaaggctcatgcccctcactttgctcatcctttcctgtctggccgagctgacaatggcagaggcggaggggaacgcttcctgcactgtgagcctcggtggagccaatatggccgagactcataaggctatgatattgcaactgaacccttcggagaattgcacatggaccatagagcggcctgagaacaaatccattcgaatcatcttttcctatgtgcagctagaccccgatggctcttgcgagtcggagaacatcaaagtgttcgacggtacttcctccaatggccctttgcttgggcaggtttgtagcaaaaatgactacgtgccagtttttgaatcctcatctagcacgttaacttttcagatcgtgacggattctgcaagaattcagagaaccgtcttcgtgttctactatttcttctcacctaatatcagcattccaaattgcggcggatacctagacacactggaaggatcctttacaagtcccaattatcctaaacctcaccccgagctggcatattgtgtgtggcatattcaagtggaaaaggattataagattaaattgaattttaaagagatctttctggagatagacaagcagtgtaagttcgacttcctcgccatttatgacgggccttcgacaaactcaggtctgatcggccaggtttgcggcagagtcacgccaactttcgagagcagctcaaactcactcacagtagtgttgtcaaccgattatgctaattcatatcgcggattcagtgcatcttacacctccatctacgctgaaaatataaacaccacctctttgacttgtagctcagaccgcatgagagtgatcatctcaaagtcctatctggaagcttttaattccaacggtaacaatctgcaattgaaggacccgacctgtcgtccaaagttgtccaatgttgtcgagttcagtgtgccattaaacgggtgcggtaccatcagaaaagttgaagatcaaagcattacatacaccaatatcataacattctccgcatctagtacctccgaggtgatcactagacaaaagcagctgcaaatcatcgtaaagtgtgagatgggacataattcgaccgtcgagatcatatatattactgaggacgacgtgatacagtcacagaacgcattaggaaaatacaatactagtatggcgctctttgaatcaaacagcttcgagaagaccatcttagagtccccatactacgtggatctgaaccagaccttatttgtccaggtgagtctgcatacctcagatcctaatttggttgtgttcctcgacacttgcagggccagccctacctctgatttcgcctcacccacctacgatctgatcaagtcaggatgctctagggacgagacttgcaaggtttatccactcttcggacactacggtaggtttcagttcaatgcattcaagttcctgagaagtatgtcgagcgtctatttgcagtgtaaagttctgatttgcgacagtagcgaccaccagtcccgctgcaatcaaggatgcgtgtcacggtcgaagagggacatctcctcctataaatggaaaactgacagcataattggcccaatccgtctcaagcgcgatcgaagcgcttccggaaactccgggtttcaacacgagactcacgccgaagagactcccaatcaacctttcaactctgtgcacctgttctccttcatggtgctcgctctgaacgtcgtcactgtcgctactatcaccgtcagacatttcgtcaaccaaagagccgactataagtatcagaagctgcaaaactactag

SEQ ID NO: 210932 - DNA, 1824 bp, Artificial Sequence
  derived and/or modified sequence
atggagctggtgcgtaggcttatgccgctaacgctcctgatccttagttgcttagcagaactaacaatggcggaggcagagggaaacgcaagttgtaccgttagcctaggaggggctaacatggccgaaactcacaaggcaatgatccttcagctcaatccctctgaaaactgcacatggacaattgaacgacctgagaataagtcaatacgtattattttctcttacgtccagctggatcctgatgggtcctgtgaatccgagaatattaaagtgtttgacggcacctcttcaaatggacctctcctgggccaggtgtgttccaagaacgactacgtaccagttttcgaaagttcatcatccacactgaccttccaaatcgttaccgactctgccagaatacagcgcaccgtgttcgtgttctactacttcttttccccgaatattagtatccctaactgcggaggctatttggacacactagaaggttcatttacctctcctaattatccaaagccccaccctgaactggcctattgcgtatggcacatccaagtggaaaaagattacaaaatcaagctgaactttaaggaaatctttctcgagattgataagcagtgtaaatttgattttctggccatctatgacgggccaagtacaaactccggtcttatcggccaggtttgcggcagagtgacccctacctttgagtcttcaagcaactcactcacagtcgttctcagtaccgactacgctaatagttatcgaggattttcggcgagctatactagcatctacgccgagaatatcaataccacatctctgacctgttcgtctgatcgtatgcgcgtgattatcagcaaatcttaccttgaggctttcaatagtaatggcaataatctacagctgaaggatccaacttgccgccctaaactttctaacgtggtagaattcagtgtgcccctcaacggctgcggaacgatccggaaggtcgaggaccaatctataacctacacaaacattatcacattttccgcttcctctacgagtgaggtaattacaagacaaaagcaactgcaaattattgtcaaatgtgagatgggccacaatagcacggtcgaaattatttacataacagaggacgacgtgatccagagccagaacgccctgggtaagtacaacacatccatggcgttgtttgaaagcaactccttcgaaaaaacgatcctagaatctccatactacgtcgacttgaaccagactctcttcgtgcaggtgagtctccatactagcgaccccaatctagtggtgttcctggacacatgccgtgcatcgcctacctccgatttcgcatcacccacatacgacctaattaaatccggctgctcccgcgacgagacatgcaaagtgtatccactgtttggccattacgggaggttccaatttaacgcatttaaattcctgcgtagcatgtcctcagtgtaccttcaatgtaaagtgctgatctgcgattccagcgaccatcagtcacggtgtaatcagggctgcgtgtcccggtccaaaagggatatatcgtcatataaatggaaaaccgattccattatcgggccaattcggttgaagagagacaggagtgcctctggcaactcagggtttcaacatgagactcacgctgaagagactcccaaccagccatttaatagcgttcacttattttctttcatggtcctcgctctcaatgttgtgacagtcgcaaccatcaccgtccgtcactttgtcaaccagcgcgcagattacaagtatcaaaagctccagaattattag

SEQ ID NO: 210933 - protein, 486 aa, Artificial Sequence
  derived and/or modified sequence
MRGRGSQQQQPTRRQGQKLPSPSPAGKYESAQPGGTQPEPGLGARMAIHKALVMCLGLPLFLFPGAWAQGHVPPGCSQGLNPLYYNLCDRSGAWGIVLEAVAGAGIVTTFVLTIILVASLPFVQDTKKRSLLGTQVFFLLGTLGLFCLVFACVVKPDFSTCASRRFLFGVLFAICFSCLAAHVFALNFLARKNHGPRGWVIFTVALLLTLVEVIINTEWLIITLVRGSGEGGPQGNSSAGWAVASPCAIANMDFVMALIYVMLLLLGAFLGAWPALCGRYKRWRKHGVFVLLTTATSVAIWVVWIVMYTYGNKQHNSPTWDDPTLAIALAANAWAFVLFYVIPEVSQVTKSSPEQSYQGDMYPTRGVGYETILKEQKGQSMFVENKAFSMDEPVAAKRPVSPYSGYNGQLLTSVYQPTEMALMHKVPSEGAYDIILPRATANSQVMGSANSTLRAEDMYSAQSHQAATPPKDGKNSQVFRNPYVWD

SEQ ID NO: 210934 - protein, 441 aa, Artificial Sequence
  derived and/or modified sequence
MAIHKALVMCLGLPLFLFPGAWAQGHVPPGCSQGLNPLYYNLCDRSGAWGIVLEAVAGAGIVTTFVLTIILVASLPFVQDTKKRSLLGTQVFFLLGTLGLFCLVFACVVKPDFSTCASRRFLFGVLFAICFSCLAAHVFALNFLARKNHGPRGWVIFTVALLLTLVEVIINTEWLIITLVRGSGEGGPQGNSSAGWAVASPCAIANMDFVMALIYVMLLLLGAFLGAWPALCGRYKRWRKHGVFVLLTTATSVAIWVVWIVMYTYGNKQHNSPTWDDPTLAIALAANAWAFVLFYVIPEVSQVTKSSPEQSYQGDMYPTRGVGYETILKEQKGQSMFVENKAFSMDEPVAAKRPVSPYSGYNGQLLTSVYQPTEMALMHKVPSEGAYDIILPRATANSQVMGSANSTLRAEDMYSAQSHQAATPPKDGKNSQVFRNPYVWD

SEQ ID NO: 210935 - DNA, 2502 bp, Artificial Sequence
  derived and/or modified sequence
cccggagcgcagaggcccagggggtcgcgctaaacactgtacctcggggaacaaaaccgtgaaggctaattaggacaagtcggagcagggaacggggacgccgggaggggagagcgcgctccgagttgggcagaacctggaacggtcacaggaaacccgggcgcggggtagtcgggccgagggggacctttgcccacggtccagagtggtctggactcggcccacgcgtgagaggagcgcttggtgacgatcccacgtacgcttggtgactggtggaggtcccagagaaggaccgtgcgtgcaaaaggcgaacctcggtgtgcggtgtgtccacgtgtgcaagctggggaggggagggggcgcagaaggcgtgacaaagacggactctgtcttgagtgtgcgcctcgctccggcccgctcccagcgaactgtgcctgaagtgtgtctcacgggagggccaggacgaaggtgacaaaggctaggtgtcccccacggagacgcgccaaggtagccccgcgcgtgtccgtaggcgcgctctctggaagacgcggtggggggtgcgcagggctgcaccctcacaccaattgccccggcgaaggccgagcccagaaagtgagtgcgcgtgagtgtgcgcgcgcccgcatgcgggggcgtggcagtcaacagcaacaacccacacgccggcagggccagaaactcccatctccctcaccagccggaaagtacgagtcggctcagcctggagggacccaaccagagcctggcctgggagccaggatggccatccacaaagccttggtgatgtgcctgggactgcctctcttcctgttcccaggggcctgggcccagggccatgtcccacccggctgcagccaaggcctcaaccccctgtactacaacctgtgtgaccgctctggggcgtggggcatcgtcctggaggccgtggctggggcgggcattgtcaccacgtttgtgctcaccatcatcctggtggccagcctcccctttgtgcaggacaccaagaaacggagcctgctggggacccaggtattcttccttctggggaccctgggcctcttctgcctcgtgtttgcctgtgtggtgaagcccgacttctccacctgtgcctctcggcgcttcctctttggggttctgttcgccatctgcttctcttgtctggcggctcacgtctttgccctcaacttcctggcccggaagaaccacgggccccggggctgggtgatcttcactgtggctctgctgctgaccctggtagaggtcatcatcaatacagagtggctgatcatcaccctggttcggggcagtggcgagggcggccctcagggcaacagcagcgcaggctgggccgtggcctccccctgtgccatcgccaacatggactttgtcatggcactcatctacgtcatgctgctgctgctgggtgccttcctgggggcctggcccgccctgtgtggccgctacaagcgctggcgtaagcatggggtctttgtgctcctcaccacagccacctccgttgccatatgggtggtgtggatcgtcatgtatacttacggcaacaagcagcacaacagtcccacctgggatgaccccacgctggccatcgccctcgccgccaatgcctgggccttcgtcctcttctacgtcatccccgaggtctcccaggtgaccaagtccagcccagagcaaagctaccagggggacatgtaccccacccggggcgtgggctatgagaccatcctgaaagagcagaagggtcagagcatgttcgtggagaacaaggccttttccatggatgagccggttgcagctaagaggccggtgtcaccatacagcgggtacaatgggcagctgctgaccagtgtgtaccagcccactgagatggccctgatgcacaaagttccgtccgaaggagcttacgacatcatcctcccacgggccaccgccaacagccaggtgatgggcagtgccaactcgaccctgcgggctgaagacatgtactcggcccagagccaccaggcggccacaccgccgaaagacggcaagaactctcaggtctttagaaacccctacgtgtgggactgagtcagcggtggcgaggagaggcgggcggatttggggagggccctgaggacctggccccgggcaagggactctccaggctcctcctccccctggcaggcccagcaacatgtgccccagatctggaagggcctccctctctgccagtgtttgggtgggtgtcatgggtgtccccacccactcctcagtgtttgtggagtcgaggagccaaccccagcctcctgccaggatcacctcggcggtcacactccagccaaatagtgttctcggggtggtggctgggcagcgcctatgtttctctggagattcctgcaacctcaagagacttcccaggcgctcaggcctggatcttgctcctctgtgaggaacaagggtgcctaataaatacatttctgctttatt

SEQ ID NO: 210936 - DNA, 2988 bp, Artificial Sequence
  derived and/or modified sequence
aaacactccgggccgcccgccccgccaccagctggctccgaccggcgcaccgctggcgatcccccaggcaattcggcgtcatgagaaccggcaccccgagactcggcgccctgccctccctccgcgtctccagggccctggccaggcccaacaacctctccctcctctgtgcgcctcagcccctacgggcctctggcgcgggctaactaggcctcgctgcgggcccccaggactgcgcaccccaccccccgcgaggccagcagccccgggggaaggcggccggaaaatctcttgtttatcgggctggataagtaccagcctggattcgcttcccaatttctgcggtccagcttcagcagattcctggggccggaggggaaagggtggcaacccacagatccaccccggaacagggagtggggggtggggctggtgggaacctgacctcctggaaaggacggactcggagtcagagccaacgtgtcccggagcgcagaggcccagggggtcgcgctaaacactgtacctcggggaacaaaaccgtgaaggctaattaggacaagtcggagcagggaacggggacgccgggaggggagagcgcgctccgagttgggcagaacctggaacggtcacaggaaacccgggcgcggggtagtcgggccgagggggacctttgcccacggtccagagtggtctggactcggcccacgcgtgagaggagcgcttggtgacgatcccacgtacgcttggtgactggtggaggtcccagagaaggaccgtgcgtgcaaaaggcgaacctcggtgtgcggtgtgtccacgtgtgcaagctggggaggggagggggcgcagaaggcgtgacaaagacggactctgtcttgagtgtgcgcctcgctccggcccgctcccagcgaactgtgcctgaagtgtgtctcacgggagggccaggacgaaggtgacaaaggctaggtgtcccccacggagacgcgccaaggtagccccgcgcgtgtccgtaggcgcgctctctggaagacgcggtggggggtgcgcagggctgcaccctcacaccaattgccccggcgaaggccgagcccagaaagtgagtgcgcgtgagtgtgcgcgcgcccgcatgcgggggcgtggcagtcaacagcaacaacccacacgccggcagggccagaaactcccatctccctcaccagccggaaagtacgagtcggctcagcctggagggacccaaccagagcctggcctgggagccaggatggccatccacaaagccttggtgatgtgcctgggactgcctctcttcctgttcccaggggcctgggcccagggccatgtcccacccggctgcagccaaggcctcaaccccctgtactacaacctgtgtgaccgctctggggcgtggggcatcgtcctggaggccgtggctggggcgggcattgtcaccacgtttgtgctcaccatcatcctggtggccagcctcccctttgtgcaggacaccaagaaacggagcctgctggggacccaggtattcttccttctggggaccctgggcctcttctgcctcgtgtttgcctgtgtggtgaagcccgacttctccacctgtgcctctcggcgcttcctctttggggttctgttcgccatctgcttctcttgtctggcggctcacgtctttgccctcaacttcctggcccggaagaaccacgggccccggggctgggtgatcttcactgtggctctgctgctgaccctggtagaggtcatcatcaatacagagtggctgatcatcaccctggttcggggcagtggcgagggcggccctcagggcaacagcagcgcaggctgggccgtggcctccccctgtgccatcgccaacatggactttgtcatggcactcatctacgtcatgctgctgctgctgggtgccttcctgggggcctggcccgccctgtgtggccgctacaagcgctggcgtaagcatggggtctttgtgctcctcaccacagccacctccgttgccatatgggtggtgtggatcgtcatgtatacttacggcaacaagcagcacaacagtcccacctgggatgaccccacgctggccatcgccctcgccgccaatgcctgggccttcgtcctcttctacgtcatccccgaggtctcccaggtgaccaagtccagcccagagcaaagctaccagggggacatgtaccccacccggggcgtgggctatgagaccatcctgaaagagcagaagggtcagagcatgttcgtggagaacaaggccttttccatggatgagccggttgcagctaagaggccggtgtcaccatacagcgggtacaatgggcagctgctgaccagtgtgtaccagcccactgagatggccctgatgcacaaagttccgtccgaaggagcttacgacatcatcctcccacgggccaccgccaacagccaggtgatgggcagtgccaactcgaccctgcgggctgaagacatgtactcggcccagagccaccaggcggccacaccgccgaaagacggcaagaactctcaggtctttagaaacccctacgtgtgggactgagtcagcggtggcgaggagaggcgggcggatttggggagggccctgaggacctggccccgggcaagggactctccaggctcctcctccccctggcaggcccagcaacatgtgccccagatctggaagggcctccctctctgccagtgtttgggtgggtgtcatgggtgtccccacccactcctcagtgtttgtggagtcgaggagccaaccccagcctcctgccaggatcacctcggcggtcacactccagccaaatagtgttctcggggtggtggctgggcagcgcctatgtttctctggagattcctgcaacctcaagagacttcccaggcgctcaggcctggatcttgctcctctgtgaggaacaagggtgcctaataaatacatttctgctttattaa

SEQ ID NO: 210937 - DNA, 1461 bp, Artificial Sequence
  derived and/or modified sequence
atgcgagggcggggctcccagcagcaacagcctactcgaaggcagggccagaaactgccttcgccatcccccgctggaaaatatgaaagcgctcagcctgggggaacacagccagaaccaggccttggtgcgcggatggctatccacaaagctctggtcatgtgtctgggcctccctctgttcctcttcccaggggcctgggcacagggccacgtaccgcctggatgcagtcagggacttaaccctctgtactacaacctgtgcgaccgttccggagcatggggaattgtcttagaggccgtggccggggccggaatagtaactaccttcgtcctcacaatcatcctggtggcctctttacctttcgtgcaggacaccaagaaaagatcactgcttggaacacaggttttttttctgctgggcacactgggactgttttgcttggtgttcgcctgtgtggtcaagcctgacttttccacctgcgctagtcggcgatttctgtttggtgttctgttcgccatatgcttctcgtgcctagccgctcacgtgtttgccctgaacttcctggcccggaagaatcacggcccacgtggatgggtgatctttacagtggcacttctcctcaccctggttgaggttattatcaacactgaatggttgatcatcactctggttcgaggatccggggagggcggtccacagggtaacagttctgctggctgggctgtggcgtccccgtgtgctatcgcgaatatggatttcgtgatggcgcttatctacgtcatgctcctcctccttggggctttcctgggagcatggccagctttatgcgggagatacaaacgctggcgaaagcacggtgtgttcgtgctactgaccaccgccaccagcgtggcaatttgggtcgtctggatcgtaatgtatacctatgggaacaaacagcataactcacctacatgggacgacccaactctagcaatcgcactcgccgccaacgcgtgggcattcgtcctgttctacgtgatacctgaagtgtcccaagtgactaaaagttcccccgaacagtcatatcagggggacatgtaccctacacgcggcgttggatatgagacaatcctgaaggaacagaaaggtcaatccatgtttgtcgagaacaaagccttttcaatggatgagcctgtcgccgccaagcgccccgtgagcccatatagtggatataatggccagctgctgaccagcgtctaccaaccaacagagatggccctaatgcataaagttccatcagaaggtgcctatgacatcattctgcccagagcaaccgcaaactcccaagttatgggcagtgccaacagcaccctgcgcgcggaggatatgtacagtgcgcaaagtcaccaagctgcaacccccccaaaagatggcaaaaatagtcaggtatttcggaacccctacgtgtgggactag

SEQ ID NO: 210938 - DNA, 1461 bp, Artificial Sequence
  derived and/or modified sequence
atgaggggccggggcagccagcagcagcagcccacccggcggcagggccagaagctgcccagccccagccctgctgggaagtatgagagcgcccagcccggcggcacccagcctgagcccggcctgggcgccaggatggccatccacaaggccctggtgatgtgcctgggcctgcccctcttcctgtttcctggggcctgggcccagggccacgtgcccccaggctgcagccagggcctgaaccccctgtactacaacctgtgtgacagaagtggggcctggggcatcgtgctggaggccgtggccggggccggcatcgtgaccacctttgtgctgaccatcatcctggtggccagcctgccctttgtgcaggacaccaagaagaggagcctgctgggcacccaggtgttcttcctgctgggcaccctgggcctcttctgcctggtgtttgcctgtgtggtgaagccagacttcagcacctgtgccagccgccgcttcctgtttggagtgctgtttgccatctgcttcagctgcctggccgcccacgtgtttgccctgaacttcctggccaggaagaaccacggcccccggggctgggtgatcttcaccgtggccctgctgctgaccctggtggaggtgatcatcaacacagagtggctgatcatcaccctggtgcggggcagcggggagggcggcccccagggcaacagcagcgctggctgggccgtggccagcccctgtgccatcgccaacatggactttgtgatggccctgatctacgtgatgctgctgctgctgggcgccttcctgggcgcctggccagccctgtgtggccgctacaagcgctggaggaagcacggcgtgtttgtgctgctgaccacagccacctctgtggccatctgggtggtgtggatcgtgatgtacacctacggcaacaagcagcacaacagccccacctgggatgaccccaccctggccatcgccctggccgccaatgcctgggcctttgtgctcttctacgtgattcctgaggtgtcccaggtgaccaagagcagccctgagcagagctaccagggcgacatgtaccccacccggggcgtgggctatgagaccatcctgaaggagcagaagggccagagcatgtttgtggagaacaaggccttctccatggatgagcctgtggccgccaagaggcctgtgagcccctacagcggctacaacggccagctgctgacctctgtgtaccagcccacagagatggccctgatgcacaaggtgcccagcgagggcgcctatgacatcatcctgccccgggccacagccaacagccaggtgatgggcagcgccaacagcaccctgcgggcagaggacatgtacagcgcccagagccaccaggccgccaccccacccaaggatggcaagaacagccaggtgttcaggaacccctacgtgtgggactag

SEQ ID NO: 210939 - DNA, 1461 bp, Artificial Sequence
  derived and/or modified sequence
atgcggggccggggcagccagcagcagcagcccacccggcggcagggtcagaaactgccatcaccaagccctgcagggaaatacgagtctgcacagcccgggggcactcagccagaacccggactaggcgcccggatggctattcataaagccctggtgatgtgtctcggacttccgctgttcttgttcccaggtgcatgggcgcaaggacacgtgcctcccggttgtagccaggggttaaacccactgtactacaatctgtgcgacagatccggggcatggggcatcgtgctggaagcagtagccggagctggtatcgtcaccactttcgttctcaccatcattctggtggcttcactgccgtttgtgcaggatactaagaagcggtctttgttaggaacacaggttttttttctccttggcacactcggcctgttctgtctagtcttcgcctgtgtggtgaaacccgacttctctacttgtgcctcacgtaggttcctgtttggcgttctcttcgccatttgttttagttgcttggccgcccacgttttcgctctgaactttctggcgagaaaaaaccacggccccagggggtgggtgatttttactgtggccttactccttactttggtggaggttattatcaacaccgagtggcttatcatcacactggtgcgggggagcggcgagggcgggccacagggaaacagttctgccggctgggctgtggcatctccctgtgcaatagcaaacatggattttgtgatggccctgatttatgtgatgcttctgttattaggggctttcctaggcgcatggcctgcgctttgtgggagatataaacgctggcggaagcacggagtgtttgtgctgcttactaccgccacatccgtcgccatctgggtggtctggatcgtgatgtatacttacgggaataaacagcacaacagtccaacttgggacgaccctacccttgccattgcccttgctgctaacgcttgggcgttcgtactgttctacgtgattccagaagtgagtcaagtcactaagagcagcccggaacagagctatcagggcgacatgtacccaacacggggtgtcgggtacgagactatcctcaaggagcaaaagggtcagagcatgtttgttgaaaacaaggcctttagcatggacgagccagtggcagctaagcggccagtatccccatacagtggatataatggccagctcttgacctctgtgtaccagcccacagagatggctttaatgcataaagtcccttctgagggcgcatatgacatcatcctaccccgggccacagcaaattcacaagtgatgggaagtgccaatagcacactccgggcggaggatatgtattcggctcagagccaccaagccgcaacccctccaaaggacggcaagaactctcaggtcttcaggaatccatacgtctgggattag

SEQ ID NO: 210940 - DNA, 1461 bp, Artificial Sequence
  derived and/or modified sequence
atgcgcggacgaggatcccaacagcagcagcccacacggagacagggtcagaaactcccttctccatcacccgctgggaagtacgagtccgcgcagcccggagggacgcagccagaacccggactgggggctcgcatggctattcacaaagccctggtgatgtgtcttggactgccactatttctcttccccggagcttgggcccaaggccatgtccccccaggatgctcccaaggactaaaccccctatactataacctgtgtgatagatccggtgcctggggcatcgtgctggaggctgtggccggtgccggtatcgtgacaacctttgttctgactatcatcctggtcgcttctctgcctttcgtgcaagatacaaaaaagcgcagtcttcttggcacccaggtgttctttttgttagggactctcggactgttctgtttagtgtttgcctgtgttgtcaagcccgacttttccacatgcgccagtcggagattcctgtttggtgtgctcttcgccatctgtttctcctgcctggcagcccacgtgttcgccctcaactttctggctcgaaaaaaccatgggcctcgaggttgggtcatattcactgtggccctcctcctgactttagtggaagtcattatcaatactgagtggctgattatcacattagtgcggggatccggagagggaggccctcagggcaacagtagcgctgggtgggcagttgccagtccctgcgcaatagccaacatggatttcgttatggctctgatatacgtgatgctactgttattgggagcttttctgggcgcttggcccgcactgtgtggcaggtacaagcgctggcggaaacatggagtctttgtcctgcttacaacagcaacatcagtggccatctgggttgtgtggatcgttatgtatacatacggcaataagcagcacaacagccctacatgggatgaccccactctcgctattgctctcgcagcgaacgcatgggctttcgttctgttttatgtgattccagaagtgagccaagtgactaagagcagcccagagcaaagttatcaaggtgatatgtatcctacacgaggtgtggggtatgaaaccatactaaaggaacagaagggccagagcatgttcgttgagaacaaagcatttagtatggatgagccggtggccgctaagcggccagtcagcccgtatagcggatataacgggcagctgctgacctccgtctaccaaccaacagagatggcattaatgcacaaagttccatccgagggagcttatgatattatcctccctcgggctaccgcaaactcccaggtgatggggtccgccaactcaactctgcgcgctgaagacatgtattcagctcagtctcaccaggctgccacccctcctaaggacggcaagaacagccaagtgtttcggaacccctacgtgtgggactag

SEQ ID NO: 210941 - DNA, 1461 bp, Artificial Sequence
  derived and/or modified sequence
atgagaggcagaggcagccagcagcagcagcccaccagaagacagggccagaagctgcccagccccagccccgccggcaagtacgagagcgcccagcccggcggcacccagcccgagcccggcctgggcgccagaatggccatccacaaggccctggtgatgtgcctgggcctgcccctgttcctgttccccggcgcctgggcccagggccacgtgccccccggctgcagccagggcctgaaccccctgtactacaacctgtgcgacagaagcggcgcctggggcatcgtgctggaggccgtggccggcgccggcatcgtgaccaccttcgtgctgaccatcatcctggtggccagcctgcccttcgtgcaggacaccaagaagagaagcctgctgggcacccaggtgttcttcctgctgggcaccctgggcctgttctgcctggtgttcgcctgcgtggtgaagcccgacttcagcacctgcgccagcagaagattcctgttcggcgtgctgttcgccatctgcttcagctgcctggccgcccacgtgttcgccctgaacttcctggccagaaagaaccacggccccagaggctgggtgatcttcaccgtggccctgctgctgaccctggtggaggtgatcatcaacaccgagtggctgatcatcaccctggtgagaggcagcggcgagggcggcccccagggcaacagcagcgccggctgggccgtggccagcccctgcgccatcgccaacatggacttcgtgatggccctgatctacgtgatgctgctgctgctgggcgccttcctgggcgcctggcccgccctgtgcggcagatacaagagatggagaaagcacggcgtgttcgtgctgctgaccaccgccaccagcgtggccatctgggtggtgtggatcgtgatgtacacctacggcaacaagcagcacaacagccccacctgggacgaccccaccctggccatcgccctggccgccaacgcctgggccttcgtgctgttctacgtgatccccgaggtgagccaggtgaccaagagcagccccgagcagagctaccagggcgacatgtaccccaccagaggcgtgggctacgagaccatcctgaaggagcagaagggccagagcatgttcgtggagaacaaggccttcagcatggacgagcccgtggccgccaagagacccgtgagcccctacagcggctacaacggccagctgctgaccagcgtgtaccagcccaccgagatggccctgatgcacaaggtgcccagcgagggcgcctacgacatcatcctgcccagagccaccgccaacagccaggtgatgggcagcgccaacagcaccctgagagccgaggacatgtacagcgcccagagccaccaggccgccaccccccccaaggacggcaagaacagccaggtgttcagaaacccctacgtgtgggactag

SEQ ID NO: 210942 - protein, 375 aa, Artificial Sequence
  derived and/or modified sequence
MEDEMPKTLYVGNLSRDVTEALILQLFSQIGPCKNCKMIMDTAGNDPYCFVEFHEHRHAAAALAAMNGRKIMGKEVKVNWATTPSSQKKDTSNHFHVFVGDLSPEITTEDIKAAFAPFGRISDARVVKDMATGKSKGYGFVSFFNKWDAENAIQQMGGQWLGGRQIRTNWATRKPPAPKSTYESNTKQLSYDEVVNQSSPSNCTVYCGGVTSGLTEQLMRQTFSPFGQIMEIRVFPDKGYSFVRFNSHESAAHAIVSVNGTTIEGHVVKCYWGKETLDMINPVQQQNQIGYPQPYGQWGQWYGNAQQIGQYMPNGWQVPAYGMYGQAWNQQGFNQTQSSAPWMGPNYGVQPPQGQNGSMLPNQPSGYRVAGYETQ

SEQ ID NO: 210943 - DNA, 4633 bp, Artificial Sequence
  derived and/or modified sequence
aactttgctggctgctcctaggctcccggctcgccgccatcttgtattggggtttcattgttcccgctgggccgggcggtttagtgtaattgccgccggaggaggaggcggagtaacctctggtcagccgagaaaccccactatcctgtagccataaccgcttaaacgatttgggaggtagtgaagggcagggagctggacctggaggcgccgccgcgacagcagcagccatggaggacgagatgcccaagactctatacgtcggtaacctttccagagatgtgacagaagctctaattctgcaactctttagccagattggaccttgtaaaaactgcaaaatgattatggatacagctggaaatgatccctattgttttgtggagtttcatgagcatcgtcatgcagctgcagcattagctgctatgaatggacggaagataatgggtaaggaagtcaaagtgaattgggcaacaacccctagcagtcaaaagaaagatacaagcaatcatttccatgtctttgttggtgatctcagcccagaaattacaactgaagatataaaagctgcttttgcaccatttggaagaatatcagatgcccgagtggtaaaagacatggcaacaggaaagtctaagggatatggctttgtctcctttttcaacaaatgggatgctgaaaacgccattcaacagatgggtggccagtggcttggtggaagacaaatcagaactaactgggcaacccgaaagcctcccgctccaaagagtacatatgagtcaaataccaaacagctatcatatgatgaggttgtaaatcagtctagtccaagcaactgtactgtatactgtggaggtgttacttctgggctaacagaacaactaatgcgtcagactttttcaccatttggacaaataatggaaattcgagtctttccagataaaggatattcatttgttcggttcaattcccatgaaagtgcagcacatgcaattgtttctgttaatggtactaccattgaaggtcatgttgtgaaatgctattggggcaaagaaactcttgatatgataaatcccgtgcaacagcagaatcaaattggatatccccaaccttatggccagtggggccagtggtatggaaatgcacaacaaattggccagtatatgcctaatggttggcaagttcctgcatatggaatgtatggccaggcatggaaccagcaaggatttaatcagacacagtcttctgcaccatggatgggaccaaattatggagtgcaaccgcctcaagggcaaaatggcagcatgttgcccaatcagccttctgggtatcgagtggcagggtatgaaacccagtgaataaggactccagaatctaaagccagtggcttgaggctacagggagtgtagtaaagccgttgtttacttaaagatttatcaaatcagtcagtgcaaatgtcagatacaatgtatttatttaaaagattcatttttaatcatgaaattacttatcatccacattgttttaaaaagaaacaagatgctggatgtctgccaatttttgccttcattaccttttttgataaagtttctcagatccttgtttcaaacacaaatgcagggattgctgccactttttaactattaagaggcagaaaattgcacaatattgaacttttttccactgaagtagtgtgcagttctagtttgcattcctgatatgatttaaaacatgtaatataaagatgttaaaaaaaaaaaccaaaactgtgcagagtctagaagttgtttgtcatcttcagcttgtgcacaattctgttttaggttaaaaaaaggcattgtttgagctgtcccatctccactgttatccctttggggttttttaatataaattattagtttacatcatttttgtatctacatcttttttcacaaatttgtcttgccttattaaagttctgtaaaatatacttaaatggaaaaaatgatgttcatttagattgaaaacttttctcagatggattgataattgcattcatcttgtgttttatatgagaaggtgcctcaagaatttcctgttggatttgtttaaaaggatttttatctttcgtgataaactttgctgtgtaccaggaactataaaaacaaaaacttgttactaaagaaaatatctgaaatgtgataagttcttatgccatgttaatttcatgtgtcaacttcaacatttacatgtattatttcattatgtaaaatgttttagcaatttaatattttgcacagttagcaaactttgtatgtcatttccttcaaggcatcatgcagagttgacatgagatttataaggttttaagttgtttgcatgtgaaaatcaaatacatactttggtagtctttgaatacaaagtcatctgctcttgtttttcaagaattttgagacacaaagttgtatgtaaaggaatatattaatttgccgttttctaggtagatttgctcaaaaagagtgaatcaacttaatatgtacaaatgatagctgtgaaactgtagaatatctttgtgtcaggcttggagttcattgtgacctccaaattttgcctgaaggaccagctgggcaaagcatcttttaaatgttcagaggccaaaagataaacaaaaaaaaaaccttaaaatcctacctctttaaacagccttcagataagagaatcctcagtgcaatcattattttgattcgtttggtacctgttttcctggagttcccgattttattattttggggtggctccaagcattaagaggtttaatctttgatggcattgttctagttttgaaatttctagtatatttcagagtctcttagaagacttgtgtgggaagtttcactttgttttcagtgaagatcacaaacctccttcttcctttactcaagaggaaaggtcccagtatacatatttgaatggttgatggttttcaagaccttcagggagctccctgcattttacctagaaacagaaaaggcccgcaaaatcttaagtttcctggcctgcatttcccgggtaggggcaaatgactccaagctggtctctaagccaatacccttataaaccagagcccaggaaagacagctcgagtgtataattctctggagctcaattctatgcagttgtgctgatatttcattaagtcactgtgtatttttaagtgttgatacattaaaagtcgctttatggaagatgagtaaattttttaaatacttggaaattttatttccttgttaacttctacagatcagggcatgcaaccaaaagcagcttaaatgaaatattttaaaataaaatatcaggaagctatttttagatttcttctggcttatgtttctactttaggaccctcattgttctcttattaaaaaaaattatttcctgtgcatctcatggactgcagggtaaattatttgggcataaataatttaaatagttttctttcattttgactatctccagtaataacagtttttattatccagcatattggcttattgcacaaatcttaaaatgtacattgactactttctgagaagaaagtggtatcagtactcatgatgaaaaggttactactgaacaaattcacatttcaggaacacctctatctttggtttaaatcttactcttagtttttccgtctaaaaatcatactggtattagtatcaggtaaggaaattaaagtttttaaaatggtttcattctctgcaatatgcaaaatttagattttactttctggtactgtaaagaacctgaagtgatttacacttaatgggtgattaatccagtattctttaccctgaatgtttggatattaaagttcctttatgttttctataacctgtgggatcttcttgcagtgattattgtgtgtgagattttttttctttttggtctatccatattgttatattcactcaggtattttttttttaatcttattccagaatcagtggtttatattgggttactgtttaacaccaaatggaattggcattctgcagatttaattaattatgaaaccagggtctcattttccttgctgatacttgttgaaaatgagattcacattctagtctttattttcctcctgttttgtccctgtgcttgtacatcttccttttatttgtgtgttatagttctattccatttgagaaggcagttggtaagaactagattgcatgtacaaagacaggtttactaagtgctgtacagtggtcctgaggttacagttgaattagaaaaacgaaatgtacttacaggaaataagaaagcaaacctttcaaatgagagtgatgatttctttaaaaaaaatcagtttttttctctcaaataatgttctttatttcacgaaatcgtcaatcttaagcatgagcagggataaacaactcctagaaggaactcaattcattcttcctggattttctctgttgttaaatcacaaaaatgatagtccccaatcgtttctttataggaggttattacatttcattacagtcactgcattttgactgttgtgtttagaatttgaatgtacatccaaaatgatgagtttcaatttaagagccttaataaaatgtgtgagtgtgtctcaattgaa

SEQ ID NO: 210944 - DNA, 1128 bp, Artificial Sequence
  derived and/or modified sequence
atggaggacgagatgcccaagaccctgtacgtgggcaacctgagcagagacgtgaccgaggccctgatcctgcagctgttcagccagatcggcccctgcaagaactgcaagatgatcatggacaccgccggcaacgacccctactgcttcgtggagttccacgagcacagacacgccgccgccgccctggccgccatgaacggcagaaagatcatgggcaaggaggtgaaggtgaactgggccaccacccccagcagccagaagaaggacaccagcaaccacttccacgtgttcgtgggcgacctgagccccgagatcaccaccgaggacatcaaggccgccttcgcccccttcggcagaatcagcgacgccagagtggtgaaggacatggccaccggcaagagcaagggctacggcttcgtgagcttcttcaacaagtgggacgccgagaacgccatccagcagatgggcggccagtggctgggcggcagacagatcagaaccaactgggccaccagaaagccccccgcccccaagagcacctacgagagcaacaccaagcagctgagctacgacgaggtggtgaaccagagcagccccagcaactgcaccgtgtactgcggcggcgtgaccagcggcctgaccgagcagctgatgagacagaccttcagccccttcggccagatcatggagatcagagtgttccccgacaagggctacagcttcgtgagattcaacagccacgagagcgccgcccacgccatcgtgagcgtgaacggcaccaccatcgagggccacgtggtgaagtgctactggggcaaggagaccctggacatgatcaaccccgtgcagcagcagaaccagatcggctacccccagccctacggccagtggggccagtggtacggcaacgcccagcagatcggccagtacatgcccaacggctggcaggtgcccgcctacggcatgtacggccaggcctggaaccagcagggcttcaaccagacccagagcagcgccccctggatgggccccaactacggcgtgcagcccccccagggccagaacggcagcatgctgcccaaccagcccagcggctacagagtggccggctacgagacccagtag

SEQ ID NO: 210945 - DNA, 1128 bp, Artificial Sequence
  derived and/or modified sequence
atggaggacgaaatgccaaagaccctctacgtgggtaacctatcccgcgatgtgactgaggcattaattcttcagcttttcagccaaatcgggccttgtaagaactgcaagatgattatggacacggccggtaacgatccgtattgcttcgtggagtttcacgagcacagacacgcagctgcggcactcgccgctatgaacgggagaaaaattatgggaaaggaagtcaaggtcaactgggccacaacaccttcatcccaaaagaaggacacttcaaatcattttcacgtttttgttggcgacctgtcccctgagattactacagaggatattaaggcagcattcgccccgttcggtagaattagcgacgccagggtggtgaaagatatggccacaggcaaaagcaagggatatggctttgtgagctttttcaacaagtgggacgcagaaaatgccatacagcagatgggcggccaatggcttgggggtaggcaaatccgcaccaattgggctacccggaagcctcccgccccaaagagtacctatgaaagcaataccaaacagctgtcttacgacgaggtggttaatcagtcatcaccgtcaaactgtaccgtctattgtgggggggtcacatcagggcttaccgagcagctcatgcgccaaaccttcagtccttttggtcagattatggagattagagtcttcccagataaaggatactcttttgttcggtttaatagtcacgaatccgcagctcacgcgatagtatctgtgaatggaactacaatagaggggcatgtggtcaaatgttactgggggaaggaaactttggacatgataaatccagtacagcagcagaaccaaatcgggtatccccagccctacgggcagtggggacaatggtacggtaatgctcagcaaatcggtcagtatatgcccaatgggtggcaagtgcccgcctacggcatgtacggtcaagcttggaatcagcaagggttcaatcaaacgcaaagctcggcaccttggatgggacccaactacggggtgcagcccccccagggccagaatgggagtatgctgcccaaccaacccagcggttacagggtagcagggtatgagactcagtag

SEQ ID NO: 210946 - DNA, 1128 bp, Artificial Sequence
  derived and/or modified sequence
atggaggatgagatgcccaagaccctgtatgtgggcaacctgagcagagatgtgacagaggccctgatcctgcagctgttcagccagatcggcccctgcaagaactgcaagatgatcatggacacagctggaaatgacccctactgctttgtggagttccacgagcacagacatgctgctgctgccctggccgccatgaatggaaggaagatcatgggcaaggaggtgaaggtgaactgggccaccacccccagcagccagaagaaggacaccagcaaccacttccacgtgtttgtgggggacctgagccctgagatcaccacagaggacatcaaggccgcctttgcccccttcggccgcatcagtgatgcccgggtggtgaaggacatggccaccgggaagagcaagggctacggctttgtgtccttcttcaacaagtgggatgctgaaaatgccatccagcagatgggcggccagtggctgggcggccggcagatccgcaccaactgggccaccaggaagcccccagcccccaagagcacctatgagagcaacaccaagcagctgtcctatgatgaggtggtgaaccagagcagccccagcaactgcaccgtgtactgcggcggcgtgaccagcggcctgacagagcagctgatgaggcagaccttcagccccttcggccagatcatggagatccgggtcttcccagacaagggctacagctttgtgcgcttcaacagccatgagagcgctgcccacgccatcgtgtctgtgaatggcaccaccatcgagggccacgtggtgaagtgctactggggcaaggagaccctggacatgatcaaccctgtgcagcagcagaaccagatcggctacccccagccctacggccagtggggccagtggtatggaaatgcccagcagatcggccagtacatgcccaacggctggcaggtgcctgcctacggcatgtatggccaggcctggaaccagcagggcttcaaccagacccagagcagcgccccctggatgggccccaactatggagtgcagcccccccagggccagaatggctccatgctgcccaaccagcccagcggctacagagtggccggctatgagacccagtag

SEQ ID NO: 210947 - DNA, 1128 bp, Artificial Sequence
  derived and/or modified sequence
atggaggacgagatgcccaagaccctgtacgtgggcaacctgagcagggacgtgacagaggctcttatcttgcaattgttttcccagatcggaccttgtaaaaactgtaagatgatcatggatactgcaggcaacgacccttactgcttcgtggaattccatgagcaccggcacgccgctgcagcattagcagcaatgaacggacgtaaaatcatggggaaggaagtaaaagttaactgggccactacaccgtcatcccagaagaaggatacctcgaaccacttccatgttttcgtgggggatctgtctcccgaaatcacaactgaagacatcaaggctgccttcgcaccattcggtaggatatctgacgcgcgcgtcgtgaaagacatggccacaggtaaatcaaaaggctacgggtttgtgtcctttttcaacaaatgggatgcagaaaacgctattcagcagatgggcggacagtggctgggcggcagacagattcgcactaactgggccaccaggaaaccaccagccccaaagtcaacctacgaatctaacaccaagcagctgagttatgacgaggtcgtgaaccaaagttcaccgtccaattgcacagtttattgcgggggggtgactagcggcctgaccgaacagctcatgcgccagacctttagtccttttggccaaattatggagatcagggtgtttcccgacaaagggtactccttcgttcgattcaacagccatgaatccgcagcccacgcaatcgtttctgtcaatggaacaacgatagagggacacgtggtgaaatgttactggggcaaagagacattggacatgatcaaccctgtccagcagcagaaccaaatagggtacccccagccctacggtcagtggggacaatggtacggcaacgcgcagcagattggccagtatatgcccaacggatggcaagttccagcgtacggaatgtacgggcaggcgtggaaccagcaggggttcaatcaaacacagtcctctgctccctggatgggccccaactacggagttcaaccccctcagggccaaaacggcagtatgcttccaaaccagccatccggctatcgtgtcgctggatatgagactcagtag

SEQ ID NO: 210948 - DNA, 1128 bp, Artificial Sequence
  derived and/or modified sequence
atggaagatgagatgcccaaaaccctgtacgtgggtaatctgagcagggacgttaccgaagctctgatactgcagctgttttcccagatcgggccttgcaagaactgtaagatgatcatggataccgcagggaatgacccctactgtttcgttgagtttcatgaacaccgtcacgctgctgcggctctcgctgctatgaatggccgaaagattatgggcaaagaggtaaaggtgaactgggctacaacaccaagtagccagaaaaaagatacaagcaatcacttccacgtcttcgtcggcgacctctcacctgaaatcaccactgaggacatcaaggcagctttcgccccttttggccgaatctcagacgccagggtggtcaaggatatggccacagggaagtcaaaaggatacggcttcgtgtcgttcttcaacaagtgggacgctgagaatgccatccaacagatggggggtcagtggcttgggggacgccagatacgaaccaattgggctaccaggaagccacctgctccgaagtccacttatgagtctaataccaagcaactgtcatacgatgaagtggtcaatcaatcctctccctccaactgcaccgtctactgtgggggtgtgactagcggcctgactgaacagctgatgaggcagacgttcagcccctttggtcagataatggaaatacgcgtcttccctgataagggatattctttcgtacggtttaacagtcatgagtccgctgctcacgctatagtctcagtgaacggtaccacgatcgagggccatgtcgttaaatgctattgggggaaagagacactggatatgatcaacccggtccagcagcagaatcagatcgggtatccccagccatatggccagtggggacagtggtatggaaatgcccagcaaattgggcagtatatgcccaatggatggcaggtgccagcatacggaatgtatggtcaggcctggaatcaacaagggtttaatcaaacacaaagttcggctccctggatgggacccaattacggggtccagccgcctcaggggcagaatggtagcatgcttccaaatcagcccagcgggtatagagttgccggatatgaaacacagtag

SEQ ID NO: 210949 - protein, 412 aa, Artificial Sequence
  derived and/or modified sequence
MAAAAGEEEEEEEAARESAARPAAGPALWRLPEELLLLICSYLDMRALGRLAQVCRWLRRFTSCDLLWRRIARASLNSGFTRLGTDLMTSVPVKERVKVSQNWRLGRCREGILLKWRCRQMPWMQLEDDSLYISQANFILAYQFRPDGASLNRRPLGVFAGHDEDVCHFVLANSHIVSAGGDGKIGIHKIHSTFTVKYSAHEQEVNCVDCKGGIIVSGSRDRTAKVWPLASGRLGQCLHTIQTEDRVWSIAISPLLSSFVTGTACCGHFSPLRIWDLNSGQLMTHLGSDFPPGAGVLDVMYESPFTLLSCGYDTYVRYWDLRTSVRKCVMEWEEPHDSTLYCLQTDGNHLLATGSSYYGVVRLWDRRQRACLHAFPLTSTPLSSPVYCLRLTTKHLYAALSYNLHVLDFQNP

SEQ ID NO: 210950 - protein, 412 aa, Artificial Sequence
  derived and/or modified sequence
MAAAAGEEEEEEEAARESAARPAAGPALWRLPEELLLLICSYLDMRALGRLAQVCRWLRRFTSCDLLWRRIARASLNSGFTRLGTDLMTSVPVKERVKVSQNWRLGRCREGILLKWRCSQMPWMQLEDDSLYISQANFILAYQFRPDGASLNRRPLGVFAGHDEDVCHFVLANSHIVSAGGDGKIGIHKIHSTFTVKYSAHEQEVNCVDCKGGIIVSGSRDRTAKVWPLASGRLGQCLHTIQTEDRVWSIAISPLLSSFVTGTACCGHFSPLRIWDLNSGQLMTHLGSDFPPGAGVLDVMYESPFTLLSCGYDTYVRYWDLRTSVRKCVMEWEEPHDSTLYCLQTDGNHLLATGSSYYGVVRLWDRRQRACLHAFPLTSTPLSSPVYCLRLTTKHLYAALSYNLHVLDFQNP

SEQ ID NO: 210951 - protein, 191 aa, Artificial Sequence
  derived and/or modified sequence
MTSVPVKERVKVSQNWRLGRCREGILLKWRCRQMPWMQLEDDSLYISQANFILAYQFRPDGASLNRRPLGVFAGHDEDVCHFVLANSHIVSAGGDGKIGIHKIHSTFTVKYSAHEQEVNCVDCKGGIIVSGSRDRTAKVWPLASGRLGQCLHTIQTEDRVWSIAISPLLSSFVTGTACCGHFSPLRIWDLN

SEQ ID NO: 210952 - DNA, 2483 bp, Artificial Sequence
  derived and/or modified sequence
aagtggctccaaggctgcaggtgtgaggggcgtgcccagggctcggcccgcgccgccccatgtgacccggtccgacatggtgtcgcctcctcccggggcggcggcggtggcggctcgggctgggctccgcgtcgggccggccccgcggccgctcatgggcagccagggccgctcggggccccccgggaacggcgggcccggcgagggcgagggcggagaggcgaggaagctgcaggaagggagggtggcgagggggaagcgaaggaaggggaaggggaagggaaaagcgagagcggggcaaggcggaagaggaagcggggcggaagggaagcccgggccgcagacggcgaaggaggcagccgggccgggggctgacgcgggagcgagggcatgcccaagggaggaagcagagggaggcagaagcgtggaggaaggggcgagaggcatcgtcaagggagtcgaggggagcgcaggggccgggaaggaggcacaaggaagagagtatgggaagaaggaggaatggagggtcagggctaggcggcgggagggcgccaggccgggaagagcacagggacgagggggtcaggcttgggccgacatcgcggggacaggggtggccatggcggcggcggccggggaggaggaggaggaggaggaggcggctcgggagtcggctgcccgcccggccgcggggcctgcgctctggcgcctgccggaggagctgctgctgctcatctgctcctacctggacatgcgggccctcggccgcctggcccaggtgtgccgctggctgcggcgcttcaccagctgcgatctgctctggcgccggatagcccgggcctcgctcaactccggcttcacgcggctcggcaccgacctgatgaccagtgtcccagtgaaggaacgagtgaaggtgtctcagaactggagactggggcgctgccgagaggggattctgctgaagtggagatgcaggcaaatgccctggatgcagctagaggatgattctctgtacatatcccaggctaatttcatcctggcctaccagttccgtccagatggtgccagcttgaatcgtcggcctctgggagtctttgctgggcatgatgaggacgtttgccactttgtgctggccaactcgcatattgttagtgcaggaggggatgggaagattggcattcataagattcacagcaccttcactgtcaagtactcggctcatgaacaggaggtgaactgtgtggattgcaaagggggcatcattgtgagtggctccagggacaggacggccaaggtgtggcctttggcctcaggccggctggggcagtgcttacacaccatccagactgaagaccgagtctggtccattgctatcagcccattactcagctcttttgtgacagggacggcttgttgcgggcacttctcacccctgagaatctgggacctcaacagtgggcagctgatgacacacttgggcagtgactttcccccaggggctggggtgctggatgtcatgtatgagtcccctttcacactgctgtcctgtggctatgacacctatgttcgctactgggacctccgcaccagcgtccggaaatgtgtcatggagtgggaggagccccacgacagcaccctgtactgcctgcagacagatggcaaccacctgctggccacaggttcctcctactacggtgttgtacggctgtgggaccggcgtcaaagggcctgcctgcacgccttcccgctgacgtcgactcccctcagcagccctgtgtactgcctgcgtctcaccaccaagcatctctatgctgccctgtcttacaacctccacgtcctggattttcaaaacccatgaccgtcagggccacccctgcctctgggccagggaaaccagctactcagggacttctcttgcctggagggtgcagtgatagctcctcctcactgccccactgtgctcctgggcctgtgaccccagtgctcaggcaccttgcactagaggcttctgactcctgggactttggagcttaccagagatgcagtccctcccaggaacctgttggagaggcaggacctgctgctttagagtgcggctgaacccgggccttgcgtccctgtttggccagagcaaggatctggcctggagaggcccatcctataccccttattagagccatgacagcctacagagtgaggtgaggtgctcccaccttcccagatggttcctttctgccccttcctggaaggaaaggtgaggctgccaatagcctcctggcaccagccagacctcacccttgaccaacctctcggggctgggggttcattcctggggcactgtggcctggttttgctttgaaaccaagaaagagcaaagggaacccagcagttctgagtgagttctgagccagccctacctcaggctggctgttgagacatgctacaattttcatttttgtaaaaataaagcttgattgttcaca

SEQ ID NO: 210953 - DNA, 2209 bp, Artificial Sequence
  derived and/or modified sequence
ggggaagggaaaagcgagagcggggcaaggcggaagaggaagcggggcggaagggaagcccgggccgcagacggcgaaggaggcagccgggccgggggctgacgcgggagcgagggcatgcccaagggaggaagcagagggaggcagaagcgtggaggaaggggcgagaggcatcgtcaagggagtcgaggggagcgcaggggccgggaaggaggcacaaggaagagagtatgggaagaaggaggaatggagggtcagggctaggcggcgggagggcgccaggccgggaagagcacagggacgagggggtcaggcttgggccgacatcgcggggacaggggtggccatggcggcggcggccggggaggaggaggaggaggaggaggcggctcgggagtcggctgcccgcccggccgcggggcctgcgctctggcgcctgccggaggagctgctgctgctcatctgctcctacctggacatgcgggccctcggccgcctggcccaggtgtgccgctggctgcggcgcttcaccagctgcgatctgctctggcgccggatagcccgggcctcgctcaactccggcttcacgcggctcggcaccgacctgatgaccagtgtcccagtgaaggaacgagtgaaggtgtctcagaactggagactggggcgctgccgagaggggattctgctgaagtggagatgcagtcagatgccctggatgcagctagaggatgattctctgtacatatcccaggctaatttcatcctggcctaccagttccgtccagatggtgccagcttgaatcgtcggcctctgggagtctttgctgggcatgatgaggacgtttgccactttgtgctggccaactcgcatattgttagtgcaggaggggatgggaagattggcattcataagattcacagcaccttcactgtcaagtactcggctcatgaacaggaggtgaactgtgtggattgcaaagggggcatcattgtgagtggctccagggacaggacggccaaggtgtggcctttggcctcaggccggctggggcagtgcttacacaccatccagactgaagaccgagtctggtccattgctatcagcccattactcagctcttttgtgacagggacggcttgttgcgggcacttctcacccctgagaatctgggacctcaacagtgggcagctgatgacacacttgggcagtgactttcccccaggggctggggtgctggatgtcatgtatgagtcccctttcacactgctgtcctgtggctatgacacctatgttcgctactgggacctccgcaccagcgtccggaaatgtgtcatggagtgggaggagccccacgacagcaccctgtactgcctgcagacagatggcaaccacctgctggccacaggttcctcctactacggtgttgtacggctgtgggaccggcgtcaaagggcctgcctgcacgccttcccgctgacgtcgactcccctcagcagccctgtgtactgcctgcgtctcaccaccaagcatctctatgctgccctgtcttacaacctccacgtcctggattttcaaaacccatgaccgtcagggccacccctgcctctgggccagggaaaccagctactcagggacttctcttgcctggagggtgcagtgatagctcctcctcactgccccactgtgctcctgggcctgtgaccccagtgctcaggcaccttgcactagaggcttctgactcctgggactttggagcttaccagagatgcagtccctcccaggaacctgttggagaggcaggacctgctgctttagagtgcggctgaacccgggccttgcgtccctgtttggccagagcaaggatctggcctggagaggcccatcctataccccttattagagccatgacagcctacagagtgaggtgaggtgctcccaccttcccagatggttcctttctgccccttcctggaaggaaaggtgaggctgccaatagcctcctggcaccagccagacctcacccttgaccaacctctcggggctgggggttcattcctggggcactgtggcctggttttgctttgaaaccaagaaagagcaaagggaacccagcagttctgagtgagttctgagccagccctacctcaggctggctgttgagacatgctacaattttcatttttgtaaaaataaagcttgattgttcac

SEQ ID NO: 210954 - DNA, 756 bp, Artificial Sequence
  derived and/or modified sequence
gggcgccaggccgggaagagcacagggacgagggggtcaggcttgggccgacatcgcggggcctgcgctctggcgcctgccggaggagctgctgctgctcatctgctcctacctggacatgcgggccctcggccgcctggcccaggtgtgccgctggctgcggcgcttcaccagctgcgatctgctctggcgccggatagcccgggcctcgctcaactccggcttcacgcggctcggcaccgacctgatgaccagtgtcccagtgaaggaacgagtgaaggtgtctcagaactggagactggggcgctgccgagaggggattctgctgaagtggagatgcaggcaaatgccctggatgcagctagaggatgattctctgtacatatcccaggctaatttcatcctggcctaccagttccgtccagatggtgccagcttgaatcgtcggcctctgggagtctttgctgggcatgatgaggacgtttgccactttgtgctggccaactcgcatattgttagtgcaggaggggatgggaagattggcattcataagattcacagcaccttcactgtcaagtactcggctcatgaacaggaggtgaactgtgtggattgcaaagggggcatcattgtgagtggctccagggacaggacggccaaggtgtggcctttggcctcaggccggctggggcagtgcttacacaccatccagactgaagaccgagtctggtccattgctatcagcccattactcag

SEQ ID NO: 210955 - DNA, 688 bp, Artificial Sequence
  derived and/or modified sequence
ctcacgtgtttgcagcgcgaactcctgtgcttccaccaagcgctctcggggatgcgggggtggtgtcagcgccccggccccagcccgcaccccgaagtggctccaaggctgcaggatgaccagtgtcccagtgaaggaacgagtgaaggtgtctcagaactggagactggggcgctgccgagaggggattctgctgaagtggagatgcaggcaaatgccctggatgcagctagaggatgattctctgtacatatcccaggctaatttcatcctggcctaccagttccgtccagatggtgccagcttgaatcgtcggcctctgggagtctttgctgggcatgatgaggacgtttgccactttgtgctggccaactcgcatattgttagtgcaggaggggatgggaagattggcattcataagattcacagcaccttcactgtcaagtactcggctcatgaacaggaggtgaactgtgtggattgcaaagggggcatcattgtgagtggctccagggacaggacggccaaggtgtggcctttggcctcaggccggctggggcagtgcttacacaccatccagactgaagaccgagtctggtccattgctatcagcccattactcagctcttttgtgacagggacggcttgttgcgggcacttctcacccctgagaatctgggacctcaac

SEQ ID NO: 210956 - DNA, 1239 bp, Artificial Sequence
  derived and/or modified sequence
atggccgcagctgctggtgaagaagaggaggaggaagaggctgctcgcgagagcgcagccagacccgccgcaggccctgctctatggagactcccagaggagttactcctactgatttgctcatatttagatatgagagccctgggtaggcttgcacaggtgtgtaggtggttgaggagatttacaagctgtgatctgctgtggaggcgcattgctagggccagcctgaatagcgggtttacgcggttgggcactgatctgatgacaagcgtgccggtgaaagaacgcgtgaaggtcagccaaaactggcgactgggacgatgccgagagggcatcctgctgaagtggaggtgcagacagatgccctggatgcagctcgaggatgattcattgtatattagccaggccaacttcattttggcttaccaattcagacccgacggcgcaagcctgaataggcgccccctgggggtctttgccggccatgatgaggacgtttgccattttgtgctcgccaatagtcatatcgtctctgcaggaggagatggtaaaattggcatccataagattcacagtaccttcaccgtcaagtatagtgctcatgagcaggaggtgaattgtgtggattgcaaggggggcatcattgtcagtggcagccgcgatagaaccgccaaggtatggcctctagcgtctggtaggctcggtcagtgcctgcatactatccagactgaggacagagtttggtcaattgccatttcccctcttctgtcatcttttgtcaccggcactgcctgctgcgggcacttttccccactgagaatctgggatcttaattccggccagctcatgacccaccttggctcagacttcccacccggtgctggggtgctcgatgttatgtatgagtctccatttactttgctgtcttgtggttacgacacctacgtccgatattgggaccttcgcactagcgtgaggaagtgcgtcatggagtgggaggagccgcatgattccaccctttactgcctccagaccgacgggaaccaccttctagccaccgggagctcttactatggggtcgtccgactatgggatcgccggcaaagggcctgcttgcacgcgtttccactgacctcgacccctctgagcagtcccgtgtattgcctgcgtctgacaactaagcatctgtatgccgcgttatcatataacttgcatgtgctggacttccagaacccatag

SEQ ID NO: 210957 - DNA, 1239 bp, Artificial Sequence
  derived and/or modified sequence
atggcagccgccgccggcgaagaggaagaggaggaagaagcggcgcgggaatccgccgcaagaccggctgccggccccgcgttgtggcgcctgcccgaagagctgctactgctaatctgctcatatcttgacatgagggctctggggagactagcacaagtgtgcagatggctgcggcggttcacaagctgcgacctgctctggagacgaatcgcccgagcttccttgaatagcggattcacccgactcggcaccgacctcatgacctcagtaccggttaaagagcgcgtcaaagtttcacagaactggcggctcgggagatgccgtgaagggatattactgaaatggcggtgcagccagatgccatggatgcagctggaggatgattctctgtatatcagccaggcgaactttattctggcatatcagttccggcctgatggagcctcgctaaacagacggcccctgggagtgttcgctggacacgatgaggatgtgtgtcattttgtgttagcgaattcacacatcgtatccgccggcggtgacggcaagatcggtatccataagattcactcaacctttacggtgaaatatagcgcgcacgagcaggaggtcaactgtgttgactgtaaaggagggatcatagtgtctggaagccgagataggaccgccaaagtctggcctctggcctccggtaggcttggccagtgcctgcacacaattcagacagaggaccgcgtgtggtccatcgcaatttcccccttgttgtcatcctttgtaacaggaaccgcctgctgtggccactttagcccactgaggatttgggatttaaattcaggccaactgatgacccacctgggaagtgatttcccgccgggagctggggtgctggatgtcatgtacgagtctccttttactctcttgagttgtggatacgatacgtatgtgaggtactgggatctgaggaccagtgtgcgcaaatgcgtgatggagtgggaagagccccatgactccaccctgtattgtctgcagacggatggcaaccatcttcttgccacggggagctcttattatggggtcgttcggctctgggatagacggcaaagagcatgccttcatgcgtttccgctgacttccacccccctttcgtcccccgtatattgtctgaggctcacaactaaacacctgtatgccgcactgtcttataatctccacgtgcttgatttccagaatccttag

SEQ ID NO: 210958 - DNA, 639 bp, Artificial Sequence
  derived and/or modified sequence
atgagggccctaggtcgtctagcccaagtttgccgctggctgcgacgctttacatcatgtgacctgttgtggaggaggatcgcacgcgcttcccttaattctggcttcaccaggctcggcactgacctgatgaccagtgtccctgtgaaggagagagtgaaagtctcgcagaattggagactgggaaggtgcagagagggaattctcctgaagtggcgctgtcgccagatgccatggatgcagttagaagacgacagcctatatattagccaggctaatttcatcctcgcataccagtttagaccagatggcgcctccctcaatcgcagacctctgggagtgttcgcaggccatgacgaagacgtttgtcacttcgtgcttgcaaactcccacatagtatctgccggcggagacgggaagatcgggattcacaagatccactctactttcacagtaaaatattctgcccatgagcaagaagtcaattgcgtggattgtaaaggcggcataatcgtgtcaggatcgcgcgaccgaactgccaaagtttggccactcgcatctggtcgtttgggtcagtgccttcacaccattcagactgaagatcgggtgtggtcgatagccatttcacccctgctttag

SEQ ID NO: 210959 - DNA, 576 bp, Artificial Sequence
  derived and/or modified sequence
atgacttccgtgcccgttaaggaacgcgtgaaagtgtcccaaaactggcggttggggaggtgccgcgaagggatcttgctcaagtggcgctgccgccagatgccatggatgcaactcgaggatgactcgctgtatatctcccaggccaatttcatcctggcatatcagtttagaccagatggcgcatcactgaatcgaagacccctcggtgtgttcgcaggtcatgatgaggatgtctgccacttcgtgctagcgaattcccatatcgtgtccgccggaggcgatggaaagatcggcatccacaagatccatagtaccttcactgtcaagtactctgctcacgagcaggaagtgaattgtgttgattgtaagggggggattatcgtgagcggctcccgcgacaggaccgcaaaagtatggccgcttgcaagcggccgcttaggccagtgtctccatactatccagacggaggatagagtttggagtatcgccatatcccccctgctgtcatccttcgtcacagggaccgcctgttgcggccatttcagtcccctgaggatctgggaccttaattag

SEQ ID NO: 210960 - DNA, 1239 bp, Artificial Sequence
  derived and/or modified sequence
atggctgctgctgctggggaggaggaggaggaggaggaggccgcccgggagagcgctgcccggcctgctgctggccctgccctgtggaggctgcctgaggagctgctgctgctgatctgcagctacctggacatgagggccctgggccgcctggcccaggtgtgccgctggctgcggcgcttcaccagctgtgacctgctgtggaggagaattgcccgggccagcctgaacagcggcttcacccggctgggcacagacctgatgacctctgtgcctgtgaaggagcgggtgaaggtgtcccagaactggaggctgggccgctgccgggagggcatcctgctgaagtggcgctgccggcagatgccctggatgcagctggaggatgacagcctgtacatcagccaggccaacttcatcctggcctaccagttccggccagatggagccagcctgaacagaagacccctgggcgtgtttgctggccatgatgaagatgtgtgccactttgtgctggccaacagccacatcgtgtctgctggaggagatggcaagattggcatccacaagatccacagcaccttcaccgtgaagtacagcgcccacgagcaggaggtgaactgtgtggactgcaagggcggcatcatcgtgtctggcagccgggacagaacagccaaggtgtggcccctggccagcggccgcctgggccagtgcctgcacaccatccagacagaggacagagtgtggagcatcgccatcagccccctgctgagcagctttgtgactggaacagcctgctgcggccacttcagccccctgcgcatctgggacctgaacagcggccagctgatgacccacctgggcagtgacttccccccaggggccggcgtgctggatgtgatgtatgagagccccttcaccctgctgagctgtggctatgacacctacgtgcgctactgggacctgcggacctctgtgaggaaatgtgtgatggagtgggaggagccccatgacagcaccctgtactgcctgcagacagatggcaaccacctgctggccaccggcagcagctactacggcgtggtgcggctgtgggaccggcggcagagggcctgcctgcacgccttccccctgaccagcacccccctgagcagccctgtgtactgcctgcggctgaccaccaagcacctgtatgctgccctgagctacaacctgcacgtgctggacttccagaacccctag

SEQ ID NO: 210961 - DNA, 1239 bp, Artificial Sequence
  derived and/or modified sequence
atggctgctgctgctggggaggaggaggaggaggaggaggccgcccgggagagcgctgcccggcctgctgctggccctgccctgtggaggctgcctgaggagctgctgctgctgatctgcagctacctggacatgagggccctgggccgcctggcccaggtgtgccgctggctgcggcgcttcaccagctgtgacctgctgtggaggagaattgcccgggccagcctgaacagcggcttcacccggctgggcacagacctgatgacctctgtgcctgtgaaggagcgggtgaaggtgtcccagaactggaggctgggccgctgccgggagggcatcctgctgaagtggcgctgcagccagatgccctggatgcagctggaggatgacagcctgtacatcagccaggccaacttcatcctggcctaccagttccggccagatggagccagcctgaacagaagacccctgggcgtgtttgctggccatgatgaagatgtgtgccactttgtgctggccaacagccacatcgtgtctgctggaggagatggcaagattggcatccacaagatccacagcaccttcaccgtgaagtacagcgcccacgagcaggaggtgaactgtgtggactgcaagggcggcatcatcgtgtctggcagccgggacagaacagccaaggtgtggcccctggccagcggccgcctgggccagtgcctgcacaccatccagacagaggacagagtgtggagcatcgccatcagccccctgctgagcagctttgtgactggaacagcctgctgcggccacttcagccccctgcgcatctgggacctgaacagcggccagctgatgacccacctgggcagtgacttccccccaggggccggcgtgctggatgtgatgtatgagagccccttcaccctgctgagctgtggctatgacacctacgtgcgctactgggacctgcggacctctgtgaggaaatgtgtgatggagtgggaggagccccatgacagcaccctgtactgcctgcagacagatggcaaccacctgctggccaccggcagcagctactacggcgtggtgcggctgtgggaccggcggcagagggcctgcctgcacgccttccccctgaccagcacccccctgagcagccctgtgtactgcctgcggctgaccaccaagcacctgtatgctgccctgagctacaacctgcacgtgctggacttccagaacccctag

SEQ ID NO: 210962 - DNA, 639 bp, Artificial Sequence
  derived and/or modified sequence
atgagggccctgggccgcctggcccaggtgtgccgctggctgcggcgcttcaccagctgtgacctgctgtggaggagaattgcccgggccagcctgaacagcggcttcacccggctgggcacagacctgatgacctctgtgcctgtgaaggagcgggtgaaggtgtcccagaactggaggctgggccgctgccgggagggcatcctgctgaagtggcgctgccggcagatgccctggatgcagctggaggatgacagcctgtacatcagccaggccaacttcatcctggcctaccagttccggccagatggagccagcctgaacagaagacccctgggcgtgtttgctggccatgatgaagatgtgtgccactttgtgctggccaacagccacatcgtgtctgctggaggagatggcaagattggcatccacaagatccacagcaccttcaccgtgaagtacagcgcccacgagcaggaggtgaactgtgtggactgcaagggcggcatcatcgtgtctggcagccgggacagaacagccaaggtgtggcccctggccagcggccgcctgggccagtgcctgcacaccatccagacagaggacagagtgtggagcatcgccatcagccccctgctgtag

SEQ ID NO: 210963 - DNA, 576 bp, Artificial Sequence
  derived and/or modified sequence
atgacctctgtgcctgtgaaggagcgggtgaaggtgtcccagaactggaggctgggccgctgccgggagggcatcctgctgaagtggcgctgccggcagatgccctggatgcagctggaggatgacagcctgtacatcagccaggccaacttcatcctggcctaccagttccggccagatggagccagcctgaacagaagacccctgggcgtgtttgctggccatgatgaagatgtgtgccactttgtgctggccaacagccacatcgtgtctgctggaggagatggcaagattggcatccacaagatccacagcaccttcaccgtgaagtacagcgcccacgagcaggaggtgaactgtgtggactgcaagggcggcatcatcgtgtctggcagccgggacagaacagccaaggtgtggcccctggccagcggccgcctgggccagtgcctgcacaccatccagacagaagatagagtgtggagcatcgccatcagccccctgctgagcagctttgtgactggaacagcctgctgcggccacttcagccccctgcgcatctgggacctgaactag

SEQ ID NO: 210964 - DNA, 1239 bp, Artificial Sequence
  derived and/or modified sequence
atggccgccgccgccggcgaggaggaggaggaggaggaggccgccagagagtctgcagcacgcccagcggcaggtcctgcactgtggcggctccccgaagaattacttctcctgatctgctcctacctcgatatgagggctctgggtagacttgcacaagtgtgccgctggctcaggaggtttacatcatgtgatctcctatggcgaagaatagcccgagcatcactaaatagcggctttactagattgggtaccgaccttatgaccagcgtcccagtcaaagaaagggtgaaggtgtcacaaaactggagattggggagatgtcgcgaagggatactgctcaaatggcggtgccggcagatgccctggatgcagcttgaggatgactccctgtatataagccaggccaactttatactggcctatcagttcaggccagatggagcttcactgaaccgccgaccactgggggtgttcgcaggtcatgacgaggatgtgtgccactttgtactcgccaactcgcacatagtctccgccgggggtgacggtaaaattggcattcacaagattcacagtactttcaccgttaaatactccgcccacgaacaggaagtaaactgcgtggattgcaagggtggaattattgtatctgggtctcgtgaccgcacggcaaaggtgtggccccttgcatctggacgcttggggcagtgtttgcatacgatccagactgaggacagggtgtggtccatcgccattagtccgttgctcagctctttcgtcactgggacggcgtgttgcggtcatttctcaccactgcgaatatgggacctaaactcgggccagctgatgacccatctcggttctgacttcccaccaggggccggtgtgttggacgttatgtatgaaagcccctttacactcctgagctgcgggtatgacacttacgtaaggtattgggacttgcggacaagtgtcagaaagtgtgtgatggagtgggaggaacctcatgatagcacactctattgtctacaaacagacgggaaccacctgcttgccaccggatcctcatattatggcgtagtgcgactctgggatcgccgtcagcgtgcctgtctgcatgctttcccgctgacctcgacaccacttagtagtccagtctactgtctcaggctcacgaccaaacacttgtatgctgcactgagttataatctgcatgtgttggactttcaaaatccgtag

SEQ ID NO: 210965 - DNA, 1239 bp, Artificial Sequence
  derived and/or modified sequence
atggccgccgccgccggcgaggaggaggaggaggaggaggccgcccgagaatccgccgcacgccctgctgccggtcccgccctttggcggctgccggaagaactgttgctgctaatctgcagctacctggacatgagagccttgggtcgtctggcccaggtatgtcgatggctgcgccgattcacatcctgtgatctgctgtggcgcagaatagctagagcttcactgaacagcggcttcactcgtctaggcaccgacctaatgacttctgtgcctgtcaaggaacgagtcaaagtctcgcagaattggagacttgggcgctgtagggaaggcatactgctgaaatggaggtgttcccagatgccctggatgcagctcgaggatgacagcctgtatatctcacaggccaactttattctcgcatatcagtttcgccctgatggggcaagccttaacaggagacctcttggcgtgtttgccggccacgatgaggatgtgtgccacttcgttctggcgaatagtcatatcgtcagcgccggtggcgacggaaagattggaatccataaaatccactctacatttaccgttaaatattcagcacatgagcaagaggtgaattgcgtagattgcaagggcggaatcattgtgtccggctccagggaccgaacagcaaaagtgtggcctcttgccagcggacggctgggtcagtgcctccacactatacaaaccgaagatcgggtgtggagtatagctatttctcccctgctctcatcattcgtgaccggcacagcatgttgcgggcatttctctcctttgcggatttgggatctgaacagcggccaattaatgacacacttgggaagtgacttcccgccaggagccggagtgctcgatgtcatgtatgagagcccttttaccctgctctcctgcggatacgacacatacgttaggtattgggacttacggaccagcgtacgtaaatgcgttatggagtgggaggaaccccacgatagcaccctttactgcctccaaacagacggaaaccacctactagcaaccggctccagctactacggcgtggtgcggctctgggatagaagacagcgggcgtgcttgcatgcgttccccttgacttctactcccctcagttcccctgtctactgcctgagattaaccactaagcacctatatgccgcattgtcatacaatttgcatgttctggactttcaaaacccctag

SEQ ID NO: 210966 - DNA, 639 bp, Artificial Sequence
  derived and/or modified sequence
atgcgggccctgggccggctggcccaggtgtgccggtggctgcggcgttttactagttgcgacctgctgtggcgcagaattgcacgggcctctttgaactccggctttacacgcctggggacagacttaatgacctccgtgccagtgaaagagagggttaaggtttcacaaaactggcggcttggcaggtgtagagaaggaatattgctcaagtggaggtgcagacagatgccgtggatgcagctggaagatgattctttatacattagtcaggccaattttatactggcctaccagttccgacctgatggagccagtctcaatcgcaggccgctgggagtgttcgcaggccatgatgaagacgtctgccattttgtgctggcgaacagtcatatcgtttcggctgggggagacgggaaaatcgggatacacaagatacactctacctttaccgttaagtactccgctcacgagcaggaggttaactgtgtggattgtaagggaggaattattgtctccggctctcgggacagaacagcaaaggtgtggcctctggcttccggcagactcggccagtgcctgcacactattcagaccgaggatagagtgtggtcgatcgctataagccccctcctctag

SEQ ID NO: 210967 - DNA, 576 bp, Artificial Sequence
  derived and/or modified sequence
atgaccagcgtgcccgtgaaggagcgggtgaaggtgagccagaactggcgtctgggcagatgtcgagagggtatacttctgaagtggcgttgccgtcaaatgccctggatgcagctagaggacgattctctctacatctcacaggctaacttcatcctggcctaccagttcaggcccgacggtgctagcctgaacagacggccacttggagtgtttgcaggacatgacgaggacgtttgccatttcgtgctggcgaattcccacatcgtgtctgcgggcggggacggtaagataggtattcacaagatccatagtaccttcactgttaagtacagtgcccatgagcaggaagtcaactgcgtcgattgtaaaggcggaattattgttagcggcagtagggacaggacagctaaggtttggcctctggcttcaggtagacttggccagtgcttacatactattcagacagaagatcgagtgtggtcgattgccatcagccctctgctgagcagctttgtgaccggtactgcctgctgtgggcatttttccccattgagaatctgggacctgaactag

SEQ ID NO: 210968 - DNA, 1239 bp, Artificial Sequence
  derived and/or modified sequence
atggccgctgcagccggagaagaagaggaagaggaggaggcagccagggagtctgccgctcgtcccgcagcgggtcctgccctctggcggctacccgaagagctcctgctgctcatctgcagctatctggacatgcgcgctctcggccgtctggcacaggtttgcagatggctgcggagatttacatcctgtgatcttttgtggcggcgaattgcacgggcttccctcaactcaggctttaccaggctgggaactgacctgatgacctcggttcccgtcaaggaacgggtcaaagtgagccagaattggcggctgggtcgttgtcgcgaaggcattctcctaaaatggcggtgtcgccaaatgccatggatgcagttggaagacgattcactatacatctcccaggctaatttcatcttggcctatcagttccgacccgacggtgcatctctgaatagacggcctttgggagtgtttgcgggacacgacgaggacgtttgtcactttgtgctggcaaactctcacatcgtgtccgcgggtggggacgggaagatcggaatacataagattcactccactttcacagtcaagtatagcgcccatgaacaggaagttaactgtgtggactgtaagggcggaattattgtttccgggtcaagggaccgcacagctaaagtgtggccactggcatccggcaggctgggacagtgcctccacaccatccagaccgaggacagggtatggtctattgccatcagcccgctgctgagttcttttgtgaccggtactgcatgctgcggtcactttagccctcttcgaatatgggaccttaactctgggcagctgatgactcatctcggttcagattttcctccaggagctggtgtgctggacgtcatgtatgagagccccttcacactattatcttgcggctacgatacttacgtgaggtattgggacctgcgtacttctgtgcgcaagtgtgtcatggagtgggaagagccacatgactcgaccttatactgtctgcagaccgacggcaatcacctgctggccactggaagcagctactatggggtcgtgaggctttgggatcgcaggcagagggcatgcttgcacgcctttccactcacctcaacccccctttccagtccagtgtactgtctcagactgactaccaaacatctgtacgcagccctgtcttataatctacatgtgctagactttcaaaacccgtag

SEQ ID NO: 210969 - DNA, 1239 bp, Artificial Sequence
  derived and/or modified sequence
atggctgcagcagccggagaagaagaggaggaggaggaagctgctcgggaatcagccgcacggcctgcagccggtcccgctctgtggcgactgcccgaagagcttcttctgctgatctgtagctatctggacatgcgagccttgggacgtctggcacaggtgtgtcggtggctccggaggttcacttcatgcgacctgctttggagaaggattgcccgtgcaagcctcaatagtgggttcacacggctcgggacggacttgatgactagtgtgccagtgaaggagagggtcaaggttagccaaaattggaggctgggaaggtgtcgcgagggtattttactcaagtggcgctgttctcagatgccgtggatgcaacttgaggatgactcgctttatatttctcaggccaatttcatcctggcttaccaatttcgaccagacggagctagcctgaatagacgacctctgggggtgtttgccggacacgacgaagatgtgtgccatttcgtgctggcgaattctcacatcgtttcagcgggaggcgacggtaagattgggattcataagatccattcaacctttaccgtgaagtacagtgcccatgagcaagaagtcaactgcgtggactgtaagggcggtatcatcgtttccgggagccgcgaccgcactgccaaagtctggccattggctagcggcagactcggccagtgtctgcacaccattcagaccgaggatagagtatggagcatcgcaatctcgcctctcctctctagttttgtgaccgggaccgcctgttgtggacacttcagtcccttaaggatttgggacctaaacagcggacagcttatgactcatctgggctccgacttccccccaggcgctggagtcctggacgtcatgtacgagtccccattcacgctcctgtcctgcggatacgatacatacgtgaggtattgggatctgagaaccagtgttcggaagtgcgtgatggaatgggaggagccccatgattccactttgtattgtctgcagaccgatggaaaccacctattggctaccgggtcttcatactacggtgtggttcggttgtgggaccgcagacagcgtgcctgtctgcacgcctttccactgacaagcacgcccctgagttctccagtgtactgtctgcgcctcactacaaaacacctctacgcggcactgagctacaacctccacgttctggactttcagaatccctag

SEQ ID NO: 210970 - DNA, 639 bp, Artificial Sequence
  derived and/or modified sequence
atgcgagccctcggtcggctggcgcaggtgtgtcgctggttgcgcaggtttacttcatgtgacctgctgtggaggcgcatagccagggcgtccctgaattcaggcttcaccaggctaggcacagatctcatgaccagtgttcctgtcaaggagagagttaaagtaagtcaaaattggcgcttaggcagatgccgtgagggcatcttgcttaaatggcgatgtaggcaaatgccttggatgcaactcgaagatgactctctgtacatctcccaggccaacttcattctcgcatatcagttccggcctgatggggcaagcttgaatagacgacctcttggcgtttttgccggtcacgacgaggacgtgtgtcactttgttttggccaacagtcacatagtgagcgccggaggcgacggtaaaattggaatccataagattcattcaacattcacggtcaagtatagtgctcatgagcaggaggtcaactgtgtggactgtaaaggcggaatcatcgtgtcgggttcgagggacagaaccgccaaagtctggcctctggcttccggtcggctggggcagtgtcttcacaccattcagacagaggatagagtttggtccatcgctatctcccctctgctctag

SEQ ID NO: 210971 - DNA, 576 bp, Artificial Sequence
  derived and/or modified sequence
atgacttcagtgccagtgaaagaacgtgttaaggtatctcagaactggagactgggtcggtgccgcgagggtatactgctgaagtggaggtgcaggcagatgccatggatgcagctggaagatgacagtttgtatatctctcaggccaatttcattctcgcctatcagtttagacctgatggcgcttccttgaatagacgaccgctgggtgtgttcgcagggcacgatgaggatgtctgtcacttcgtgctggctaatagtcacattgtgtcggctggcggagatggaaaaatcggaattcataagattcacagcacgtttactgttaaatatagcgcccacgaacaggaggtaaactgtgtggactgtaagggcggaatcatcgtttccgggagcagggacaggactgctaaggtctggcccctagcctccggtagactgggccagtgcctacatactattcagacggaagaccgggtgtggtcaatcgctatttcgccactgctcagttctttcgtgactggtaccgcgtgttgtgggcatttctccccactgaggatctgggatttgaactag

SEQ ID NO: 210972 - DNA, 1239 bp, Artificial Sequence
  derived and/or modified sequence
atggccgccgccgccggcgaggaggaggaggaggaggaggccgccagagagagcgccgccagacccgccgccggccccgccctgtggagactgcccgaggagctgctgctgctgatctgcagctacctggacatgagagccctgggcagactggcccaggtgtgcagatggctgagaagattcaccagctgcgacctgctgtggagaagaatcgccagagccagcctgaacagcggcttcaccagactgggcaccgacctgatgaccagcgtgcccgtgaaggagagagtgaaggtgagccagaactggagactgggcagatgcagagagggcatcctgctgaagtggagatgcagacagatgccctggatgcagctggaggacgacagcctgtacatcagccaggccaacttcatcctggcctaccagttcagacccgacggcgccagcctgaacagaagacccctgggcgtgttcgccggccacgacgaggacgtgtgccacttcgtgctggccaacagccacatcgtgagcgccggcggcgacggcaagatcggcatccacaagatccacagcaccttcaccgtgaagtacagcgcccacgagcaggaggtgaactgcgtggactgcaagggcggcatcatcgtgagcggcagcagagacagaaccgccaaggtgtggcccctggccagcggcagactgggccagtgcctgcacaccatccagaccgaggacagagtgtggagcatcgccatcagccccctgctgagcagcttcgtgaccggcaccgcctgctgcggccacttcagccccctgagaatctgggacctgaacagcggccagctgatgacccacctgggcagcgacttcccccccggcgccggcgtgctggacgtgatgtacgagagccccttcaccctgctgagctgcggctacgacacctacgtgagatactgggacctgagaaccagcgtgagaaagtgcgtgatggagtgggaggagccccacgacagcaccctgtactgcctgcagaccgacggcaaccacctgctggccaccggcagcagctactacggcgtggtgagactgtgggacagaagacagagagcctgcctgcacgccttccccctgaccagcacccccctgagcagccccgtgtactgcctgagactgaccaccaagcacctgtacgccgccctgagctacaacctgcacgtgctggacttccagaacccctag

SEQ ID NO: 210973 - DNA, 1239 bp, Artificial Sequence
  derived and/or modified sequence
atggccgccgccgccggcgaggaggaggaggaggaggaggccgccagagagagcgccgccagacccgccgccggccccgccctgtggagactgcccgaggagctgctgctgctgatctgcagctacctggacatgagagccctgggcagactggcccaggtgtgcagatggctgagaagattcaccagctgcgacctgctgtggagaagaatcgccagagccagcctgaacagcggcttcaccagactgggcaccgacctgatgaccagcgtgcccgtgaaggagagagtgaaggtgagccagaactggagactgggcagatgcagagagggcatcctgctgaagtggagatgcagccagatgccctggatgcagctggaggacgacagcctgtacatcagccaggccaacttcatcctggcctaccagttcagacccgacggcgccagcctgaacagaagacccctgggcgtgttcgccggccacgacgaggacgtgtgccacttcgtgctggccaacagccacatcgtgagcgccggcggcgacggcaagatcggcatccacaagatccacagcaccttcaccgtgaagtacagcgcccacgagcaggaggtgaactgcgtggactgcaagggcggcatcatcgtgagcggcagcagagacagaaccgccaaggtgtggcccctggccagcggcagactgggccagtgcctgcacaccatccagaccgaggacagagtgtggagcatcgccatcagccccctgctgagcagcttcgtgaccggcaccgcctgctgcggccacttcagccccctgagaatctgggacctgaacagcggccagctgatgacccacctgggcagcgacttcccccccggcgccggcgtgctggacgtgatgtacgagagccccttcaccctgctgagctgcggctacgacacctacgtgagatactgggacctgagaaccagcgtgagaaagtgcgtgatggagtgggaggagccccacgacagcaccctgtactgcctgcagaccgacggcaaccacctgctggccaccggcagcagctactacggcgtggtgagactgtgggacagaagacagagagcctgcctgcacgccttccccctgaccagcacccccctgagcagccccgtgtactgcctgagactgaccaccaagcacctgtacgccgccctgagctacaacctgcacgtgctggacttccagaacccctag

SEQ ID NO: 210974 - DNA, 639 bp, Artificial Sequence
  derived and/or modified sequence
atgagagccctgggcagactggcccaggtgtgcagatggctgagaagattcaccagctgcgacctgctgtggagaagaatcgccagagccagcctgaacagcggcttcaccagactgggcaccgacctgatgaccagcgtgcccgtgaaggagagagtgaaggtgagccagaactggagactgggcagatgcagagagggcatcctgctgaagtggagatgcagacagatgccctggatgcagctggaggacgacagcctgtacatcagccaggccaacttcatcctggcctaccagttcagacccgacggcgccagcctgaacagaagacccctgggcgtgttcgccggccacgacgaggacgtgtgccacttcgtgctggccaacagccacatcgtgagcgccggcggcgacggcaagatcggcatccacaagatccacagcaccttcaccgtgaagtacagcgcccacgagcaggaggtgaactgcgtggactgcaagggcggcatcatcgtgagcggcagcagagacagaaccgccaaggtgtggcccctggccagcggcagactgggccagtgcctgcacaccatccagaccgaggacagagtgtggagcatcgccatcagccccctgctgtag

SEQ ID NO: 210975 - DNA, 576 bp, Artificial Sequence
  derived and/or modified sequence
atgaccagcgtgcccgtgaaggagagagtgaaggtgagccagaactggagactgggcagatgcagagagggcatcctgctgaagtggagatgcagacagatgccctggatgcagctggaggacgacagcctgtacatcagccaggccaacttcatcctggcctaccagttcagacccgacggcgccagcctgaacagaagacccctgggcgtgttcgccggccacgacgaggacgtgtgccacttcgtgctggccaacagccacatcgtgagcgccggcggcgacggcaagatcggcatccacaagatccacagcaccttcaccgtgaagtacagcgcccacgagcaggaggtgaactgcgtggactgcaagggcggcatcatcgtgagcggcagcagagacagaaccgccaaggtgtggcccctggccagcggcagactgggccagtgcctgcacaccatccagaccgaggacagagtgtggagcatcgccatcagccccctgctgagcagcttcgtgaccggcaccgcctgctgcggccacttcagccccctgagaatctgggacctgaactag

SEQ ID NO: 210976 - protein, 597 aa, Artificial Sequence
  derived and/or modified sequence
MAEGSAVSDPQHAARLLRALSSFREESRFCDAHLVLDGEEIPVQKNILAAASPYIRTKLNYNPPKDDGSTYKIELEGISVMVMREILDYIFSGQIRLNEDTIQDVVQAADLLLLTDLKTLCCEFLEGCIAAENCIGIRDFALHYCLHHVHYLATEYLETHFRDVSSTEEFLELSPQKLKEVISLEKLNVGNERYVFEAVIRWIAHDTEIRKVHMKDVMSALWVSGLDSSYLREQMLNEPLVREIVKECSNIPLSQPQQGEAMLANFKPRGYSECIVTVGGEERVSRKPTAAMRCMCPLYDPNRQLWIELAPLSMPRINHGVLSAEGFLFVFGGQDENKQTLSSGEKYDPDANTWTALPPMNEARHNFGIVEIDGMLYILGGEDGEKELISMECYDIYSKTWTKQPDLTMVRKIGCYAAMKKKIYAMGGGSYGKLFESVECYDPRTQQWTAICPLKERRFGAVACGVAMELYVFGGVRSREDAQGSEMVTCKSEFYHDEFKRWIYLNDQNLCIPASSSFVYGAVPIGASIYVIGDLDTGTNYDYVREFKRSTGTWHHTKPLLPSDLRRTGCAALRIANCKLFRLQLQQGLFRIRVHSP

SEQ ID NO: 210977 - DNA, 1794 bp, Artificial Sequence
  derived and/or modified sequence
atggcagagggttctgcagtctctgacccccagcacgccgccaggttactccgcgctttgtccagcttccgggaagaatcacggttctgtgatgcacatcttgtgctggatggagaagaaataccagtgcagaaaaacatcctggcagctgcttcaccatacattagaactaaactcaactataatccccccaaggacgacgggagcacatacaagatcgaactcgaaggaatctccgtgatggtgatgagggaaattttagactacatctttagtggacaaattaggctcaacgaggacaccatccaggacgtcgtgcaggcagccgatctcctgctgttaaccgatttgaaaactctgtgttgtgagtttttggaaggctgtattgccgctgagaattgtattggaatccgggattttgccctacactactgtctgcaccacgttcactacctcgcgacggagtacttagagacgcacttccgtgacgtaagctctaccgaagaattcctcgaactcagtccccagaaattgaaagaagtgatctccctcgagaaacttaatgtcgggaacgaacgctacgtgtttgaggcggtgattaggtggattgcccacgacactgaaatcaggaaggtccatatgaaggacgtgatgagcgccctgtgggtctcaggcctggatagttcctatctgcgtgagcaaatgttaaatgaaccactggttagagagattgtgaaagaatgctccaatatccctctcagccagcctcaacagggggaggcaatgctggccaattttaaaccccgaggttacagcgaatgtatagttactgttgggggcgaggaacgcgtgagccggaaacccaccgctgccatgcgctgtatgtgcccgctgtacgaccctaacaggcagctgtggatagaactggccccactgtcaatgccgagaataaatcacggcgttctgagcgccgaggggttcttgttcgtgtttggaggccaggatgaaaacaagcaaacattgtcaagcggagaaaaatatgacccagacgctaatacttggactgccttgccccctatgaacgaagccaggcataatttcgggattgtggaaatcgacggaatgctgtacattctgggaggcgaagatggtgagaaagaattaatttctatggagtgttatgacatctatagcaaaacatggactaaacagccagatttgacgatggtacgtaaaatcggatgttatgcagccatgaagaaaaagatctatgccatgggaggtgggtcctatgggaagttgtttgaatcggtggaatgctacgatccaagaacacagcagtggacagcgatctgccctttgaaagagagacggtttggcgctgtggcttgcggagtggcaatggagctgtatgtgtttgggggcgtgaggtccagagaggacgcccagggtagtgagatggtgacttgcaagagcgaattctaccatgatgaattcaaaagatggatttatttaaacgatcagaatctgtgtatcccagcttcgagcagctttgtttatggggccgtcccaattggcgcctcaatttacgtgatcggcgatctagataccggcactaactacgattatgtcagagagtttaaaagatctaccggcacttggcaccacacaaagccgttgctgccttccgatctgaggaggactggctgcgctgctctccggatagcgaactgcaagctattcaggctccaactgcagcaggggctttttcggatccgcgttcactccccttag

SEQ ID NO: 210978 - DNA, 4677 bp, Artificial Sequence
  derived and/or modified sequence
caggcacgtcccgggggctccagcttctgctcagagcgcggagagccgggccgggcgggcgcgcgcgcaggactcgggccgctcgaggggtccggccggacggtgtcgggagccggacccgtcggcagaggagcgggcgccgcgatggctgagggcagtgccgtgtctgaccctcagcacgccgcgcgtctgctgcgagcgctcagctctttccgcgaggagtctcgcttctgcgacgcgcacctggtcctcgacggggaggagatcccggtgcagaagaacatcctggcggcggccagcccgtacatcaggacaaagttaaactataatcctccaaaagatgatggatcaacttataagattgaacttgaagggatatcggtaatggttatgagagagatcctggattacatcttcagtgggcagatcaggctaaatgaagatacaatccaagatgttgttcaggcagctgacctgctgctactgacggaccttaaaaccctgtgctgtgagtttttggaaggctgcattgctgctgagaactgtattggtatccgtgactttgcactacattactgcctccatcacgttcattaccttgccacagaatacctggagactcatttccgagacgtcagcagcacggaagaattcttagagctgagtcctcaaaagcttaaagaagtgatttctcttgagaagttaaacgttggcaatgaaagatatgtctttgaagcagtaattcgatggatagcacatgatacagaaataagaaaggtccacatgaaggatgttatgtcagctctgtgggtttcagggttggactccagttatttacgggaacagatgctgaatgaaccattagtacgagaaattgtcaaagagtgtagcaatataccgctcagccagccgcagcaaggggaggcgatgctggccaacttcaaaccccggggctactctgagtgcatcgtgactgttggtggagaagagagagtttcacggaaacccacagcagcgatgcgatgcatgtgccctctctatgaccctaacaggcagctttggatcgaactggcccctttaagcatgccgagaattaaccatggagttctctcagcagaaggatttttgtttgtattcgggggccaagatgaaaataagcagactcttagctcaggagaaaagtatgatccagatgcaaatacatggacagcattgccacctatgaacgaggcaagacataacttcggaattgtggagatagatgggatgctgtacattttgggaggagaggatggtgaaaaggagctgatttccatggagtgttacgatatttattctaaaacctggacaaagcaacctgatttgaccatggtcagaaagatcggctgctatgcagctatgaaaaagaaaatctacgccatgggtggaggctcctacggaaagctttttgagtctgtagagtgttatgatcccaggacccagcagtggactgccatatgtccactaaaagagaggaggtttggagcggtggcctgtggagttgctatggagctgtatgtgtttgggggagtccgaagtcgtgaggacgcccagggtagcgagatggtaacttgcaagtccgagttctaccatgatgagtttaaaaggtggatctatcttaacgaccagaatttatgcatccccgccagttcctcttttgtttatggagctgtacctataggagccagtatttatgttattggagatcttgatacaggtaccaattacgactacgtgcgtgagtttaaaagaagcacaggaacctggcaccacactaaaccactccttccatccgaccttcgccgtacaggatgtgcagccttacgcattgcgaattgcaagcttttccgcctgcagcttcagcaaggcttattccgtattcgtgttcattccccttgaggaggaagcagagcagagtgcgagatcctgacccaagagcaccataacatagctccgaaagggagagcagagatggcagctgaaactcactctgtgctgggctttggtatggtaactctttggtggttttatgatgcttacaaacttgagctttagctcttgtttgggagaacacgtaactgttgaaaaactacctgggaggagtgagttcctccagttaaatgtggctgtagatgttggaggctagggaggctagtaaatatcaaaaggaaaagggagtgggaattgctatcatgtaaaatatcaaagttaaaatactaaggtgcattttccctgaagggaactcatgtctgactgctgtattcaaatacgtagctttggtaacaaacaaaatccgtatatgcaaatcaacatatccaaacatgccaagactgcttttccactgcacttggaaggatatattatgcctaaccctgcccaacaaattaaggtttgtgcctaaaatgttagattggactgtatgccagttagtctccatttattcctagtactctgtcctaagaatctttttaaaactatatcatgatgaattgaaatgaagataaaattgctcttttgtaactttatcttagtaatgtaaagattcagtaaattgatgagtcaggttgcagccctcatgtgaactgaaagaagttgctcgcttctgtgttgacttagatcaagacacgtcacgcatcctttctggggtagtacctgtggagccgggaagggtctcctgcagtgccattctgccttctcaatgagcaaaaccattttctaagtatgaggatattagtgagtaggagattttataaaagaaagacctgagtcagacaaataataaaggtctgctgtggctaaaaaagcaaaaacaaaaaagctatccagacaaaatacatagggatcagaaactttttcatataacctgtctgaaagcacacaaagtcttgtttactactgtttagggtttgaaaacttgtcttagaatgcgaatctgtgttaagaatctagtctttgtaatagaagtttcccagtggcattcactagtgagagttttagacaaattatgttacgagtaaagtttggctggtagaataaactacctcaacttaatttcattctgttcatagtagagcaaattaatcttttcctccttccctcctttcctatctctcattctcacctcaacccactttaccccacttctcattgggggaaaaatgtctttcgttcgtggaacgtatcttgtaagatattttgttttccacttgaattacaccaccctagtgtgaaatcggggacttcaaagtgcttgattccttcctaaattgaattttatgcaatgtcaaatttctaatcaatttaatatacagtacttcatttttaattgttttctaaaaaaaaggttttttttttccttttggaatatggctgtaagaagcagcattttgtcttattaacacatgtataaaggtatcctttggttttaagtcgagaacaggaatttcttctagaaacttcctgtatggaacgtttatatgcaattaacatgcatatgaaaaacatcacttacgttctcccacccatagacataaaaaagggtgacctgtgattttttttcttatacctgctggaagtcagtacaatgcgtcaaaagttgctgaaagatgctgtgcctatggggttctagagagtgttgagtgtggtacattaactctccattttagccagaagatacctgataagagaaggtgtaaggtttttatcttatatgccagaggcaccaggccagatgtgccgcacagtcatgtaattcaatcatgtttaatatgtcagtcaaaaccaaattcagaattgttttgtgtaccagtcagctgttgtctgcacattttcgtagtgacagtgtggagatctttttaatgaaagcaaactatgtggcctctgcaaagaaaggaagatttttctttttacaactagatattagttttagaggaaggaaatagctgaaaaactaaatttgctttggtgaaatgtcctgtacagaacagtaccttggcattcagcagctgtaattggggaacattaaaacagtaactgacatccagttaaagccacgatcgtcagcaattctccttttttaatttctgatatttaaagttttttttccagtctacaccaggcctctccaaggagacagttcattatttaggagtgaatgtgttcctcttgcaatattatcagtacctgcatgacttggtaaattcattttataaaaatagtgttttttttttttaatttcagttcattgactctataactgcagaaattagataatgttttataaaataaatttgccacataatatgggatgcaataaccaacaaagctgctaagtgccaaactgttattttactatatataaatattaaaatattgtgttgaagtatagggatgtatttaattttactatgctccaacattaatcatgactcttttgtaaattacagttatttcagtattgtaaaataaatgttgactcatttcatgcaggtttgtgttttaacattccacttatgccttgaaacatcatttcttgataactttttgatacttctttcttgataaggcacttttaccaggtgtgtgttggaattggtggctcaggataggtcttaaattttaaatacaaatatctttggg

SEQ ID NO: 210979 - DNA, 1794 bp, Artificial Sequence
  derived and/or modified sequence
atggccgagggcagcgctgtgtctgacccccagcacgccgcccggctgctgcgggccctgagcagcttccgggaggagagccgcttctgtgatgcccacctggtgctggatggagaggagatccctgtgcagaagaacatcctggccgccgccagcccctacatccgcaccaagctgaactacaacccccccaaggatgatggcagcacctacaagattgagctggagggcatctctgtgatggtgatgagggagatcctggactacatcttcagcggccagatccggctgaatgaagacaccatccaggatgtggtgcaggccgctgacctgctgctgctgacagacctgaagaccctgtgctgtgagttcctggagggctgcatcgctgctgagaactgcatcggcatccgggactttgccctgcactactgcctgcaccacgtgcactacctggccacagagtacctggagacccacttcagagatgtgagcagcacagaggagttcctggagctgagcccccagaagctgaaggaggtgatcagcctggagaagctgaatgtgggcaatgaaagatatgtgtttgaggccgtcatccgctggatcgcccatgacacagagatcaggaaggtgcacatgaaggatgtgatgtctgccctgtgggtgtctggcctggacagcagctacctgcgggagcagatgctgaatgagcccctggtgcgggagatcgtgaaggaatgtagcaacatccccctgagccagccccagcagggcgaggccatgctggccaacttcaagccccggggctacagtgaatgtattgtgacagtgggcggggaggagcgggtgtccaggaagcccacagctgccatgcgctgcatgtgccccctgtatgaccccaaccggcagctgtggattgagctggcccccctgtccatgccccgcatcaaccacggcgtgctgtctgctgagggcttcctgtttgtgtttggaggccaggatgagaacaagcagaccctgagcagtggagagaagtatgaccctgatgccaacacctggacagccctgccccccatgaatgaggcccggcacaactttggaattgtggagattgatggcatgctgtacatcctgggcggggaggatggagagaaggagctgatctccatggagtgctatgacatctacagcaagacctggaccaagcagcctgacctgaccatggtgaggaagattggctgctatgctgccatgaagaagaagatctatgccatgggcggcggcagctatggcaagctgtttgaatctgtggagtgctatgaccccaggacccagcagtggacagccatctgccccctgaaggagaggagatttggagctgtggcctgtggggtggccatggagctgtatgtgtttggaggagtgcgcagccgggaggatgcccagggcagcgagatggtgacctgcaagtctgagttctaccatgatgagttcaagcgctggatctacctgaatgaccagaacctgtgcatcccagccagcagcagctttgtgtatggagctgtgcccatcggggccagcatctacgtgattggagacctggacaccggcaccaactatgactatgtgcgggagttcaagaggagcacaggcacctggcaccacaccaagcccctgctgcccagcgacctgcggaggacaggctgtgccgccctgagaattgccaactgcaagctgttccggctgcagctgcagcagggcctcttccgcatccgggtgcacagcccctag

SEQ ID NO: 210980 - DNA, 1794 bp, Artificial Sequence
  derived and/or modified sequence
atggccgagggcagcgccgtgagcgacccccagcacgccgcccggctactacgtgccctgtcaagttttcgggaagagagtaggttttgtgatgcccatctcgtcctcgatggcgaggagatacctgtgcagaaaaatattttggctgccgcatcgccttacatccggacaaagctcaattacaatcctcctaaagacgacggttctacttataaaatcgaactggaggggataagtgtcatggttatgagggaaatcttggactacatcttttccgggcagatacgcctgaacgaagatacaattcaggacgtagtgcaagctgcagacctgttactgctcactgacctcaagaccctttgttgcgaattcctcgaaggatgtatagcagctgagaattgtatagggattcgggacttcgcactgcactactgtctgcatcacgtgcactacttggccaccgagtacttggagactcatttccgagacgtctcaagcacagaggaatttctggaactctcaccccagaagcttaaagaagtgatctccctcgagaagctcaacgtgggtaatgagaggtatgtcttcgaagcagttattcggtggatcgctcacgacactgaaatacgcaaagtgcacatgaaggatgtcatgtccgccctctgggtgtcaggtctggactcctcataccttagggagcaaatgctgaacgaacctttagtgcgcgagatcgtcaaggaatgctcaaatatccccttgtcccagccacagcagggtgaggcgatgctggccaattttaaaccacgaggatatagtgaatgtatagtgactgtaggaggcgaagaaagagtgtctcggaaacctaccgcagctatgagatgtatgtgcccactgtatgacccaaaccgacaactgtggatagagttagctcctctgtcaatgcctaggataaaccatggagtgttgtccgctgagggatttctgtttgtgtttggtgggcaggacgagaacaagcagaccttgtcatccggagagaagtacgatccagatgctaacacctggaccgccctgcctcctatgaatgaggctaggcataattttggaattgtagaaatcgacgggatgctctatattctgggcggagaagatggcgaaaaagagttgatttcaatggaatgttacgatatttacagcaagacatggaccaagcaaccggatctaaccatggttcgaaagatcgggtgctatgctgccatgaaaaagaagatatacgccatgggcggaggatcgtatggaaagctctttgaatctgttgagtgttacgacccccggactcaacagtggacggccatctgccccctgaaagagcggcgcttcggcgcggtagcttgtggcgtcgcgatggagctgtatgtgtttggtggcgtccgcagtcgagaagatgcccaaggatccgagatggtcacttgcaaatccgagttctatcatgacgagtttaagcgttggatctatctgaatgatcagaatctttgcatcccagcctcctcctctttcgtctatggagccgtgcctattggcgcctcaatctatgttatcggcgacctcgatactggcactaattacgattatgttcgggaattcaagaggtcaactggtacctggcatcatactaagccgctgttaccatcagacctgcggaggacgggatgcgccgctctgcggattgctaactgcaagctgttccgacttcaactgcagcaaggtttgtttcgtataagagtgcacagcccatag

SEQ ID NO: 210981 - DNA, 1794 bp, Artificial Sequence
  derived and/or modified sequence
atggccgagggtagtgcagtcagtgacccccagcacgccgctcgtctgttaagagctttatcgtcctttcgcgaggagtcgcgattctgcgatgcacacctagtgctcgatggtgaggagatccccgtgcagaaaaatatcttggctgccgcttctccctacatccggaccaagctgaactataacccccctaaggacgacggttcgacctataagatcgagctagaaggcatttctgtgatggtgatgagggagattctggattacatcttctctggtcagatacgtttgaacgaagacaccattcaagacgttgttcaagccgcagacctactgcttctaaccgacctcaaaaccctgtgttgtgagttcctggaaggatgcatcgcggctgagaattgcatcggaatacgggactttgccctgcattattgcttgcatcacgtccattacttggccactgaatacctggagactcacttccgggacgtcagttcaacagaggaattcctggagctctccccccagaaactcaaagaagttatatcactcgagaaactgaatgtgggtaacgagcggtatgtttttgaggctgtcattcggtggatcgcccatgatactgaaatccggaaggtccatatgaaggacgtcatgtccgcactgtgggtgtctggcctcgactcttcttatctgagggagcagatgctgaatgagccccttgtgcgagaaattgtgaaggagtgctccaatattccattgagtcagccccagcagggcgaggccatgctagccaatttcaagccacgcggttatagcgaatgtattgtcactgtggggggtgaggagagagtgtcccggaagccaactgccgcaatgcgttgcatgtgtcctctgtatgatcccaatagacagttgtggattgaactcgctcctttaagcatgcctaggattaaccatggtgtactgagcgcggaaggatttctttttgtctttgggggtcaggatgaaaacaagcaaaccctgtcttcaggcgaaaaatacgaccccgacgccaatacttggaccgcgctcccacctatgaacgaggccaggcataactttgggatcgttgagatcgacggcatgctgtatattctagggggtgaggatggagagaaggagttgatctccatggagtgctatgatatctactccaagacctggacaaaacagcctgaccttaccatggttaggaaaattggatgttacgcggcaatgaaaaaaaagatctatgctatgggcggtggcagctatggcaaactgttcgagtctgtcgagtgctatgacccacggacccaacaatggacagcgatttgcccccttaaggaaaggcggtttggagccgtcgcatgcggggtggccatggaattgtatgtgtttggcggagtgcgcagtcgcgaggacgcgcagggatcggagatggtgacctgcaagagtgagttttatcatgatgagtttaagcgctggatctacttgaatgatcagaacctttgcatccccgctagttccagctttgtgtatggggctgttcctattggggcaagtatttacgttataggggatctagataccggtacgaattatgattacgtgcgagagtttaaacggtcaaccggcacctggcaccataccaaacccctccttccatcggatttacgacgaaccggctgtgccgcactacgtatcgccaactgcaagttgttccgcctgcaattgcagcagggcttgttccgcattcgcgtccacagcccatag

SEQ ID NO: 210982 - DNA, 1794 bp, Artificial Sequence
  derived and/or modified sequence
atggccgagggcagcgccgtgagcgacccccagcacgccgccagactgctgagagccctgagcagcttcagagaggagagcagattctgcgacgcccacctggtgctggacggcgaggagatccccgtgcagaagaacatcctggccgccgccagcccctacatcagaaccaagctgaactacaacccccccaaggacgacggcagcacctacaagatcgagctggagggcatcagcgtgatggtgatgagagagatcctggactacatcttcagcggccagatcagactgaacgaggacaccatccaggacgtggtgcaggccgccgacctgctgctgctgaccgacctgaagaccctgtgctgcgagttcctggagggctgcatcgccgccgagaactgcatcggcatcagagacttcgccctgcactactgcctgcaccacgtgcactacctggccaccgagtacctggagacccacttcagagacgtgagcagcaccgaggagttcctggagctgagcccccagaagctgaaggaggtgatcagcctggagaagctgaacgtgggcaacgagagatacgtgttcgaggccgtgatcagatggatcgcccacgacaccgagatcagaaaggtgcacatgaaggacgtgatgagcgccctgtgggtgagcggcctggacagcagctacctgagagagcagatgctgaacgagcccctggtgagagagatcgtgaaggagtgcagcaacatccccctgagccagccccagcagggcgaggccatgctggccaacttcaagcccagaggctacagcgagtgcatcgtgaccgtgggcggcgaggagagagtgagcagaaagcccaccgccgccatgagatgcatgtgccccctgtacgaccccaacagacagctgtggatcgagctggcccccctgagcatgcccagaatcaaccacggcgtgctgagcgccgagggcttcctgttcgtgttcggcggccaggacgagaacaagcagaccctgagcagcggcgagaagtacgaccccgacgccaacacctggaccgccctgccccccatgaacgaggccagacacaacttcggcatcgtggagatcgacggcatgctgtacatcctgggcggcgaggacggcgagaaggagctgatcagcatggagtgctacgacatctacagcaagacctggaccaagcagcccgacctgaccatggtgagaaagatcggctgctacgccgccatgaagaagaagatctacgccatgggcggcggcagctacggcaagctgttcgagagcgtggagtgctacgaccccagaacccagcagtggaccgccatctgccccctgaaggagagaagattcggcgccgtggcctgcggcgtggccatggagctgtacgtgttcggcggcgtgagaagcagagaggacgcccagggcagcgagatggtgacctgcaagagcgagttctaccacgacgagttcaagagatggatctacctgaacgaccagaacctgtgcatccccgccagcagcagcttcgtgtacggcgccgtgcccatcggcgccagcatctacgtgatcggcgacctggacaccggcaccaactacgactacgtgagagagttcaagagaagcaccggcacctggcaccacaccaagcccctgctgcccagcgacctgagaagaaccggctgcgccgccctgagaatcgccaactgcaagctgttcagactgcagctgcagcagggcctgttcagaatcagagtgcacagcccctag

SEQ ID NO: 210983 - protein, 701 aa, Artificial Sequence
  derived and/or modified sequence
MDESPEPLQQGRGPVPVRRQRPAPRGLREMLKARLWCSCSCSVLCVRALVQDLLPATRWLRQYRPREYLAGDVMSGLVIGIILVPQAIAYSLLAGLQPIYSLYTSFFANLIYFLMGTSRHVSVGIFSLLCLMVGQVVDRELQLAGFDPSQDGLQPGANSSTLNGSAAMLDCGRDCYAIRVATALTLMTGLYQVLMGVLRLGFVSAYLSQPLLDGFAMGASVTILTSQLKHLLGVRIPRHQGPGMVVLTWLSLLRGAGQANVCDVVTSTVCLAVLLAAKELSDRYRHRLRVPLPTELLVIVVATLVSHFGQLHKRFGSSVAGDIPTGFMPPQVPEPRLMQRVALDAVALALVAAAFSISLAEMFARSHGYSVRANQELLAVGCCNVLPAFLHCFATSAALAKSLVKTATGCRTQLSSVVSATVVLLVLLALAPLFHDLQRSVLACVIVVSLRGALRKVWDLPRLWRMSPADALVWAGTAATCMLVSTEAGLLAGVILSLLSLAGRTQRPRTALLARIGDTAFYEDATEFEGLVPEPGVRVFRFGGPLYYANKDFFLQSLYSLTGLDAGCMAARRKEGGSETGVGEGGPAQGEDLGPVSTRAALVPAAAGFHTVVIDCAPLLFLDAAGVSTLQDLRRDYGALGISLLLACCSPPVRDILSRGGFLGEGPGDTAEEEQLFLSVHDAVQTARARHRELEATDAHL

SEQ ID NO: 210984 - DNA, 2106 bp, Artificial Sequence
  derived and/or modified sequence
atggacgagagccccgagcccctgcagcagggcagaggccccgtgcccgtgagaagacagagacccgcccccagaggcctgagagagatgctgaaggccagactgtggtgcagctgcagctgcagcgtgctgtgcgtgagagccctggtgcaggacctgctgcccgccaccagatggctgagacagtacagacccagagagtacctggccggcgacgtgatgagcggcctggtgatcggcatcatcctggtgccccaggccatcgcctacagcctgctggccggcctgcagcccatctacagcctgtacaccagcttcttcgccaacctgatctacttcctgatgggcaccagcagacacgtgagcgtgggcatcttcagcctgctgtgcctgatggtgggccaggtggtggacagagagctgcagctggccggcttcgaccccagccaggacggcctgcagcccggcgccaacagcagcaccctgaacggcagcgccgccatgctggactgcggcagagactgctacgccatcagagtggccaccgccctgaccctgatgaccggcctgtaccaggtgctgatgggcgtgctgagactgggcttcgtgagcgcctacctgagccagcccctgctggacggcttcgccatgggcgccagcgtgaccatcctgaccagccagctgaagcacctgctgggcgtgagaatccccagacaccagggccccggcatggtggtgctgacctggctgagcctgctgagaggcgccggccaggccaacgtgtgcgacgtggtgaccagcaccgtgtgcctggccgtgctgctggccgccaaggagctgagcgacagatacagacacagactgagagtgcccctgcccaccgagctgctggtgatcgtggtggccaccctggtgagccacttcggccagctgcacaagagattcggcagcagcgtggccggcgacatccccaccggcttcatgcccccccaggtgcccgagcccagactgatgcagagagtggccctggacgccgtggccctggccctggtggccgccgccttcagcatcagcctggccgagatgttcgccagaagccacggctacagcgtgagagccaaccaggagctgctggccgtgggctgctgcaacgtgctgcccgccttcctgcactgcttcgccaccagcgccgccctggccaagagcctggtgaagaccgccaccggctgcagaacccagctgagcagcgtggtgagcgccaccgtggtgctgctggtgctgctggccctggcccccctgttccacgacctgcagagaagcgtgctggcctgcgtgatcgtggtgagcctgagaggcgccctgagaaaggtgtgggacctgcccagactgtggagaatgagccccgccgacgccctggtgtgggccggcaccgccgccacctgcatgctggtgagcaccgaggccggcctgctggccggcgtgatcctgagcctgctgagcctggccggcagaacccagagacccagaaccgccctgctggccagaatcggcgacaccgccttctacgaggacgccaccgagttcgagggcctggtgcccgagcccggcgtgagagtgttcagattcggcggccccctgtactacgccaacaaggacttcttcctgcagagcctgtacagcctgaccggcctggacgccggctgcatggccgccagaagaaaggagggcggcagcgagaccggcgtgggcgagggcggccccgcccagggcgaggacctgggccccgtgagcaccagagccgccctggtgcccgccgccgccggcttccacaccgtggtgatcgactgcgcccccctgctgttcctggacgccgccggcgtgagcaccctgcaggacctgagaagagactacggcgccctgggcatcagcctgctgctggcctgctgcagcccccccgtgagagacatcctgagcagaggcggcttcctgggcgagggccccggcgacaccgccgaggaggagcagctgttcctgagcgtgcacgacgccgtgcagaccgccagagccagacacagagagctggaggccaccgacgcccacctgtag

SEQ ID NO: 210985 - DNA, 2106 bp, Artificial Sequence
  derived and/or modified sequence
atggacgaaagtccagagccccttcagcagggaaggggcccagtgccagtacgccgccagaggccggccccaagagggcttcgggagatgctcaaggctagactgtggtgctcctgcagttgctccgtgctgtgcgtaagggccctggtgcaggatctattacctgctacgcgatggctgcgccagtatcggcctcgagagtatttagcgggggacgtcatgtcaggtctcgtgataggaatcattctcgtcccccaggcgatcgcatattccctcctggccggactccagcctatttactcactgtatacttcatttttcgctaatctgatctattttttgatgggtacatcacgccacgtgagcgttggcatattctccttgctgtgcctgatggtcggtcaggtggtagatcgggagctacagctcgccgggttcgatccttcccaggacgggttgcagccgggggccaatagcagtacactcaacggctctgctgccatgctggattgcgggcgggattgttatgcaatcagagtggccactgcactgaccctgatgacagggctttaccaggtccttatgggtgtgcttagactgggctttgtgagcgcatatcttagtcagccactgctggatgggtttgccatgggtgcgtctgtcaccattcttacaagccagcttaaacatctgctgggtgtcagaatccccagacatcagggacccggcatggtggtgttgacgtggctaagcctattgcgcggtgctggccaggctaatgtgtgcgacgtagtgacctctaccgtgtgtctggccgtgttgctcgcggccaaggagctgtcagatagataccggcaccgattgagagtacctctgcccaccgagttgctagtcattgttgtggctacactcgtttcccacttcggccaattgcacaagcgctttggatctagcgtggcaggagacatcccgactggtttcatgccaccgcaggtaccagagccaagactgatgcagcgcgtggcactggacgctgtggctttggccctggtggcggcagccttttccatttctttggcagaaatgtttgctcgatcccacgggtattccgtccgcgcaaaccaggagctcctggccgttggttgttgcaatgttctcccagccttcctgcactgctttgcaaccagcgcggccttagctaaaagcctggttaaaacggccactgggtgccgcacccaactcagctctgtggtgagtgccaccgttgttcttctggtcctcttagctctcgctcctctcttccatgatctgcagagatctgtgttagcctgtgtgattgttgtgtctctgagaggggccctccggaaagtttgggacctgccgagattatggagaatgagtcccgcagatgcattagtctgggctgggaccgccgccacctgtatgttagtttctacagaggcaggcttgctagccggcgtgattctgtctctgctctcgcttgcagggagaactcagaggcccagaactgccttattggcccgcatcggcgacaccgctttttacgaggatgccactgaattcgaagggctcgtgccagagcctggtgtcagggtgttcaggttcggaggcccattatactatgccaataaggatttctttttgcagagcttatacagtttaactggtctggacgccggctgtatggctgctcggaggaaagaaggaggatcggagaccggcgtgggtgagggtggacctgcacagggggaagatctgggacccgtaagcaccagagctgcactggtcccggccgctgccggctttcatacagtggtcattgattgcgctcccttgctgttcctggatgccgcaggcgttagtacccttcaggaccttagacgagactacggtgccttgggaatatctctcctactggcctgttgcagccccccagtgcgcgatattttatcaaggggaggcttcctcggagaagggccaggggatacggccgaagaagagcagttgtttctgagtgttcatgacgctgtgcagacagcccgggcaaggcatcgcgaactcgaggccacagatgcccacctctag

SEQ ID NO: 210986 - DNA, 2106 bp, Artificial Sequence
  derived and/or modified sequence
atggacgagagccctgagcctttacagcaggggcgcggccctgtgcctgtgaggagacagaggcctgcccccaggggtctccgagaaatgctcaaggcgcgcctctggtgctcttgcagctgtagtgtgctgtgcgtcagagccttagtccaggatcttctgcccgctacacgctggctgagacaatatcggccccgcgagtacctcgcaggggacgttatgtcaggactggtaatcgggatcattctggtaccacaagcaatcgcatactctctcctggcgggactacagcccatctacagcttgtacacatccttttttgctaatctcatctatttccttatgggaaccagtaggcacgtgtccgtcggcatctttagcctcctgtgcctcatggtaggccaggtggtcgacagagaactacagttagccgggtttgatccaagccaagatggcttgcagcctggggcgaatagctctacgctgaatggctctgccgcaatgctggactgcggccgtgactgctatgccatccgagtggctacagccctgacgttgatgacaggcctctaccaggtgctcatgggagtcctgcggctgggtttcgtctccgcttacttatcccagcccctcctggacgggtttgccatgggggccagcgtcaccatcctaacaagccagctgaagcacttactgggagtgcgcattcctcggcatcaggggccgggtatggtggtgctcacttggctttccctcctgcgcggagccggacaggcgaacgtctgtgatgttgtgacatccactgtgtgtctcgcagtgctcctcgccgcgaaagaactgtcagacagatataggcatcgcttgcgcgtcccactgccaacagagctactcgtgatcgtcgtagcaacgctggtatcccacttcgggcagcttcacaaaaggtttggttcatcagttgcaggcgacatccctacaggcttcatgccccctcaagtccctgagccaaggcttatgcaacgggtggcactagacgctgtcgcacttgctcttgttgcagctgccttttccatatctctcgctgaaatgtttgcccgatcccacggctactctgtgcgcgcgaatcaggagctgttggctgtagggtgttgtaacgtcttgcccgcattccttcactgtttcgcaacttcagctgccctggccaaatcccttgtgaagaccgctactggttgtcgcactcaactgtctagcgtcgtgtccgcaactgttgtgctcctagtccttcttgcacttgcccctttatttcacgacctccagagaagcgtcctggcatgcgtgattgtggtctctttgagaggcgcactcaggaaagtgtgggacctcccccgcttgtggcgcatgtccccagcagatgcacttgtttgggcagggacagccgcgacttgcatgctggtctcaaccgaggcgggactgctcgctggcgtcatcttgtctctgctctccctggccggccggactcagcgacccaggacagcactgctggctaggatcggagatacagccttttacgaagacgccacagaatttgaaggactggtgccggaacctggagtcagggtgtttcgattcggagggcctctttattacgcaaacaaagactttttccttcagtccctgtatagcctgaccgggctggatgccgggtgtatggcggcccggcggaaagaagggggtagcgaaacaggcgtgggggagggcggtccggcacaaggtgaagacttaggccccgtttctactagggccgctctggtccctgccgccgccggcttccacacagttgtgatcgattgtgctcctctgttgttcctcgacgctgcaggcgtatcaaccttgcaggatttgcgtagagactacggggctctagggattagtttgctactggcctgctgttccccaccggttagggatattctgtcaagaggagggtttctgggagagggtcctggggacactgcagaggaggaacagcttttcttatcagtgcacgacgccgtgcagaccgcccgcgcccggcatcgtgagctggaagcaaccgacgctcacctgtag

SEQ ID NO: 210987 - DNA, 2106 bp, Artificial Sequence
  derived and/or modified sequence
atggatgagagccctgagcccctgcagcagggccggggccctgtgcctgtgcggcggcagaggcctgccccccggggcctgcgggagatgctgaaggcccggctgtggtgcagctgcagctgcagcgtgctgtgtgtgcgggccctggtgcaggacctgctgcctgccacccgctggctgcggcagtaccggccccgggagtacctggccggagatgtgatgagcggcctggtgattggcatcatcctggtgccccaggccatcgcctacagcctgctggccggcctgcagcccatctacagcctgtacaccagcttctttgccaacctgatctacttcctgatgggcaccagccgccacgtgtctgtgggcatcttcagcctgctgtgcctgatggtgggccaggtggtggaccgggagctgcagctggccggctttgaccccagccaggacggcctgcagcccggggccaacagcagcaccctgaatggatctgctgccatgctggactgtggccgggactgctacgccatccgggtggccacagccctgaccctgatgacaggcctgtaccaggtgctgatgggcgtgctgcggctgggctttgtgtctgcctacctgagccagcccctgctggatggctttgccatgggcgcctctgtgaccatcctgaccagccagctgaagcacctgctgggcgtgcgcatccccaggcaccagggccctggcatggtggtgctgacctggctgagcctgctgcggggggccggccaggccaacgtgtgtgatgtggtgaccagcacagtgtgcctggccgtgctgctggccgccaaggagctgagtgaccgctaccgccaccggctgcgggtgcccctgcccacagagctgctggtgattgtggtggccaccctggtgagccacttcggccagctgcacaagagatttggcagctctgtggccggggacatccccaccggcttcatgccaccccaggtgcctgagccccggctgatgcagagggtggccctggatgctgtggccctggccctggtggccgccgccttcagcatcagcctggccgagatgtttgcccggagccacggctacagcgtgcgggccaaccaggagctgctggccgtgggctgctgcaatgtgctgcctgccttcctgcactgctttgccaccagcgctgccctggccaagagcctggtgaagacagccaccggctgcaggacccagctgagctctgtggtgtctgccaccgtggtgctgctggtgctgctggccctggcccccctcttccatgacctgcagaggtctgtgctggcctgcgtcatcgtggtgtccctgcggggggccctgaggaaggtgtgggacctgccccggctgtggaggatgagccctgcagatgccctggtgtgggccggcacagctgccacctgcatgctggtgtccacagaggccggcctgctggccggggtcatcctgagcctgctgagcctggccggccgcacccagaggcccaggacagccctgctggcccgcatcggggacacagccttctatgaagatgccacagaatttgagggcctggtgcctgagcccggggtgcgggtcttccgctttggaggccccctgtactatgccaacaaggacttcttcctgcagagcctgtacagcctgaccggcctggatgctggctgcatggccgcccggaggaaggagggcggcagcgagaccggggtgggggagggcggccctgcccagggcgaggacctgggccctgtgtccacccgggccgccctggtgcctgctgctgctggcttccacacagtggtgattgactgtgcccccctgctcttcctggatgctgctggggtgtccaccctgcaggacctgcggcgggactatggagccctgggcatcagcctgctgctggcctgctgcagcccccctgtgcgggacatcctgagccggggcggcttcctgggggagggccctggggacacagctgaggaggagcagctgttcctgtctgtgcatgatgctgtgcagacagcccgggcccggcaccgggagctggaggccacagatgcccacctgtag

SEQ ID NO: 210988 - DNA, 2106 bp, Artificial Sequence
  derived and/or modified sequence
atggacgagagccccgagcccctgcagcagggccggggccccgtgcccgtgcgccgccagcggcccgcaccccgcggtctcagagaaatgctgaaggcaaggctgtggtgttcctgctcttgctctgttctctgtgtgagagcactggtgcaagatttactccccgcaacaagatggctgcgtcagtatcgtccccgggagtacctcgccggtgatgtaatgtcagggcttgtcataggaatcatacttgtcccacaggcgatcgcatacagcctgcttgctggtctgcagcctatttattccctgtacacatcttttttcgccaatctgatctacttcctgatgggtacctctagacacgtgtccgtcggaatcttctccctactctgccttatggttgggcaggttgtggacagagaactacagctggccgggtttgatcctagccaagacgggctgcagcctggcgccaatagctcgacccttaacggaagcgccgctatgctcgactgtggccgcgactgttacgccatccgtgtggctactgcactcacactgatgacgggcctgtatcaggtgctcatgggagtgctgcgcttgggcttcgtgtcagcctacttgtctcaacctcttcttgatggctttgccatgggcgcctcagtaactatcctcacatctcagcttaagcacctcctgggggtgcgcatcccacgtcaccagggacctgggatggttgtgcttacctggctgtctctcctcagaggcgccgggcaggcgaatgtctgtgacgtagttaccagtaccgtgtgtcttgctgtacttttggccgcaaaagagctgtcggaccggtacaggcatcgcttgcgggtccccctgcctaccgaactgctggtgatcgtggtggctaccttggtgtcacattttggtcagctgcacaagagatttggctctagtgttgcgggcgatatccccacgggcttcatgccacctcaggtcccagagcctaggcttatgcagagagtagcactggatgcggtggcgcttgctctggtcgccgccgccttttctatctctctggccgaaatgttcgcacggtcccatggatactcggtgcgggctaatcaggagttgctggcagtgggctgctgtaatgtgctgccagcatttctacactgttttgctacatccgcggcgctggcgaaaagtctcgttaaaactgccaccggctgtcgcactcaactttcctcagtcgtctccgccacagttgttcttctggtgttgctggcattagcccccctgttccacgacttgcagcgctctgtcctcgcttgtgttattgtggtctctctgcgtggcgccctgaggaaggtttgggatttgccccggctttggaggatgtcccccgccgatgcactggtctgggccggcacagccgccacttgcatgctggtatcaactgaggccggtttactcgctggggttatcctaagtctgctatcactggcaggccgcacccagagaccaaggaccgcgcttttggctcggatcggcgacacggcattctatgaggacgccactgaattcgaagggctcgtccccgagcctggggttagggtgtttcgctttggcggtcctctgtattatgccaacaaagacttctttctgcagtcattgtattctctgaccgggctggatgctggttgcatggctgctcgccggaaagaaggtggatccgagacaggagtcggcgaaggaggtccagcccaaggtgaggacctgggcccagtgtcaacacgagctgcgttggtgcccgctgcagccggctttcatactgtggtcatcgattgcgcacctctgctcttccttgatgctgctggtgttagtacccttcaggacctgcgacgcgattatggggccttgggaatctcactactgctcgcctgttgttccccacccgtgcgcgacattctgagtcgaggcggcttcctgggggagggacccggcgatacagctgaggaagagcagctgttcttatccgtgcacgacgctgtccagactgcccgggcccggcaccgggagctcgaggctactgacgcccacctgtag

SEQ ID NO: 210989 - DNA, 2106 bp, Artificial Sequence
  derived and/or modified sequence
atggacgagagccccgagcccctgcagcagggccggggccccgtgcccgtgcgacgccagcggccagcacctcgaggtctgagagaaatgctgaaggcacgtctatggtgctcctgctcgtgctctgtcctgtgcgtcagggccctggtgcaggatctactgcccgcaaccaggtggcttcgccagtaccgtccaagggagtatctggctggggacgttatgtcgggacttgtcataggcattatattagttccgcaggctatcgcctactccttgttggctggcctgcagcccatttattccctgtatacctcgttctttgccaatctcatttactttctcatgggcacatcccgccatgtgtcagtagggatcttttctttgttatgtctgatggttggacaggtggtggatcgagagctgcagctcgccgggtttgatccaagccaggacggactccagcccggagctaacagcagtaccctgaacgggtccgcagctatgctcgactgcgggcgggactgctacgcaattagagtcgcaacagccctgaccctgatgacgggactgtaccaggtgctcatgggtgtccttaggttaggcttcgtgtctgcctacctctctcagcctctcttggacggatttgctatgggcgccagcgtgaccatcctaaccagtcagctgaaacacctgctgggggtgcgcatacctagacaccagggacccgggatggttgtacttacatggctcagcttgttgaggggtgcgggccaggccaatgtatgtgatgtcgtgacaagcaccgtgtgccttgcagtgctactcgccgccaaggaactatccgatagataccgccaccggctgcgcgtgccccttcctacagaattgctggtgatcgtcgtcgctacactcgtgtcccacttcgggcaactccataagcgatttgggagctctgtcgccggcgacattcccaccggcttcatgccaccacaggtgccggagcctcggctgatgcagcgcgtggccctggacgcagtggccctagcactggtggctgcagctttcagcatcagcctcgccgaaatgtttgctagaagtcacggttattcagtgagggctaaccaggaattgttggcagtgggctgttgtaatgtcttgccagctttcctgcactgttttgccacatccgctgccctggctaagtccctcgttaaaacggcaaccgggtgccggacgcagttgtcctctgtagtgtccgcaactgtggtactcctcgtcctgctcgcccttgccccactgttccacgacctgcagagaagcgtgctggcttgcgtgatagtggtatccctaaggggggcactacgcaaggtctgggacctccctagactgtggcggatgagccccgccgacgccctggtgtgggcaggaacagctgccacttgcatgctggtctcaaccgaggctgggttattagccggggtgatcctctctctgttgagcctcgcaggcagaacccagaggccacgcacagcgctcctggccagaatcggagacacagcgttctacgaagatgcaacagaattcgaaggactggtgccagaaccgggggtgcgggtctttaggttcggtgggccactgtactacgcaaacaaggatttcttcctccagagcctctatagcctgactggacttgacgcaggctgtatggctgcaaggcgaaaagagggtgggagcgagactggggttggcgaaggcggcccagctcagggcgaagatctgggtcctgtgagcacccgagctgccctggtgcctgccgccgccggattccacacggtggttatcgattgcgcacctttactgtttctcgacgcagctggcgtgtcaaccctgcaggatctgcgacgtgactatggggcattgggaatctctcttcttttggcctgctgctcgccccccgtgcgggatatcctatccagaggtggttttctgggcgagggacccggagacacagctgaggaggagcaactgttcctatctgtccacgatgccgtgcagaccgcaagagccagacatagggaactcgaggccactgacgcgcacctttag

SEQ ID NO: 210990 - DNA, 2106 bp, Artificial Sequence
  derived and/or modified sequence
atggatgagtcccctgaaccactgcagcagggaagaggcccagtgccagtcaggcgccagagacccgctccacgcggtctgagagagatgctcaaagccagactttggtgttcctgctcgtgcagtgtactgtgcgtgcgggcactggtacaggatctattgcccgctactaggtggttgcggcagtaccggccaagagagtacctggctggggacgttatgtctggactcgtaataggcatcatcttggtgcctcaggctatagcctacagtctcctcgccggactgcagccaatttatagtctgtacacttctttcttcgccaaccttatctattttctgatgggtacaagccggcatgtctctgtgggaatcttctctctgctgtgtttaatggtgggacaggtggtggatcgtgagctgcaactggcagggtttgatccgagtcaggatgggctgcagccaggcgctaactcttctactctaaacgggtccgcagcaatgctggactgtggcagagattgctacgcgattagagtcgccacagccctgactctgatgaccgggctttaccaggtgctaatgggtgtgttgcggttgggatttgtttccgcctacttatcccaacccctgctggatggctttgctatgggtgccagtgtcactattctcacaagtcagctaaaacatctgttaggcgtgcggatacctcggcaccaggggccaggtatggtggtcttgacttggttgtctcttcttagaggcgctgggcaggcaaacgtgtgcgatgtggtaactagtacagtatgtctggctgtcctgctcgctgctaaagagctgtctgatagataccggcaccgtttgcgggtccctttacccaccgagctcttggtgattgttgtggccacgttagtgtctcattttggtcaacttcataaacgtttcggttcaagcgttgcaggggacatacctactggtttcatgccccctcaggtgcccgagcccagacttatgcaaagggtggcgctggacgcagtcgctctggcactggttgccgctgccttctccatatccctggcggaaatgtttgctagatcacacggatactctgtgcgcgctaatcaggagctcctggcggtcggttgttgtaatgtgctaccagcattcctccattgctttgcaacaagtgccgcactggccaagtcactcgttaagactgccaccgggtgcagaactcaactgtcttcagtggtctctgctaccgtagtgcttctcgtgctcctggcacttgcacccctgttccacgacttgcagagaagcgtgttagcatgcgtgattgtagtatctctgcgaggggctcttcggaaggtgtgggacctcccccgtctttggaggatgagtccagccgacgccttggtttgggcaggcaccgcggctacatgtatgctggttagtaccgaggccggactgctcgcaggtgtcatcctttccctgctctcccttgctgggaggactcaacggccaagaacagccctcctcgccaggataggagacacggcattctatgaagatgctactgaatttgaggggctcgttcccgaaccaggggtcagggtatttaggttcggaggacccctgtactacgctaataaggacttttttttacagtcactgtatagtctcaccggattagacgctggctgtatggccgcacgcagaaaggagggcggatccgagaccggtgtgggtgaggggggacccgcacaaggagaggacctaggacccgtgagcacacgagctgccctagtgcctgcagcggcaggctttcatacagttgtgatagattgtgcacctttgctgtttctggatgccgctggcgtcagcactctgcaagacttacggagagattacggagcattgggcatcagcttactcctcgcttgctgtagtccccctgtaagggatatcctgtcacgtggaggatttctcggcgaggggccaggcgatactgccgaggaagaacagctctttctgtccgtgcatgacgctgtgcagactgcacgcgcacgacacagagaactagaagcaacagatgcccacctgtag

SEQ ID NO: 210991 - DNA, 2106 bp, Artificial Sequence
  derived and/or modified sequence
atggacgaatcccccgagcctctgcaacagggaagagggcctgtacctgttagacggcagcggcctgcgcctcgcggactgcgcgaaatgctgaaagccagattgtggtgttcgtgtagttgttcagtgctgtgtgtgcgagccctcgttcaagatttgctcccagccacccgttggctgagacagtacaggcccagagagtatctcgctggggatgttatgtccggccttgtgatcggaataattcttgtacctcaagccattgcctactcactgctcgcgggactgcagcccatctacagcctatacacctcattcttcgctaatctcatctactttctgatgggcacaagcagacacgtctctgttggcattttttctttattgtgtctgatggtcgggcaggtagtggaccgcgagctgcagctggcgggtttcgacccatctcaggacggactccagccgggtgctaattcttcaactctgaatgggtcagcggctatgctagattgtggaagagattgctacgccatccgtgtcgcaacggccctgaccctaatgaccggtctttatcaggtgttgatgggagtgctccgcctggggtttgtgtccgcctaccttagccagcctctgcttgacgggttcgctatgggtgcctctgtcacaattcttaccagccagcttaaacatctcttgggagtgcgcatcccccgacaccaaggtcccggaatggtggtcctaacgtggctaagtttattacgaggggctggtcaagctaacgtgtgtgacgtggttactagcaccgtgtgcctcgccgtgctgctggccgcaaaggaattgagcgacagatatcgccacagactgcgagtgcctctgcccactgaactgctggtgattgttgtggcaacactggtgagccacttcggtcagctacacaaacgttttggctcttcagtggcgggtgatatacccacaggatttatgccaccacaagttcccgagccgcgtttgatgcagcgcgtggcgttggacgctgtggccttggctctcgtggctgccgctttctctattagcttggcagaaatgttcgctagaagccatggctacagtgtccgagcaaaccaggaattgctagcagttgggtgttgtaatgtactcccggcattcctccactgcttcgccacttccgctgctctagcaaagtctctggtaaaaacggcgacaggttgccgcactcagctgtcatctgttgtatctgcaacagtggtactgctcgtgctcctggctctcgcacccttgtttcatgatcttcagcgatctgtactggcctgcgtcatagtcgtgagcttacgaggggctctccgtaaggtgtgggacctccccagactttggcggatgagtccagccgacgcgttagtttgggccggtaccgccgcaacttgtatgctggtttctacagaagctggtctgcttgccggtgttatcctgagtctgttatctctggcgggacgtacgcagcgaccacgcacagccctacttgccagaataggtgacaccgcgttttatgaagacgccacagaattcgaagggcttgtccctgagcctggcgttcgcgtctttcggttcggaggacccttatactatgccaacaaggacttttttctgcaatcactgtacagcctaacaggactggatgccggttgcatggcagcgcgtcggaaagagggcggtagtgagaccggtgttggcgaggggggtccagcacagggcgaggatctaggcccagtatccactcgggcagctcttgtgccggctgccgctgggttccacacagtggtgatagactgcgccccactgctgttcctagatgccgctggcgtatcaacactgcaggatctccgaagggattacggggctctgggaatctccctgctcctcgcgtgttgcagcccccctgtcagagacatcctttcccgtggaggcttcctgggagagggccctggggacaccgcagaggaggagcaattatttttgtccgtgcatgatgcagtgcaaacggctcgggcaagacaccgcgagctggaggccactgacgctcacctgtag

SEQ ID NO: 210992 - DNA, 3660 bp, Artificial Sequence
  derived and/or modified sequence
accactgcctgcaggttggcgccaccacccccactctccccgctgctcgcgggagccagagggccctgcggtcctcggtggtcttgccagcccctcgtcatcccagggccctccgcgcctgtgaggactccctcagcgtgcaaacagcaggctcagcccaggctccagggtgtcctgggcacctggtgtcctgggagcaaagtctttgcctaacgtcgctgagaagaatgtttaaagtgaaagtacattggagtctgcaaacaggacagacccgaggcctcacgtgggaccagtcaggcctctaagcaccgcctccctaacgccacggtgttttccgagatcaagggaaaggtcggccacgggacctgacgcaacaggatggacgagtcccctgagcctctgcagcagggcagagggccggtgccggtccgacggcagcgcccagcaccccggggtctgcgtgagatgctgaaggccaggctgtggtgcagctgctcgtgcagtgtgctgtgcgtccgggcgctggtgcaggacctgctccccgccacgcgctggctgcgtcagtaccgcccgcgggagtacctggcaggcgacgtcatgtctgggctggtcatcggcatcatcctggtgccgcaggccatcgcctactcattgctggccgggctgcagcccatctacagcctctatacgtccttcttcgccaacctcatctacttcctcatgggcacctcacggcatgtctccgtgggcatcttcagcctgctttgcctcatggtggggcaggtggtggaccgggagctccagctggccggctttgacccctcccaggacggcctgcagcccggagccaacagcagcaccctcaacggctcggctgccatgctggactgcgggcgtgactgctacgccatccgtgtcgccaccgccctcacgctgatgaccgggctttaccaggtcctcatgggcgtcctccggctgggcttcgtgtccgcctacctctcacagccactgctcgatggctttgccatgggggcctccgtgaccatcctgacctcgcagctcaaacacctgctgggcgtgcggatcccgcggcaccaggggcccggcatggtggtcctcacatggctgagcctgctgcgcggcgccgggcaggccaacgtgtgcgacgtggtcaccagcacggtgtgcctggcggtgctgctagccgcgaaggagctctcagaccgctaccgacaccgcctgagggtgccgctgcccacggagctgctggtcatcgtggtggccacactcgtgtcgcacttcgggcagctccacaagcgctttggctcgagcgtggctggcgacatccccacgggtttcatgccccctcaggtcccagagcccaggctgatgcagcgtgtggctttggatgccgtggccctggccctcgtggctgccgccttctccatctcgctggcggagatgttcgcccgcagtcacggctactctgtgcgtgccaaccaggagctgctggctgtgggctgctgcaacgtgctacccgccttcctccactgcttcgccaccagcgccgccctggccaagagcctggtgaagacagccactggctgccggacacagctgtccagcgtggtcagcgccaccgtggtgctgctggtgctgctggcgctggcaccgctgttccacgacctacagcgaagcgtgctggcctgcgtcatcgtggtcagcctgcggggggccctgcgcaaggtgtgggacctcccgcggctgtggcggatgagcccggctgacgcgctggtctgggcaggcaccgcggccacctgtatgctggtcagcacagaggccgggctgctggctggcgtcatcctctcgctgctcagcctggccggccgcacccaacgcccacgcaccgccctgctggcccgcatcggggacacggccttctacgaggatgccacagagttcgagggcctcgtccctgagcccggcgtgcgggtgttccgctttggggggccgctgtactatgccaacaaggacttcttcctgcagtcactctacagcctcacggggctggacgcagggtgcatggctgccaggaggaaggaggggggctcagagacgggggtcggtgagggaggccctgcccagggcgaggacctgggcccggttagcaccagggctgcgctggtgcccgcagcggccggcttccacacagtggtcatcgactgcgccccgctgctgttcctagacgcagccggtgtgagcacgctgcaggacctgcgccgagactacggggccctgggcatcagcctgctgctagcctgctgcagcccgcctgtgagagacattctgagcagaggaggcttcctcggggagggccccggggacacggctgaggaggagcagctgttcctcagtgtgcacgatgccgtgcagacagcacgagcccgccacagggagctggaggccaccgatgcccatctgtagcagggccaggcctgcccagcagcctctgctccctcctggggacccacagcagacgtctgcaagccactgctgagacccttcccagggaggagccacccaagagctgcactcttgtgccacagctgccctggggaaaccggggaaccccaactgggaaaggaggccctctgatcacacgcaggacccaaacactcagaaatcaagaacctctgcctccgagacaggctggcccacagtgctggctgggccccaatgcaccgtccctcagctcaggagggatgggcctgacctgacgctcagggttgacatcttatttgaacaagggtcccccgccatcatgcagcctccaaggtgccaagaggactccctatgcccaggcctgcccggtgcccaccctgctggtaggagccagcggctctggccaagtgcacgagggtctctgtgtttccagaaggccccacacacccaagtgcccctcacacctcgtgcctccccctcacagggtggccacctgcaccagcgtcagggcccagggtgctgtgaccgatgagacctcagctcagccctcaggtgcagtggccctacccagcctggccagcagacacacacagggatgctcacgggtgcaccaggagccaggtgcggcgcagccaaccctgagcctgcagggagacctgcaggaagcccaccgtgccccatgcaggggctccctccagcacacagccctcaccccagcacagccagcaaggacacgctctccccaacagggtgcttcggcgggaggtgggggaacaaggggtcttccgagcagcccccagccctcccctcccatctgtgcctctgtaaggggctctgggacgcccagaccctgcccgccgcccacctggtggtgacaagctccagcagccagtgggtccggacctgcttgatgccgcggtgagggacggcgcccacataggcgaggttgagctgctggtcccagctgaggacgtactggtcagcctggctgtgtggcagcggggggctggggacaacaaaggggcggctcagtcccgagcctcagcatggctggcagcgcggctgacacacacgttcaagcccaggactgcccgggcgcaggatccaggcgctgcccgtgcgttcagtgactaataaaatgacccttagggccaggaa

SEQ ID NO: 210993 - DNA, 3109 bp, Artificial Sequence
  derived and/or modified sequence
acagaccactgcctgcaggttggcgccaccacccccactctccccgctgctcgcgggagccagagggccctgcggtcctcggtggtcttgccagcccctcgtcatcccagggccctccgcgcctgtgaggactccctcaggtcggccacgggacctgacgcaacaggatggacgagtcccctgagcctctgcagcagggcagagggccggtgccggtccgacggcagcgcccagcaccccggggtctgcgtgagatgctgaaggccaggctgtggtgcagctgctcgtgcagtgtgctgtgcgtccgggcgctggtgcaggacctgctccccgccacgcgctggctgcgtcagtaccgcccgcgggagtacctggcaggcgacgtcatgtctgggctggtcatcggcatcatcctggtgccgcaggccatcgcctactcattgctggccgggctgcagcccatctacagcctctatacgtccttcttcgccaacctcatctacttcctcatgggcacctcacggcatgtctccgtgggcatcttcagcctgctttgcctcatggtggggcaggtggtggaccgggagctccagctggccggctttgacccctcccaggacggcctgcagcccggagccaacagcagcaccctcaacggctcggctgccatgctggactgcgggcgtgactgctacgccatccgtgtcgccaccgccctcacgctgatgaccgggctttaccaggtcctcatgggcgtcctccggctgggcttcgtgtccgcctacctctcacagccactgctcgatggctttgccatgggggcctccgtgaccatcctgacctcgcagctcaaacacctgctgggcgtgcggatcccgcggcaccaggggcccggcatggtggtcctcacatggctgagcctgctgcgcggcgccgggcaggccaacgtgtgcgacgtggtcaccagcacggtgtgcctggcggtgctgctagccgcgaaggagctctcagaccgctaccgacaccgcctgagggtgccgctgcccacggagctgctggtcatcgtggtggccacactcgtgtcgcacttcgggcagctccacaagcgctttggctcgagcgtggctggcgacatccccacgggtttcatgccccctcaggtcccagagcccaggctgatgcagcgtgtggctttggatgccgtggccctggccctcgtggctgccgccttctccatctcgctggcggagatgttcgcccgcagtcacggctactctgtgcgtgccaaccaggagctgctggctgtgggctgctgcaacgtgctacccgccttcctccactgcttcgccaccagcgccgccctggccaagagcctggtgaagacagccactggctgccggacacagctgtccagcgtggtcagcgccaccgtggtgctgctggtgctgctggcgctggcaccgctgttccacgacctacagcgaagcgtgctggcctgcgtcatcgtggtcagcctgcggggggccctgcgcaaggtgtgggacctcccgcggctgtggcggatgagcccggctgacgcgctggtctgggcaggcaccgcggccacctgtatgctggtcagcacagaggccgggctgctggctggcgtcatcctctcgctgctcagcctggccggccgcacccaacgcccacgcaccgccctgctggcccgcatcggggacacggccttctacgaggatgccacagagttcgagggcctcgtccctgagcccggcgtgcgggtgttccgctttggggggccgctgtactatgccaacaaggacttcttcctgcagtcactctacagcctcacggggctggacgcagggtgcatggctgccaggaggaaggaggggggctcagagacgggggtcggtgagggaggccctgcccagggcgaggacctgggcccggttagcaccagggctgcgctggtgcccgcagcggccggcttccacacagtggtcatcgactgcgccccgctgctgttcctagacgcagccggtgtgagcacgctgcaggacctgcgccgagactacggggccctgggcatcagcctgctgctagcctgctgcagcccgcctgtgagagacattctgagcagaggaggcttcctcggggagggccccggggacacggctgaggaggagcagctgttcctcagtgtgcacgatgccgtgcagacagcacgagcccgccacagggagctggaggccaccgatgcccatctgtagcagggccaggcctgcccagcagcctctgctccctcctggggacccacagcagacgtctgcaagccactgctgagacccttcccagggaggagccacccaagagctgcactcttgtgccacagctgccctggggaaaccggggaaccccaactgggaaaggaggccctctgatcacacgcaggacccaaacactcagaaatcaagaacctctgcctccgagacaggctggcccacagtgctggctgggccccaatgcaccgtccctcagctcaggagggatgggcctgacctgacgctcagggttgacatcttatttgaacaagggtcccccgccatcatgcagcctccaaggtgccaagaggactccctatgcccaggcctgcccggtgcccaccctgctggtaggagccagcggctctggccaagtgcacgagggtctctgtgtttccagaaggccccacacacccaagtgcccctcacacctcgtgcctccccctcacagggtggccacctgcaccagcgtcagggcccagggtgctgtgaccgatgagacctcagctcagccctcaggtgcagtggccctacccagcctggccagcagacacacacagggatgctcacgggtgcaccaggagccaggtgcggcgcagccaaccctgagcctgcagggagacctgcaggaagcccaccgtgccccatgcaggggctccctccagcacacagccctcaccccagcacagccagcaaggacacgctctccccaacagggtgcttcggcgggaggtgggggaacaaggggtcttccgagcagcccccagccctcccctcccatctgt

SEQ ID NO: 210994 - protein, 221 aa, Artificial Sequence
  derived and/or modified sequence
MWSAGRGGAAWPVLLGLLLALLVPGGGAAKTGAELVTCGSVLKLLNTHHRVRLHSHDIKYGSGSGQQSVTGVEASDDANSYWRIRGGSEGGCPRGSPVRCGQAVRLTHVLTGKNLHTHHFPSPLSNNQEVSAFGEDGEGDDLDLWTVRCSGQHWEREAAVRFQHVGTSVFLSVTGEQYGSPIRGQHEVHGMPSANTHNTWKAMEGIFIKPSVEPSAGHDEL

SEQ ID NO: 210995 - DNA, 666 bp, Artificial Sequence
  derived and/or modified sequence
atgtggagcgccggcagaggcggcgccgcctggcccgtgctgctgggcctgctgctggccctgctggtgcccggcggcggcgccgccaagaccggcgccgagctggtgacctgcggcagcgtgctgaagctgctgaacacccaccacagagtgagactgcacagccacgacatcaagtacggcagcggcagcggccagcagagcgtgaccggcgtggaggccagcgacgacgccaacagctactggagaatcagaggcggcagcgagggcggctgccccagaggcagccccgtgagatgcggccaggccgtgagactgacccacgtgctgaccggcaagaacctgcacacccaccacttccccagccccctgagcaacaaccaggaggtgagcgccttcggcgaggacggcgagggcgacgacctggacctgtggaccgtgagatgcagcggccagcactgggagagagaggccgccgtgagattccagcacgtgggcaccagcgtgttcctgagcgtgaccggcgagcagtacggcagccccatcagaggccagcacgaggtgcacggcatgcccagcgccaacacccacaacacctggaaggccatggagggcatcttcatcaagcccagcgtggagcccagcgccggccacgacgagctgtag

SEQ ID NO: 210996 - DNA, 666 bp, Artificial Sequence
  derived and/or modified sequence
atgtggagcgccggtaggggaggcgccgcatggccagttcttttaggcctcctcctggctttattagtgcctggtggcggtgccgccaaaactggtgccgaactcgttacttgcgggagcgtgctcaagctgctgaatacgcatcatcgggtgaggttacattcacacgacataaagtacggatccggctcagggcagcagtctgtgactggggttgaggcgagcgacgacgctaacagctattggcgtatccgaggcggaagcgagggcggctgtcctcgaggtagccccgttcggtgcgggcaagctgtgcggctcactcacgtacttaccggcaaaaatcttcatacccatcattttccatcgcctcttagcaacaatcaggaggtgtccgctttcggggaggacggggaaggggatgacctcgacctctggacggtccggtgcagcggccagcattgggaacgggaagctgccgtgcgttttcagcacgtggggacttcagtttttcttagtgtcaccggcgagcagtacggaagccccattaggggccaacatgaagtgcacggcatgccatctgccaatacgcacaacacatggaaggccatggagggaatctttatcaaacctagcgtcgagcccagtgcagggcacgacgaactgtag

SEQ ID NO: 210997 - DNA, 666 bp, Artificial Sequence
  derived and/or modified sequence
atgtggagcgctggccggggcggggccgcctggcctgtgctgctgggcctgctgctggccctgctggtgcctgggggcggggccgccaagacaggagctgagctggtgacctgtggctctgtgctgaagctgctgaacacccaccaccgggtgcggctgcacagccatgacatcaagtatggcagcggcagcggccagcagagcgtgactggagtggaggccagtgatgatgccaacagctactggaggatccggggcggcagcgagggcggctgcccccggggcagccctgtgcgctgtggccaggccgtgcggctgacccacgtgctgaccgggaagaacctgcacacccaccacttccccagccccctgagcaacaaccaggaggtgtctgcctttggagaagatggagaaggagatgacctggacctgtggacagtgcgctgcagcggccagcactgggagcgggaggccgctgtgcgcttccagcacgtgggcaccagcgtcttcctgtctgtgactggagagcagtatggcagccccatccggggccagcacgaggtgcacggcatgcccagcgccaacacccacaacacctggaaggccatggagggcatcttcatcaagcccagcgtggagcccagcgctggccatgatgagctgtag

SEQ ID NO: 210998 - DNA, 666 bp, Artificial Sequence
  derived and/or modified sequence
atgtggagcgccggccggggcggcgccgcctggcccgtgctgctgggcctactcctcgcccttctggttccagggggcggagctgcaaagaccggtgccgaactcgttacttgtgggagcgtgctgaaactgttaaatacgcaccatcgagttcgtcttcatagccacgacatcaagtacgggtccggaagtggccagcagtccgtaactggtgtagaagcttcagatgatgccaattcttactggcgcatccgggggggatcagagggaggctgtcccaggggtagccctgttaggtgtggccaggctgtgcggctaacccacgtacttacaggcaagaacttgcatacacaccactttcctagccctcttagtaataatcaggaggtctccgcattcggggaggatggcgagggcgacgatctggacctgtggaccgtacggtgcagcggtcagcattgggagcgcgaggccgccgtcagatttcagcatgtaggcacaagcgtcttcctgagcgttacaggcgagcagtacggctcccccattcgcggtcagcacgaagtccatggaatgccttcagcgaatacccacaatacctggaaggcaatggagggtatctttataaaaccaagcgttgagcccagcgcgggacacgatgagctttag

SEQ ID NO: 210999 - DNA, 666 bp, Artificial Sequence
  derived and/or modified sequence
atgtggagtgctggtagaggtggagctgcttggcccgtgctgcttggcctgctgcttgctctgctcgtgccgggaggaggcgctgcaaaaaccggagccgaactagtcacgtgtggttcagttttgaaacttctgaatacacaccaccgagtgagacttcactcacacgacataaagtatggatcagggtccggtcagcaatcggtgacaggagtggaggcatctgacgacgccaatagctattggagaatacggggaggttcagaaggaggttgccccagaggcagcccagtccgttgtggccaggccgtgaggcttacgcacgtactgactggcaagaaccttcacacccatcattttcctagcccattgtctaacaaccaagaggtgagcgccttcggcgaggatggagagggcgatgacctcgatttgtggactgttagatgctccggtcaacactgggagcgggaagccgctgtccgtttccagcacgttggcacgtcagtgttcctgtcggtgactggagagcaatacggttcacctatccgcggacagcacgaggtgcacggaatgcctagcgctaatactcacaatacatggaaggcaatggagggtatttttatcaaacctagcgttgaaccgagcgcaggccatgacgagctttag

SEQ ID NO: 211000 - DNA, 865 bp, Artificial Sequence
  derived and/or modified sequence
ctgtcagaaccggattgggccgcggcggggacggaagcggcccctgggcccgaggggctggagccgggccggggcgatgtggagcgcgggccgcggcggggctgcctggccggtgctgttggggctgctgctggcgctgttagtgccgggcggtggtgccgccaagaccggtgcggagctcgtgacctgcgggtcggtgctgaagctgctcaatacgcaccaccgcgtgcggctgcactcgcacgacatcaaatacggatccggcagcggccagcaatcggtgaccggcgtagaggcgtcggacgacgccaatagctactggcggatccgcggcggctcggagggcgggtgcccgcgcgggtccccggtgcgctgcgggcaggcggtgaggctcacgcatgtgcttacgggcaagaacctgcacacgcaccacttcccgtcgccgctgtccaacaaccaggaggtgagtgcctttggggaagacggcgagggcgacgacctggacctatggacagtgcgctgctctggacagcactgggagcgtgaggctgctgtgcgcttccagcatgtgggcacctctgtgttcctgtcagtcacgggtgagcagtatggaagccccatccgtgggcagcatgaggtccacggcatgcccagtgccaacacgcacaatacgtggaaggccatggaaggcatcttcatcaagcctagtgtggagccctctgcaggtcacgatgaactctgagtgtgtggatggatgggtggatggagggtggcaggtggggcgtctgcagggccactcttggcagagactttgggtttgtaggggtcctcaagtgcctttgtgattaaagaatgttggtctatg

SEQ ID NO: 211001 - protein, 904 aa, Artificial Sequence
  derived and/or modified sequence
MDRYLLLVIWGEGKFPSAASREAEHGPEVSSGEGTENQPDFTAANVYHLLKRSISASINPEDSTFPACSVGGIPGSKKWFFAVQAIYGFYQFCSSDWQEIHFDTEKDKIEDVLQTNIEECLGAVECFEEEDSNSRESLSLADLYEEAAENLHQLSDKLPAPGRAMVDIILLLSDKDPPKLKDYLPTVGALKHLREWYSAKITIAGNHCEINCQKIAEYLSANVVSLEDLRNVIDSKELWRGKIQIWERKFGFEISFPEFCLKGVTLKNFSTSNLNTDFLAKKIIPSKDKNILPKVFHYYGPALEFVQMIKLSDLPSCYMSDIEFELGLTNSTKQNSVLLLEQISSLCSKVGALFVLPCTISNILIPPPNQLSSRKWKEYIAKKPKTISVPDVEVKGECSSYYLLLQGNGNRRCKATLIHSANQINGSFALNLIHGKMKTKTEEAKLSFPFDLLSLPHFSGEQIVQREKQLANVQVLALEECLKRRKLAKQPETVSVAELKSLLVLTRKHFLDYFDAVIPKMILRKMDKIKTFNILNDFSPVEPNSSSLMETNPLEWPERHVLQNLETFEKTKQKMRTGSLPHSSEQLLGHKEGPRDSITLLDAKELLKYFTSDGLPIGDLQPLPIQKGEKTFVLTPELSPGKLQVLPFEKASVCHYHGIEYCLDDRKALERDGGFSELQSRLIRYETQTTCTRESFPVPTVLSPLPSPVVSSDPGSVPDGEVLQNELRTEVSRLKRRSKDLNCLYPRKRLVKSESSESLLSQTTGNSNHYHHHVTSRKPQTERSLPVTCPLVPIPSCETPKLATKTSSGQKSMHESKTSRQIKESRSQKHTRILKEVVTETLKKHSITETHECFTACSQRLFEISKFYLKDLKTSRGLFEEMKKTANNNAVQVIDWVLEKTSKK

SEQ ID NO: 211002 - DNA, 2715 bp, Artificial Sequence
  derived and/or modified sequence
atggaccgctatctcctactggtgatctggggagagggcaagtttccaagcgcggcctcaagggaagcagagcatggccctgaggtgtctagcggggagggcacagagaatcaaccagatttcaccgccgcaaacgtgtatcacctgctgaaaagaagcatatccgcaagtatcaaccctgaggatagtacatttcctgcgtgttccgtgggggggatacctgggtccaagaagtggttttttgctgtgcaggccatttacggtttctatcagttttgctctagcgactggcaggaaatacatttcgacacagagaaggacaaaattgaagacgtcctccagacaaacattgaggagtgtcttggcgccgtagagtgttttgaggaggaagactcaaacagtagggaatcgttgtcactcgcagacctgtacgaagaagcagccgagaacttgcaccaactgagcgataagcttccagcccccggacgcgccatggtggatattatcttactgttgtcagataaggatccgcctaagttgaaagactacttacctaccgtcggcgcgctgaaacacctcagagaatggtatagcgcgaaaatcacaatagccggtaatcactgcgagattaactgtcagaaaatcgctgaatatcttagcgccaatgtcgtgtccctcgaggacctgaggaatgtcatcgacagtaaggagctatggaggggcaaaatccaaatttgggagcgcaagtttggattcgagatttcgttcccggagttttgcctgaagggtgttactctgaagaacttctccaccagtaacctaaatactgacttcttggcaaaaaaaatcatccccagcaaggacaaaaacattctacctaaggtgttccactattacggacctgcccttgaatttgtgcagatgattaagctgtccgacttgccgtcgtgttatatgtcagacatcgaatttgagcttggccttacaaactctactaaacagaactccgtgttgctcctggagcagattagctctctgtgcagtaaagttggagctctctttgtactgccctgcacaatctccaacatccttattcccccacccaaccaactcagttcacggaagtggaaggaatacatcgccaagaaacctaaaaccatctctgttccagacgtcgaggtcaagggtgagtgtagctcatattacctgcttcttcagggcaacggtaatcggagatgtaaggcaaccctaatccacagcgccaaccaaatcaacggaagcttcgccttgaacttgatacacggtaagatgaaaactaagactgaggaagccaaactctcctttccttttgatctgctgagccttcctcactttagtggcgagcagatcgttcagcgggagaaacaactggctaacgtgcaggttttggccctggaggagtgccttaagcgcaggaagttggccaagcaaccagagacagtctcagttgccgagctcaagagcctgctcgtattaacccgaaagcacttcctcgattattttgatgcggtaatccccaaaatgatcctgcggaaaatggacaagatcaagacgtttaatatactgaatgattttagccccgtggaacccaactcgtccagccttatggagactaatcccttagaatggcccgaacgccatgtgctgcaaaatctggagaccttcgaaaaaacgaaacagaagatgagaaccgggtcgctgcctcactcctccgaacaacttctgggacacaaggaaggtccgagagactctatcaccctcctggatgccaaggaactcctcaagtacttcacctcagatggacttccgattggcgatctgcagcccctcccaattcagaagggcgagaagacatttgtcctaacccctgagctgtcaccaggaaagctccaggtactcccatttgagaaggcatccgtgtgccattaccacggtatagaatattgcctagacgaccgaaaagccctggagcgggacgggggcttttctgagctgcagagtaggctgattcgctatgaaacccaaacaacctgcactagagagtccttccccgtgccaacagtcttaagcccactgccctccccagtggttagcagcgacccaggatcagtgcccgacggagaagtcctgcaaaatgagttgagaactgaagtgagccgacttaagaggcggtctaaggacctcaactgtttatacccccggaaaaggctagtcaagtctgaatcttctgaaagtttactctctcagacgaccggcaacagtaaccattaccatcaccatgtgaccagccggaagcctcaaaccgagaggtcattgcctgtcacttgcccactggttcctataccttcctgtgagaccccaaagcttgctacgaaaacgagctctgggcagaaatccatgcacgaaagcaaaacgagccgccagattaaagaaagtcggagtcagaaacacacacgcatacttaaggaagtcgtcactgagaccctgaaaaagcactctataactgagacacatgagtgctttacagcttgctcccagcggctgtttgagatatctaaattttacctaaaggacttgaagactagccgcggcctatttgaagagatgaaaaaaaccgctaataacaacgccgtgcaggttattgattgggtgctggaaaagacttccaagaaatag

SEQ ID NO: 211003 - DNA, 2715 bp, Artificial Sequence
  derived and/or modified sequence
atggaccgctacctgctgctggtgatctggggcgagggcaagttccccagcgctgccagccgggaggccgagcacggccctgaggtgtcctctggagagggcacagagaaccagcctgacttcaccgctgccaacgtgtaccacctgctgaagaggagcatcagcgccagcatcaaccctgaggacagcaccttccctgcctgcagcgtgggcggcatccctggcagcaagaagtggttctttgctgtgcaggccatctacggcttctaccagttctgcagcagtgactggcaggagatccactttgacacagagaaggacaagattgaagatgtgctgcagaccaacattgaagaatgtctgggcgctgtggagtgctttgaggaggaggacagcaacagccgggagagcctgagcctggccgacctgtatgaggaggccgctgagaacctgcaccagctgagtgacaagctgcctgcccctggccgggccatggtggacatcatcctgctgctgagtgacaaggacccccccaagctgaaggactacctgcccaccgtgggcgccctgaagcacctgcgggagtggtacagcgccaagatcaccatcgccggcaaccactgtgagatcaactgccagaagattgctgagtacctgagcgccaacgtggtgtccctggaggacctgagaaatgtgattgacagcaaggagctgtggaggggcaagatccagatctgggagaggaagtttggatttgagatctccttccctgagttctgcctgaagggcgtgaccctgaagaacttcagcaccagcaacctgaacacagacttcctggccaagaagatcatccccagcaaggacaagaacatcctgcccaaggtgttccactactacggccctgccctggagtttgtgcagatgatcaagctgagtgacctgcccagctgctacatgtctgacatcgagtttgagctgggcctgaccaacagcaccaagcagaacagcgtgctgctgctggagcagatcagcagcctgtgcagcaaggtgggcgccctgtttgtgctgccctgcaccatcagcaacatcctgatccccccacccaaccagctgagcagcaggaagtggaaggagtacatcgccaagaagcccaagaccatctctgtgcctgatgtggaggtgaagggagaatgtagcagctactacctgctgctgcagggcaatggaaacagacgctgcaaggccaccctcatccacagcgccaaccagatcaatggcagctttgccctgaacctgatccacggcaagatgaagaccaagacagaggaggccaagctgtccttcccctttgacctgctgagcctgccccacttctctggagagcagatcgtgcagcgggagaagcagctggccaacgtgcaggtgctggccctggaggagtgcctgaagaggaggaagctggccaagcagcctgagaccgtgtctgtggccgagctgaagagcctgctggtgctgaccaggaagcacttcctggactactttgatgctgtgatccccaagatgatcctgaggaagatggacaagatcaagaccttcaacatcctgaatgacttcagccctgtggagcccaacagcagcagcctgatggagaccaaccccctggagtggccagagcggcacgtgctgcagaacctggagacctttgagaagaccaagcagaagatgaggacaggcagcctgccccacagcagcgagcagctgctgggccacaaggagggcccccgggacagcatcaccctgctggatgccaaggagctgctgaagtacttcaccagtgatggcctgcccatcggggacctgcagcccctgcccatccagaagggggagaagacctttgtgctgaccccagagctgagccctgggaagctgcaggtgctgccctttgagaaggcctctgtgtgccactaccatggaattgagtactgcctggatgacaggaaggccctggagagagatggcggcttcagcgagctgcagagccgcctcatccgctatgagacccagaccacctgcacccgggagagcttccctgtgcccaccgtgctgagccccctgcccagccctgtggtgtccagtgaccccggctctgtgcctgatggagaggtgctgcagaatgagctgaggacagaggtgtcccggctgaagaggaggagcaaggacctgaactgcctgtaccccaggaagaggctggtgaagtctgagagcagcgagagcctgctgagccagaccaccggcaacagcaaccactaccaccaccacgtgaccagcaggaagccccagacagagaggagcctgcctgtgacctgccccctggtgcccatccccagctgtgagacccccaagctggccaccaagaccagcagcggccagaagtccatgcatgagagcaagaccagccggcagatcaaggagagccgcagccagaagcacacccgcatcctgaaggaggtggtgacagagaccctgaagaagcacagcatcacagagacccatgagtgcttcaccgcctgcagccagaggctgtttgagatcagcaagttctacctgaaggacctgaagaccagccggggcctgtttgaggagatgaagaagacagccaacaacaatgctgtgcaggtgattgactgggtgctggagaagaccagcaagaagtag

SEQ ID NO: 211004 - DNA, 3059 bp, Artificial Sequence
  derived and/or modified sequence
gatgtggaagccgagacctaaagttggggggtgatctctgaggagatggatcggtacctgctgctggtgatctggggggaaggaaaattcccgtcggcggccagtagggaggcagaacatgggccagaggtgtcgtcgggtgagggtactgagaatcagccggacttcacagcagcaaatgtttatcacctcttgaaaagaagcattagtgcttcaattaatccagaagatagtactttccctgcctgttcagtgggaggtatacctggttccaagaagtggttctttgcagtgcaggcaatatatggattttatcagttttgtagttctgattggcaagagatacattttgatacagaaaaagataaaattgaagatgttcttcaaacgaatatcgaagaatgtttgggtgctgttgagtgttttgaagaagaagacagtaatagcagggaatcattatccttggctgatctctatgaagaagctgcagaaaatttgcatcagctgtcagacaagcttcctgctcctggtagagcaatggtagatataatactgttgctttctgacaaagatcctcctaaattgaaagactatttacctactgtaggagcattaaaacatttgagagaatggtattcagcaaagatcactatagcaggaaatcattgtgaaataaactgtcagaaaattgcagaatacctttctgctaatgttgtatctttagaagatctcagaaatgttattgactcaaaggaattatggagggggaaaatacagatatgggaaagaaagtttggatttgaaattagttttcctgaattttgtttaaagggagtcacacttaagaattttagtacttctaatttaaatactgacttccttgccaaaaagatcataccatcaaaggataagaatattttgccaaaggttttccattattatggccctgctttagaatttgtgcagatgataaaattatcagatctaccctcctgctatatgtcggatattgaatttgagttaggattgacaaacagtaccaaacagaattctgtgttgctgttggagcagatttcttctctgtgtagcaaggttggtgctctttttgtattgccatgtaccattagtaacatactgattccacctcccaaccaactcagttcaagaaaatggaaggaatatatagctaaaaagcctaaaacaatcagtgttccagatgttgaagtgaaaggagagtgttctagctattatctcttgttacaaggtaatggcaatagaagatgtaaagccacattgattcactcagccaaccagatcaatggctcatttgcactcaatttaattcatggaaagatgaaaacaaagacagaagaagccaaattgagttttccttttgacttattatcacttccacatttttctggggagcagattgtacagagagagaaacagttagctaatgttcaagttttagctttggaagaatgcctaaaaagacgaaagttggcaaagcagcctgaaacagtttctgttgctgaactcaaaagtctgttagtactcacaaggaaacactttttagattattttgatgctgtgattcctaaaatgattctaagaaagatggacaaaattaaaaccttcaatatattaaatgattttagtccagtggaacctaattcctcaagtctaatggaaaccaatcctctggaatggccagaaaggcatgttcttcaaaatttggaaacttttgaaaaaactaaacaaaaaatgagaactggttcattacctcattcatctgaacagttgctgggccacaaagagggtcctcgggactcaatcacattgttggatgctaaagaattgctgaagtactttacctcagatggattacccattggagatcttcaacctttaccgattcaaaagggggaaaagacttttgttttgacaccagaacttagtcctgggaaacttcaggtcttaccttttgagaaagcctcagtatgtcattatcatggaattgaatattgcttggatgaccgaaaagctttggaaagagatggaggattttctgaacttcagtctcgtcttattcgttatgaaactcaaactacctgcaccagagaaagttttccagtacctactgtgttgagccctcttccatctcctgtagtttcgtcagatcctggaagtgtccctgacggagaagttttacaaaatgaacttcgaactgaagtatcccgattgaaacggagatctaaagatctgaattgcctttatcccagaaaaagacttgtgaaatctgaaagttcagagtctcttctttctcagacaactggtaatagtaatcactatcatcatcatgtgacatccagaaagccacaaacagaacggtccttaccagtgacttgtccattggttccaattcctagctgtgaaactccaaaacttgctacaaagaccagttcaggtcaaaaaagtatgcatgaatcaaaaacatcaaggcaaattaaggaatcaagatcacagaaacacacacggatactgaaagaagtagttactgaaaccctgaagaaacacagtattaccgagactcatgaatgtttcactgcatgcagccagcgtctctttgaaatctctaagttctatctaaaggatcttaaaacttcaaggggtctatttgaagaaatgaagaaaacagcaaacaacaatgctgtacaggtgattgactgggtattagaaaagacaagcaagaaatgatacataatcattctctttaagacaattataaattggatggagctattattcactacttcttttcttagtttgaaaattataaacaaattttaagctttattcaaagaatagatgttatatttctaaagaatttcatgaatatatattctatatttgtatagtttgagggatgctatgttaatgtatttttaattagatacatattttgtaaagtgttactatattttaaagttatttttatatgttttaaaatgtttactcttatttaattattacaataaacagaatttttttttttt

SEQ ID NO: 211005 - DNA, 2715 bp, Artificial Sequence
  derived and/or modified sequence
atggaccggtacctgctgctggtgatctggggcgagggcaagttcccaagcgccgcttctcgagaagccgagcatgggccagaagtatcctccggtgagggtactgaaaatcagcccgattttaccgcggccaatgtttatcacctgctaaagcggtccatctcagcttccatcaatcccgaggacagcacgttccctgcatgtagtgtgggggggatccctggttcgaaaaagtggtttttcgcggtccaggctatttacgggttttatcagttctgtagcagcgactggcaggaaatccacttcgataccgaaaaggacaaaattgaggatgtactgcagactaacatcgaggagtgcctgggcgcagtggagtgcttcgaagaggaggactccaacagtagggagagcctgtccctcgctgacctgtacgaggaagctgccgagaacctccaccagctgtccgacaagctcccagccccagggcgcgcaatggtggatatcatccttcttctgtctgacaaggatcctcccaaactgaaggactaccttcctacagtgggcgccctaaaacatctgcgggaatggtactcagccaagatcacgatcgccggtaatcattgtgagatcaactgtcagaagatcgccgaatatttgtccgctaatgtggtgagtctggaagacctgcgcaacgtaatcgacagtaaagaactgtggagggggaagatacagatatgggagcgtaagttcgggttcgagatctccttcccagaattctgcctcaaaggcgtgaccctcaagaactttagcaccagtaatctcaacactgacttcctggctaagaaaataatcccgtccaaggataaaaatattctccctaaagtcttccattactacggcccggctctagaatttgtccagatgatcaagttgagtgatttgccttcctgttatatgtcagatatcgagttcgaactgggccttactaattccactaagcagaacagcgtgctgctgctggagcagatctcttcactatgctcaaaggtcggagccctgtttgtgctgccttgtaccatttctaatatcctcatccctccaccaaaccagctgagctctagaaagtggaaggagtatatcgctaagaagcccaagactatctccgtacccgacgtcgaggtgaaaggggagtgctctagttattacctgctgctgcaagggaacggaaaccgcaggtgtaaagccaccttgattcattccgctaatcagattaacggttccttcgctctgaacctcatccacggaaaaatgaagacgaaaacagaggaggccaagctaagtttcccatttgacctgctgagcctgcctcacttctctggcgagcagatagtgcagcgggagaagcaactagctaatgtgcaggttttagctttggaagaatgcctcaaacgcagaaaactcgccaagcagccagaaaccgtgtctgtcgcggagttaaagtctctgctggttcttacgcgcaagcattttctggactacttcgatgcggtaatccccaagatgatcttacgaaagatggataagattaagacctttaacatactcaacgatttcagcccagtagaaccaaatagtagcagcctaatggagaccaatccactcgagtggccggaacgacacgtactgcagaaccttgaaacctttgagaaaaccaagcaaaagatgcgaaccgggtcccttccacattccagcgagcagctgctcgggcacaaagaaggcccccgggactcgattacgctgttggacgccaaggaactgctcaagtactttacaagcgatggactgccaatcggggatctgcagcccctccctattcagaagggagaaaagacgtttgtgttgacacctgaactgtcacctgggaagctccaggtcctgccctttgaaaaggcgtcggtgtgccattaccatggaatagagtactgcttagacgataggaaggctttagaacgcgacggaggttttagcgagctgcagtctcgcctgattaggtatgaaacacaaacaacctgtacaagagagtcattccccgtaccaactgttctatcccctctcccgtcgccagtagttagctctgatcctggatctgtgcccgacggggaggtgctgcaaaatgaattgcggacagaagtgtccaggttgaagaggaggagtaaggatctcaactgcctctacccacggaagagactcgttaaaagcgagagtagtgagtctctcctctcccagaccacgggcaactctaaccattaccaccaccacgttacttctcggaaaccacagaccgagaggtccctacccgtgacgtgccctctcgtccccattccgtcttgcgagaccccaaagctcgccacaaagactagttccggacaaaaaagcatgcatgagagcaagacgagcaggcagatcaaagaatctagatcacagaaacatacccggattttgaaagaagtagtaacggagactttaaagaagcactccatcaccgagactcacgagtgcttcactgcctgtagccaaagattgttcgagattagcaagttttatctgaaagaccttaaaacatctcgaggattgttcgaggagatgaaaaaaactgccaacaacaacgctgtccaggtaatagattgggtcctcgagaaaaccagcaaaaaatag

SEQ ID NO: 211006 - DNA, 2715 bp, Artificial Sequence
  derived and/or modified sequence
atggacaggtacctgcttttagtgatttggggggaaggcaaattcccctctgccgcatccagggaagccgagcacggccctgaagtaagcagcggagagggtacagagaaccagccagactttacagccgctaacgtgtaccacctgctaaaaagaagcatcagcgcttctattaatcccgaagatagcacattccccgcatgtagtgtgggaggtattccagggtccaagaaatggttttttgccgtgcaagcaatctacggcttctaccagttctgctcctccgattggcaggagatccatttcgatacagagaaagacaagatcgaggacgttctacagacgaatattgaggaatgcctcggcgctgtggagtgctttgaagaggaggacagtaactcccgtgaatcactgtctctcgccgatctctacgaggaagcagctgagaacctgcaccagctctccgacaagctgcctgcgccaggacgggctatggtggatattattctcttgctgtccgataaggaccctccaaagctgaaggactacctcccaacagtgggagccctcaaacacttgcgagagtggtatagtgccaagataacaatcgccggaaatcactgcgagatcaattgccaaaagatagctgaatacttatctgccaatgttgtgtcgctggaggacctgcggaatgtcatcgattctaaagaactgtggcgcggtaaaatccagatatgggagcggaaattcggtttcgaaatttcattccccgagttctgtcttaaaggagtgaccctgaagaacttttccacatcgaacctgaataccgattttctggctaagaagattattccctccaaggacaagaacattctccctaaggtttttcactattatggccctgcgctggagtttgttcagatgattaaactgtctgacctccccagctgctatatgtcagacatagagttcgagctgggcctgactaacagcaccaagcagaactctgtgctcctgctggagcagataagctccctgtgcagtaaagttggagctctgtttgtgctcccctgcacaatttcaaacattttgattccccctcccaaccagctctcatctaggaagtggaaggaatacattgcgaagaagcctaagacaatcagcgttccagacgtggaagtaaagggagaatgttcctcatactacttattgctgcagggcaatggcaaccgacgctgcaaggctacacttatacacagtgccaaccagatcaacggttcttttgccttgaacctgatccacggcaaaatgaagaccaagacagaggaggccaaactgtcatttccctttgatttgctgagtctcccacattttagcggtgaacagatcgttcagagagagaaacagcttgctaacgtccaggtgctcgctctcgaggagtgcctaaagcggagaaaattggctaagcagcccgagaccgtcagcgtagccgagttgaagtctctgctcgttctcacccgaaaacactttctcgactacttcgatgctgttattcccaaaatgatcttgcgcaagatggacaagatcaaaaccttcaatattctgaacgatttcagtcccgtggagccgaactctagtagtttgatggaaactaatccgttagagtggccagagcgccatgtcctgcaaaacttagagacttttgaaaaaaccaagcagaaaatgaggactgggagcctgccgcattcatctgaacagctgctgggccacaaggagggccctcgggattccattacactgcttgacgctaaggaacttttgaagtacttcacctccgatggtctgccaatcggagatctacagcctctgcctatccagaaaggagagaaaactttcgttctgacccctgaattgagtccagggaaactgcaggtgctgccatttgagaaagccagtgtttgccattaccacggcatcgagtactgcttggatgaccgcaaggcactggaacgggatggtgggttttctgagctgcaaagcagactgatcaggtacgaaacccaaacgacctgcactagggagagctttccagtgcccaccgtcttgagtccactcccgtctcctgtggtctccagtgatccgggttccgtgccagacggtgaggtgctccagaacgagctgagaaccgaagtgagccgtttaaagcggaggtccaaggacctcaattgcctttacccaagaaagagactggtaaaatccgagtctagcgaatcactcctgagccagaccacaggtaattcaaatcactaccatcaccacgtgacaagtcgcaaaccgcagactgaaaggtccctccccgtcacctgccctcttgtgcctattcctagttgcgagactcctaagttagcaaccaaaacgtcctctggacagaagtctatgcacgagagcaaaacatctcggcagatcaaggagagccggtcccagaaacatacacgcattttgaaggaggtcgtgaccgagacgcttaaaaagcactccatcacagagactcacgaatgtttcacggcctgcagtcagcgactgtttgagatcagcaagttctatctcaaagacctgaaaacttcccgcggtttgtttgaagagatgaaaaagaccgcaaataataacgctgttcaagtgatagattgggtgttggagaagacttctaagaagtag

SEQ ID NO: 211007 - DNA, 2715 bp, Artificial Sequence
  derived and/or modified sequence
atggacagatacctgctgctggtgatctggggcgagggcaagttccccagcgccgccagcagagaggccgagcacggccccgaggtgagcagcggcgagggcaccgagaaccagcccgacttcaccgccgccaacgtgtaccacctgctgaagagaagcatcagcgccagcatcaaccccgaggacagcaccttccccgcctgcagcgtgggcggcatccccggcagcaagaagtggttcttcgccgtgcaggccatctacggcttctaccagttctgcagcagcgactggcaggagatccacttcgacaccgagaaggacaagatcgaggacgtgctgcagaccaacatcgaggagtgcctgggcgccgtggagtgcttcgaggaggaggacagcaacagcagagagagcctgagcctggccgacctgtacgaggaggccgccgagaacctgcaccagctgagcgacaagctgcccgcccccggcagagccatggtggacatcatcctgctgctgagcgacaaggacccccccaagctgaaggactacctgcccaccgtgggcgccctgaagcacctgagagagtggtacagcgccaagatcaccatcgccggcaaccactgcgagatcaactgccagaagatcgccgagtacctgagcgccaacgtggtgagcctggaggacctgagaaacgtgatcgacagcaaggagctgtggagaggcaagatccagatctgggagagaaagttcggcttcgagatcagcttccccgagttctgcctgaagggcgtgaccctgaagaacttcagcaccagcaacctgaacaccgacttcctggccaagaagatcatccccagcaaggacaagaacatcctgcccaaggtgttccactactacggccccgccctggagttcgtgcagatgatcaagctgagcgacctgcccagctgctacatgagcgacatcgagttcgagctgggcctgaccaacagcaccaagcagaacagcgtgctgctgctggagcagatcagcagcctgtgcagcaaggtgggcgccctgttcgtgctgccctgcaccatcagcaacatcctgatccccccccccaaccagctgagcagcagaaagtggaaggagtacatcgccaagaagcccaagaccatcagcgtgcccgacgtggaggtgaagggcgagtgcagcagctactacctgctgctgcagggcaacggcaacagaagatgcaaggccaccctgatccacagcgccaaccagatcaacggcagcttcgccctgaacctgatccacggcaagatgaagaccaagaccgaggaggccaagctgagcttccccttcgacctgctgagcctgccccacttcagcggcgagcagatcgtgcagagagagaagcagctggccaacgtgcaggtgctggccctggaggagtgcctgaagagaagaaagctggccaagcagcccgagaccgtgagcgtggccgagctgaagagcctgctggtgctgaccagaaagcacttcctggactacttcgacgccgtgatccccaagatgatcctgagaaagatggacaagatcaagaccttcaacatcctgaacgacttcagccccgtggagcccaacagcagcagcctgatggagaccaaccccctggagtggcccgagagacacgtgctgcagaacctggagaccttcgagaagaccaagcagaagatgagaaccggcagcctgccccacagcagcgagcagctgctgggccacaaggagggccccagagacagcatcaccctgctggacgccaaggagctgctgaagtacttcaccagcgacggcctgcccatcggcgacctgcagcccctgcccatccagaagggcgagaagaccttcgtgctgacccccgagctgagccccggcaagctgcaggtgctgcccttcgagaaggccagcgtgtgccactaccacggcatcgagtactgcctggacgacagaaaggccctggagagagacggcggcttcagcgagctgcagagcagactgatcagatacgagacccagaccacctgcaccagagagagcttccccgtgcccaccgtgctgagccccctgcccagccccgtggtgagcagcgaccccggcagcgtgcccgacggcgaggtgctgcagaacgagctgagaaccgaggtgagcagactgaagagaagaagcaaggacctgaactgcctgtaccccagaaagagactggtgaagagcgagagcagcgagagcctgctgagccagaccaccggcaacagcaaccactaccaccaccacgtgaccagcagaaagccccagaccgagagaagcctgcccgtgacctgccccctggtgcccatccccagctgcgagacccccaagctggccaccaagaccagcagcggccagaagagcatgcacgagagcaagaccagcagacagatcaaggagagcagaagccagaagcacaccagaatcctgaaggaggtggtgaccgagaccctgaagaagcacagcatcaccgagacccacgagtgcttcaccgcctgcagccagagactgttcgagatcagcaagttctacctgaaggacctgaagaccagcagaggcctgttcgaggagatgaagaagaccgccaacaacaacgccgtgcaggtgatcgactgggtgctggagaagaccagcaagaagtag

SEQ ID NO: 211008 - protein, 267 aa, Artificial Sequence
  derived and/or modified sequence
MSLRVLGSGTWPSAPKMFLLLTALQVLAIAMTQSQEDENKIIGGHTCTRSSQPWQAALLAGPRRRFLCGGALLSGQWVITAAHCGRPILQVALGKHNLRRWEATQQVLRVVRQVTHPNYNSRTHDNDLMLLQLQQPARIGRAVRPIEVTQACASPGTSCRVSGWGTISSPIARYPASLQCVNINISPDEVCQKAYPRTITPGMVCAGVPQGGKDSCQGDSGGPLVCRGQLQGLVSWGMERCALPGYPGVYTNLCKYRSWIEETMRDK

SEQ ID NO: 211009 - DNA, 804 bp, Artificial Sequence
  derived and/or modified sequence
atgtccttaagggtgctgggatcaggaacatggccctccgcccccaagatgtttctgttgctgaccgcactgcaggtcctagcaattgccatgacacagtcacaggaagatgagaataaaataatcggcggccacacatgtacccggtcgagccagccttggcaggctgccctgcttgcaggacctagacgccggttcctctgtggcggagctctgctctccggtcagtgggtaatcactgcggcccactgtgggcggcctatactgcaagttgcgctgggaaagcataatttgcgcaggtgggaagcaacccaacaagtgctgcgtgtggttcgtcaggtcactcaccccaattataatagccgaacacatgataatgatctgatgctcttacagttgcagcagcccgccagaattggcagggcagtgcgccccatcgaggttacccaggcttgtgcatcaccaggaacctcatgccgggtcagtggttggggcaccatttctagcccgatcgcccggtaccccgcatctttacagtgtgtcaatatcaacatatctcctgacgaagtgtgtcagaaggcttatccccgtaccatcacgcctggaatggtgtgtgctggggtgccgcagggcggaaaggactcttgccagggcgattccggcggaccactcgtgtgtcggggccagctgcaaggcctcgtgagttggggcatggagcggtgtgctctgccaggttacccaggagtgtatacaaatttgtgtaagtatagaagctggatagaggaaacgatgcgagataagtag

SEQ ID NO: 211010 - DNA, 804 bp, Artificial Sequence
  derived and/or modified sequence
atgtccctgagagtactggggagcggaacatggcctagcgctcccaaaatgtttctcctgctgaccgcactgcaggtgctcgcaattgccatgacacagtcacaggaggacgaaaacaagattataggcggccacacctgtactcgctcctcgcaaccttggcaggccgctctactcgcgggccccagaaggagatttctctgtggcggggcactactttcaggacagtgggtgatcactgcggcccattgcggccggccaatcctgcaggtggccctgggcaaacataacctccggagatgggaggccacccagcaagtgctgagggtagtgagacaggtcacacatcccaattacaacagccgcacccacgataacgacctgatgctgctacaattgcagcagccagcgaggatcggaagagctgttagacctattgaggtgactcaggcctgcgccagcccgggcacaagctgcagagtgagtggttgggggactatatctagtccaatcgcacggtacccagccagtctgcagtgtgtgaatatcaatattagcccagacgaggtctgccagaaagcttatccgcgcactattacgccaggaatggtgtgtgcgggcgtgcctcaaggaggcaaggactcttgccaaggggactctggcggacctctcgtttgccgcggacagctgcagggcttagtttcttggggcatggagcgctgtgccctgccaggttaccctggcgtgtatacaaacctttgtaaataccgaagttggattgaggagacaatgagagacaaatag

SEQ ID NO: 211011 - DNA, 804 bp, Artificial Sequence
  derived and/or modified sequence
atgagcctgagagttctgggcagtggaacttggccttctgcccctaaaatgttcctcctgctgaccgctctgcaggtgctggctatagcaatgacccagagccaggaagacgaaaacaagatcatcggaggacatacatgtacccgatcctcccagccatggcaggccgccctcctggctgggcctagaagaagatttctgtgtgggggagcactgctaagcgggcagtgggtgattacagccgctcactgtggcaggcctatccttcaggtagcactgggaaagcacaaccttcggcgttgggaagccacccaacaagtgctgcgcgtcgtacggcaggtaacccacccgaactataatagtagaacacatgataatgacttgatgctgctccagctgcagcagccggcccggatagggagggccgtgaggcccatcgaggttacacaggcgtgcgccagtccgggaactagctgccgcgtttcaggctgggggacaatatcttcccccatcgctagataccctgccagcttgcagtgtgtgaatatcaatatctctcctgatgaggtgtgtcagaaagcctacccccggaccatcaccccaggcatggtatgtgctggggtgccacaaggaggcaaagattcttgtcaaggtgattctggcggtccgctagtctgcaggggtcaactccaggggctggtctcgtggggtatggaacgctgcgccctccctgggtatcccggcgtgtacacaaatctgtgtaagtatcgatcctggattgaggagacaatgcgtgataagtag

SEQ ID NO: 211012 - DNA, 1060 bp, Artificial Sequence
  derived and/or modified sequence
gcacctagcagatcccaagctggggaatgccagttctggcaccaaccttcctgctccctgctggggcctctgctcccccatctctcaggagtcgaaagtgagaaagcaagacatcaaggagggacctgtgccctgctccacatcctcccacctgccgcccgcagagcctgcaggccccgcccccctcgtctctggtccctacctctctgctgtgtcttcatgtccctgagggtcttgggctctgggacctggccctcagcccctaaaatgttcctcctgctgacagcacttcaagtcctggctatagccatgacacagagccaagaggatgagaacaagataattggtggccatacgtgcacccggagctcccagccgtggcaggcggccctgctggcgggtcccaggcgccgcttcctctgcggaggcgccctgctttcaggccagtgggtcatcactgctgctcactgcggccgcccgatccttcaggttgccctgggcaagcacaacctgaggaggtgggaggccacccagcaggtgctgcgcgtggttcgtcaggtgacgcaccccaactacaactcccggacccacgacaacgacctcatgctgctgcagctacagcagcccgcacggatcgggagggcagtcaggcccattgaggtcacccaggcctgtgccagccccgggacctcctgccgagtgtcaggctggggaactatatccagccccatcgccaggtaccccgcctctctgcaatgcgtgaacatcaacatctccccggatgaggtgtgccagaaggcctatcctagaaccatcacgcctggcatggtctgtgcaggagttccccagggcgggaaggactcttgtcagggtgactctgggggacccctggtgtgcagaggacagctccagggcctcgtgtcttggggaatggagcgctgcgccctgcctggctaccccggtgtctacaccaacctgtgcaagtacagaagctggattgaggaaacgatgcgggacaaatgatggtcttcacgagcagttgcttcaggcgttttctccc

SEQ ID NO: 211013 - DNA, 1133 bp, Artificial Sequence
  derived and/or modified sequence
gcacctagcagatcccaagctggggaatgccagttctggcaccaaccttcctgctccctgctggggcctctgctcccccatctctcaggagtcgaaagtgagaaagcaagacatcaaggagggacctgtgccctgctccacatcctcccacctgccgcccgcagagcctgcaggccccgcccccctcgtctctggtccctacctctctgctgtgtcttcatgtccctgagggtcttgggctctgggacctggccctcagcccctaaaatgttcctcctgctgacagcacttcaagtcctggctatagccatgacacagagccaagaggatgagaacaagataattggtggccatacgtgcacccggagctcccagccgtggcaggcggccctgctggcgggtcccaggcgccgcttcctctgcggaggcgccctgctttcaggccagtgggtcatcactgctgctcactgcggccgcccgatccttcaggttgccctgggcaagcacaacctgaggaggtgggaggccacccagcaggtgctgcgcgtggttcgtcaggtgacgcaccccaactacaactcccggacccacgacaacgacctcatgctgctgcagctacagcagcccgcacggatcgggagggcagtcaggcccattgaggtcacccaggcctgtgccagccccgggacctcctgccgagtgtcaggctggggaactatatccagccccatcgccaggtaccccgcctctctgcaatgcgtgaacatcaacatctccccggatgaggtgtgccagaaggcctatcctagaaccatcacgcctggcatggtctgtgcaggagttccccagggcgggaaggactcttgtcagggtgactctgggggacccctggtgtgcagaggacagctccagggcctcgtgtcttggggaatggagcgctgcgccctgcctggctaccccggtgtctacaccaacctgtgcaagtacagaagctggattgaggaaacgatgcgggacaaatgatggtcttcacggtgggatggacctcgtcagctgcccaggccctcctctctctactcaggacccaggagtccaggccccagcccctcctccctcagacccaggagtccagg

SEQ ID NO: 211014 - DNA, 1282 bp, Artificial Sequence
  derived and/or modified sequence
ccgcccccctcgtctctggtccctacctctctgctgtgtcttcatgtccctgagggtcttgggctctgggacctggccctcagcccctaaaatgttcctcctgctgacagcacttcaagtcctggctatagccatgacacagagccaagaggatgagaacaagataattggtggccatacgtgcacccggagctcccagccgtggcaggcggccctgctggcgggtcccaggcgccgcttcctctgcggaggcgccctgctttcaggccagtgggtcatcactgctgctcactgcggccgcccgatccttcaggttgccctgggcaagcacaacctgaggaggtgggaggccacccagcaggtgctgcgcgtggttcgtcaggtgacgcaccccaactacaactcccggacccacgacaacgacctcatgctgctgcagctacagcagcccgcacggatcgggagggcagtcaggcccattgaggtcacccaggcctgtgccagccccgggacctcctgccgagtgtcaggctggggaactatatccagccccatcgccaggtaccccgcctctctgcaatgcgtgaacatcaacatctccccggatgaggtgtgccagaaggcctatcctagaaccatcacgcctggcatggtctgtgcaggagttccccagggcgggaaggactcttgtcagggtgactctgggggacccctggtgtgcagaggacagctccagggcctcgtgtcttggggaatggagcgctgcgccctgcctggctaccccggtgtctacaccaacctgtgcaagtacagaagctggattgaggaaacgatgcgggacaaatgatggtcttcacggtgggatggacctcgtcagctgcccaggccctcctctctctactcaggacccaggagtccaggccccagcccctcctccctcagacccaggagtccaggcccccagcccctcctccctcagacccgggagtccaggcccccagcccctcctccctcagacccaggaccccagtccccagcatcctgatctttactccggctctgatctctcctttcccagagcagttgcttcaggcgttttctccccaccaagcccccacccttgctgtgtcaccatcactactcaagaccggaggcacagagggcaggagcacagaccccttaaaccggcattgtattccaaagacgacaatttttaacacgcttagtgtctctaaaaaccgaataaataatgacaataaaaatggaatcatcctaaattgta

SEQ ID NO: 211015 - DNA, 804 bp, Artificial Sequence
  derived and/or modified sequence
atgagcctgcgggtgctgggcagcggcacctggcccagcgcccccaagatgttcctgctgctgacagccctgcaggtgctggccatcgccatgacccagagccaggaggatgagaacaagatcatcggcggccacacctgcaccaggagcagccagccctggcaggccgccctgctggccggcccccggcggcgcttcctgtgtggcggggccctgctgagcggccagtgggtgatcacagctgcccactgcggccggcccatcctgcaggtggccctgggcaagcacaacctgcggcgctgggaggccacccagcaggtgctgcgggtggtgcggcaggtgacccaccccaactacaacagcaggacccatgacaatgacctgatgctgctgcagctgcagcagcctgccagaattggccgggctgtgcggcccatcgaggtgacccaggcctgtgccagccctggcaccagctgccgggtgtctggctggggcaccatcagcagccccatcgcccgctacccagccagcctgcagtgtgtgaacatcaacatcagcccagatgaggtgtgccagaaggcctaccccaggaccatcaccccaggcatggtgtgtgccggcgtgccccagggcggcaaggacagctgccagggcgacagcggcggccccctggtgtgccggggccagctgcagggcctggtgtcctggggcatggagcgctgtgccctgcccggctacccaggagtgtacaccaacctgtgcaagtaccgctcctggattgaggagaccatgagggacaagtag

SEQ ID NO: 211016 - DNA, 804 bp, Artificial Sequence
  derived and/or modified sequence
atgagcctgcgggtgctgggcagcggcacctggcccagcgcccccaaaatgtttcttttgttaactgccctgcaagtcctggcgatagccatgacccagtctcaggaagacgagaacaagattatcggaggacacacttgcacccggagctctcagccgtggcaggcagctttactggccgggcctagacgtcggtttctatgcggcggcgcactcctgtctgggcaatgggtcatcaccgccgcgcattgcggcagacccattctccaagtcgcactgggcaagcacaatctgcggcgttgggaggccactcagcaggtgttgagggttgtcaggcaggtgactcatcctaattacaactcccggacacacgataatgatttaatgctgttgcaactgcagcaaccagcgaggatcggccgggccgtgcggccaattgaagtgacgcaggcttgcgcgtctcccggcacaagctgcagagtttcagggtggggtacaatcagttcaccaatcgccagataccccgcatcactgcaatgcgtgaatattaacattagcccagatgaagtgtgtcagaaagcatacccccggacaatcactcctggcatggtgtgcgctggtgtaccccaggggggaaaggactcctgtcagggcgatagtggcggccctttggtgtgccgaggtcagttgcaaggattagttagctggggaatggaacgatgtgcactcccagggtaccctggtgtgtatactaacttatgcaagtataggtcctggatcgaagagacaatgagggataaatag

SEQ ID NO: 211017 - DNA, 804 bp, Artificial Sequence
  derived and/or modified sequence
atgagcctgcgggtgctgggcagcggcacctggcccagcgcccccaaaatgttcctgctacttactgcgctgcaggtcctggcaattgcaatgacgcagtctcaggaagacgagaataaaattatcgggggccatacatgtacccggtccagtcagccatggcaggctgcactgctagcaggcccgcgtagacggtttctgtgcggcggcgctttactgtcagggcagtgggtgatcacagcagcccactgtggccggcctattttgcaggtagcgctgggcaagcacaacctcagacgatgggaagcgactcaacaagtgctacgcgtagtgcgtcaggtgactcaccccaactacaactcccggacgcacgacaacgacctgatgctgctgcagctgcaacagcccgctaggattggcagagccgtacggcctattgaggtgacacaggcatgcgccagcccgggcacctcctgtcgagtttctggatggggaaccatttcatcacccattgcaagatatcctgcgtctctgcagtgtgtgaatatcaacatcagcccagatgaggtgtgtcagaaagcctatccgagaaccattacgccaggcatggtgtgcgccggcgttccacagggaggaaaagatagctgtcagggcgactctggaggaccattggtctgtcgggggcagctgcaaggactcgtctcttggggcatggagaggtgtgccctgccaggttatccaggggtctataccaacctctgcaaatatcggtcctggatcgaggaaactatgcgagataagtag

SEQ ID NO: 211018 - DNA, 804 bp, Artificial Sequence
  derived and/or modified sequence
atgagcctgcgggtgctgggcagcggcacctggcccagcgcccccaagatgtttcttctcctgaccgctctgcaggttcttgcaatagccatgacccagtctcaggaggacgaaaacaaaattattggcggtcacacgtgcactcggtcatctcagccatggcaggccgccttgctcgccggcccaaggcgacgatttctgtgcggcggtgccctgctatccgggcaatgggtcattaccgcggctcactgcggccggcctattctgcaagttgctcttggtaagcataatctgaggaggtgggaagctactcagcaggtgctacgtgtcgtgcgccaggtgacacaccccaactacaacagtcggacccacgataatgacctgatgctgctgcaacttcaacagcctgcccgtataggccgtgcagttcgccctatcgaggtaacacaggcgtgcgccagtcctggaactagctgccgcgtgtctggctggggaacaattagtagtccaatcgcgaggtaccccgccagcctccaatgcgtgaacatcaacatctcccccgacgaggtgtgtcagaaggcttaccccaggacgattacacctggtatggtgtgcgctggggtccctcagggcggcaaagacagctgtcagggagatagcggtggcccgctggtttgccgggggcaactgcaaggcttagtgtcctggggaatggagcgatgcgccctccccggatacccaggcgtgtacacgaacctgtgcaaataccgctcctggattgaggaaactatgcgagacaagtag

SEQ ID NO: 211019 - DNA, 804 bp, Artificial Sequence
  derived and/or modified sequence
atgtctcttagggtcctgggcagcgggacatggccaagcgctcctaagatgtttttgctgctgacagctctgcaggtacttgcaatcgcaatgacccagtctcaggaagatgagaataaaattattgggggtcacacatgcactcgcagttctcagccatggcaggccgctctgctggccggaccacggaggcgatttctctgcggcggtgcactgctctctggccagtgggtaatcacggccgctcactgtggacgtcctatactgcaggtagctctggggaaacataacttgagaagatgggaggcgacacaacaggtgctgcgagtggtgcgccaggtgacacaccccaactacaacagtcgcacacacgacaacgatctgatgctcctacagttgcagcagccagccagaatcggaagagctgtgcgacctatcgaggtcactcaagcctgcgcttctcccggtacatcatgcagggtgtccggttggggcactatttcctcaccaatcgctcggtaccctgcctccctgcagtgcgtcaatattaacatcagccctgacgaggtgtgtcaaaaggcataccccagaaccattaccccagggatggtttgcgctggagtgccccagggcggtaaagactcttgccagggtgacagtggaggaccactggtgtgcagagggcaactacagggcctggtgtcctggggaatggaacgctgcgcactccccggataccctggggtatataccaacctgtgcaagtacagaagctggatagaggaaactatgagggataaatag

SEQ ID NO: 211020 - DNA, 804 bp, Artificial Sequence
  derived and/or modified sequence
atgtctctgagggtgctgggctctggcacctggccaagcgcccctaaaatgtttctgttgttgacggccttgcaagtgctcgcaatagctatgacacagtcccaggaggacgagaataagataatcggtggacacacctgtaccaggagctcacagccttggcaggctgcattattggcaggacctcgcaggagatttctgtgcggcggagccctgctgagtgggcagtgggtgataacagcagcacattgtggccgtcccatcctccaggtagcgctgggaaagcacaacttaagaagatgggaggcaacacagcaagtactgcgcgtggtacgtcaagttactcatcctaactacaattcccggacgcacgacaacgacctcatgcttctgcagttacagcagcctgccagaatcggtcgcgctgtgaggcccattgaggtcacccaggcctgcgccagtcccggaaccagttgccgggtcagtgggtggggtacaatcagcagtcctattgctcgctaccctgctagtctgcagtgcgttaacataaacatctctcctgacgaggtttgccaaaaagcatacccacggacgatcacgccgggaatggtatgtgctggggtgcctcaggggggtaaggattcgtgccagggggacagcggtggccctctggtttgtaggggacagcttcagggacttgttagctgggggatggagcggtgtgccctgccgggatatcccggagtgtacaccaacttatgcaaataccgcagttggattgaggagaccatgcgcgataagtag

SEQ ID NO: 211021 - DNA, 804 bp, Artificial Sequence
  derived and/or modified sequence
atgtctctgcgggttcttggttctggaacttggccctccgctcctaagatgtttctgctgcttacagcactgcaggtccttgccattgccatgacacagtcacaagaagacgaaaacaaaatcatcggaggccacacctgtactaggagctcccagccttggcaagccgctctccttgccggaccacgaaggcggtttctctgtgggggagcacttctctcaggccaatgggtgatcaccgcagctcattgtggcaggcctatcctccaggttgccctaggcaagcataacctgagaagatgggaagccacgcaacaggtgcttcgggtggtgcggcaagtgacacatcccaattataacagtaggacacatgataatgacctaatgctgcttcagctgcagcagcctgcacggatcggccgtgctgttcgcccaattgaagttacccaggcttgcgctagccccggtacctcctgccgggttagtggatgggggacaatctcgtcccctatcgccagatatcccgcttccctgcagtgcgtcaacatcaacatctctcccgatgaagtgtgtcagaaagcttatccacggactattacgcccggaatggtatgtgctggggtacctcagggcggtaaagattcttgtcagggcgatagcggagggcctcttgtgtgtagaggtcagcttcagggcttggtcagttggggaatggagcgatgcgccttgcccggataccctggagtctacactaatctgtgtaagtaccggtcttggattgaggaaacaatgcgggacaagtag

SEQ ID NO: 211022 - DNA, 804 bp, Artificial Sequence
  derived and/or modified sequence
atgagcctcagagttctgggcagcggtacctggccttctgcgcctaaaatgttcttgctcctaacagcactacaggtgctcgctatcgctatgacccagagtcaggaggacgaaaataagataattgggggacatacctgcacaagatccagtcagccctggcaggccgcattactcgctggaccaagaagaagatttctgtgtgggggagcgttgttaagtggccagtgggttattacagccgcccattgtggcagaccgattctccaggttgcgttgggaaaacacaatctgagacgttgggaagcaacccagcaagttcttcgcgtcgttcgacaggtcacacatcctaactataattctcgcacccacgataatgatcttatgctgttacaactgcagcagcctgctcgaatcggtagagcggttagacctattgaggtgacacaggcctgcgcatctccagggacatcctgtagagtcagtgggtggggcaccattagttcccccattgctcggtacccggcaagtctacagtgcgtaaacatcaatatatctcctgatgaggtatgtcagaaagcataccctcggaccataactccaggaatggtgtgcgcaggcgtgccacagggtggcaaagattcttgccagggcgacagtggcggccccctcgtatgtcggggacaacttcaggggttagtgtcctggggcatggaaagatgtgccctgccaggctacccaggcgtctatacaaatctttgtaaatatcggtcttggatcgaggagacaatgcgcgataaatag

SEQ ID NO: 211023 - DNA, 804 bp, Artificial Sequence
  derived and/or modified sequence
atgtcactgagagtgcttggctccggaacctggcctagcgctccaaaaatgtttctgttactgacagctctacaagtactcgccatagcgatgactcagtcccaggaggacgaaaacaagatcattggaggtcatacatgcactcggagcagccaaccttggcaagccgctctgttggccggacctagacggaggttcctctgcggaggcgctctgttaagtgggcagtgggtcatcaccgccgctcattgcggccgcccgatcttgcaagtcgctctcggtaagcacaaccttagacggtgggaagctacccaacaagtgctcagagtggtgcgtcaggttacacacccaaattataattcaaggacacacgacaacgatctaatgttgctgcaactacagcagcccgcgaggataggaagagcggtgcggcccatagaagtgactcaggcatgcgcatcacccggaacctcgtgcagggtgagcgggtggggaaccatctctagtccgatagcccgatatccagcgagtttacagtgcgtcaacatcaatatttcacctgatgaagtttgccagaaagcatacccccgaaccattacccctgggatggtgtgcgccggagtcccgcaaggcggtaaagattcctgccagggagattccggagggccgcttgtttgtagggggcaactgcagggcctggttagctggggcatggagaggtgcgccttgccaggttatcccggggtctacaccaacctctgtaagtaccggtcatggattgaagagacaatgcgcgataagtag

SEQ ID NO: 211024 - DNA, 804 bp, Artificial Sequence
  derived and/or modified sequence
atgagcctcagggttctgggaagcggaacctggccctccgcgccaaaaatgtttctcctgttaaccgcccttcaggtcttagccatcgccatgactcagagccaggaagacgagaacaaaattatcggtggccacacgtgcacgcggagcagccagccttggcaggcagctcttctcgccggtcccagaagaagatttctttgtgggggtgcccttctgagcggtcagtgggtgataacagcagcacactgcggccgtccaatcttacaagtggccctcggcaaacataaccttagacgctgggaggctacgcaacaagtgcttcgggtggttaggcaggtaacgcacccgaactataacagccgcacacatgataacgacctcatgctcctgcagctgcagcagccagctcgtatcggccgggccgtaagaccgatcgaggtaacccaggcctgcgcgagccctggcacctcgtgtagagtgtccggctgggggacaatttcaagcccaatcgctagatatccggcctctttacaatgcgtaaacattaatatctctccggacgaggtttgtcagaaggcttatcctcgcacgatcactcctggtatggtttgtgccggcgtgccgcagggaggtaaggatagctgtcagggcgattcaggcggtccactagtctgtagaggacagctccagggcttagtgagttggggaatggagagatgcgctttgccaggctaccccggggtctatacaaatttgtgcaaataccgttcctggatagaagagactatgcgggacaaatag

SEQ ID NO: 211025 - DNA, 804 bp, Artificial Sequence
  derived and/or modified sequence
atgagcctgcgtgtgctcggcagtggaacctggccatcggcacctaagatgtttctgctgttgactgccctgcaagtactggctattgctatgacacagtcccaggaggacgagaacaagattatagggggacacacttgtacacgctcatcccagccgtggcaagccgccctccttgctggccccagaagacggtttctgtgtggaggggctttattatcgggtcaatgggttatcaccgctgcccactgtggccgacctatcctacaggttgccctcggcaagcacaacctgagaagatgggaagcaacacaacaggttctgcgcgtggtccgacaagtgacccacccaaattacaattcccgcacccatgacaacgacctcatgctcttacagttgcaacagcctgcccgcatcggccgagcagtccgccccattgaggtcacccaggcttgtgcttcccccggaacatcctgtcgggtcagcggatggggtacaatctcttcaccaattgcccggtacccagcctccctacaatgcgttaacataaacatcagcccagatgaagtttgccaaaaagcctatccacgcaccataaccccgggaatggtctgcgccggcgtgccacagggaggaaaggatagctgccagggtgactctggaggacctctggtctgtagaggccagctgcagggtttggtaagttgggggatggaaagatgcgccctaccggggtatccgggagtgtatactaatctatgtaagtacaggtcctggatcgaggagacaatgcgagacaaatag

SEQ ID NO: 211026 - DNA, 804 bp, Artificial Sequence
  derived and/or modified sequence
atgtccctgcgtgtgttaggttccggtacatggccgtcagctcccaagatgttcctcttacttacagccctgcaggttctcgccattgccatgacacagtcccaggaagatgagaacaagattatcggagggcacacctgcacccgctcctcacaaccatggcaggctgccttactggccggacctcgccgaaggtttctgtgcgggggtgctcttctatccggtcaatgggttatcacagcagcacattgcggccggccaattcttcaagtcgcactggggaaacacaatctgcgcaggtgggaagctacccaacaagtgctcagagtggtgcgtcaggttacacacccaaattataattcaaggacacacgacaacgatctaatgttgctgcaactacagcagcccgcgaggataggaagagcggtgcggcccatagaagtgactcaggcatgcgcatcacccggaacctcgtgcagggtgagcgggtggggaaccatctctagtccgatagcccgatatccagcgagtttacagtgcgtcaacatcaatatttcacctgatgaagtttgccagaaagcatacccccgaaccattacccccgggatggtctgtgccggagtacctcaaggcggcaaagactcgtgccagggggattctggaggcccccttgtgtgtagaggccaactgcagggattagtgagctggggcatggaaagatgcgcactgcccggctacccaggagtgtacaccaacttgtgtaaataccgcagctggatcgaagaaaccatgcgcgacaagtag

SEQ ID NO: 211027 - DNA, 804 bp, Artificial Sequence
  derived and/or modified sequence
atgtcgctgagagttctaggatccggtacgtggccatccgcccctaagatgttcctcctgttgactgccttacaggtactcgccatcgccatgacacagagccaggaagatgagaataagattattggtgggcatacctgcactagaagtagccagccctggcaagccgccctgctcgccggcccaagacgacgcttcttgtgtggaggggccctgctttccgggcagtgggtcattaccgccgctcattgcggccgcccgatactacaggtggctctgggtaagcacaatctgcgcaggtgggaggctacacagcaagttttgcgggttgtgaggcaagtcactcatccaaactacaacagtcggactcacgataatgaccttatgttgctgcagctgcaacagccagcccgcatcggtcgggcggtaagacccattgaagtaacacaagcttgtgcaagccccggtaccagttgccgcgtctctggttgggggaccatctcatcacctatcgccaggtatcctgccagtctccagtgtgtaaatataaatatctcaccagacgaagtctgtcagaaggcttatcctagaacgattactccgggaatggtttgcgccggcgtgccacaaggggggaaagatagttgtcagggcgattccggcggtccacttgtgtgtagaggccagttacaaggactagtatcctggggtatggaaagatgcgctctgcctggttaccctggtgtatatactaacctctgcaaataccggagttggatagaggagacaatgcgggacaaatag

SEQ ID NO: 211028 - DNA, 804 bp, Artificial Sequence
  derived and/or modified sequence
atgagcctgagagtgctgggcagcggcacctggcccagcgcccccaagatgttcctgctgctgaccgccctgcaggtgctggccatcgccatgacccagagccaggaggacgagaacaagatcatcggcggccacacctgcaccagaagcagccagccctggcaggccgccctgctggccggccccagaagaagattcctgtgcggcggcgccctgctgagcggccagtgggtgatcaccgccgcccactgcggcagacccatcctgcaggtggccctgggcaagcacaacctgagaagatgggaggccacccagcaggtgctgagagtggtgagacaggtgacccaccccaactacaacagcagaacccacgacaacgacctgatgctgctgcagctgcagcagcccgccagaatcggcagagccgtgagacccatcgaggtgacccaggcctgcgccagccccggcaccagctgcagagtgagcggctggggcaccatcagcagccccatcgccagataccccgccagcctgcagtgcgtgaacatcaacatcagccccgacgaggtgtgccagaaggcctaccccagaaccatcacccccggcatggtgtgcgccggcgtgccccagggcggcaaggacagctgccagggcgacagcggcggccccctggtgtgcagaggccagctgcagggcctggtgagctggggcatggagagatgcgccctgcccggctaccccggcgtgtacaccaacctgtgcaagtacagaagctggatcgaggagaccatgagagacaagtag

SEQ ID NO: 211029 - protein, 631 aa, Artificial Sequence
  derived and/or modified sequence
MALRKELLKSIWYAFTALDVEKSGKVSKSQLKVLSHNLYTVLHIPHDPVALEEHFRDDDDGPVSSQGYMPYLNKYILDKVEEGAFVKEHFDELCWTLTAKKNYRADSNGNSMLSNQDAFRLWCLFNFLSEDKYPLIMVPDEVEYLLKKVLSSMSLEVSLGELEELLAQEAQVAQTTGGLSVWQFLELFNSGRCLRGVGRDTLSMAIHEVYQELIQDVLKQGYLWKRGHLRRNWAERWFQLQPSCLCYFGSEECKEKRGIIPLDAHCCVEVLPDRDGKRCMFCVKTANRTYEMSASDTRQRQEWTAAIQMAIRLQAEGKTSLHKDLKQKRREQREQRERRRAAKEEELLRLQQLQEEKERKLQELELLQEAQRQAERLLQEEEERRRSQHRELQQALEGQLREAEQARASMQAEMELKEEEAARQRQRIKELEEMQQRLQEALQLEVKARRDEESVRIAQTRLLEEEEEKLKQLMQLKEEQERYIERAQQEKEELQQEMAQQSRSLQQAQQQLEEVRQNRQRADEDVEAAQRKLRQASTNVKHWNVQMNRLMHPIEPGDKRPVTSSSFSGFQPPLLAHRDSSLKRLTRWGSQGNRTPSPNSNEQQKSLNGGDEAPAPASTPQEDKLDPAPEN

SEQ ID NO: 211030 - protein, 184 aa, Artificial Sequence
  derived and/or modified sequence
MALRKELLKSIWYAFTALDVEKSGKVSKSQLKVLSHNLYTVLHIPHDPVALEEHFRDDDDGPVSSQGYMPYLNKYILDKDAFRLWCLFNFLSEDKYPLIMVPDEVEYLLKKVLSSMSLEVSLGELEELLAQEAQVAQTTGGLSVWQFLELFNSGRCLRGVGRDTLSMAIHEVYQELIQDVLKQG

SEQ ID NO: 211031 - protein, 130 aa, Artificial Sequence
  derived and/or modified sequence
  misc_feature (1)..(1): Xaa can be any naturally occurring amino acid
XRDDDDGPVSSQGYMPYLNKYILDKDAFRLWCLFNFLSEDKYPLIMVPDEVEYLLKKVLSSMSLEVSLGELEELLAQEAQVAQTTGGLSVWQFLELFNSGRCLRGVGRDTLSMAIHEVYQELIQDVLKQG

SEQ ID NO: 211032 - protein, 376 aa, Artificial Sequence
  derived and/or modified sequence
MICPPRPPKVLGLQVLPDRDGKRCMFCVKTANRTYEMSASDTRQRQEWTAAIQMAIRLQAEGKTSLHKDLKQKRREQREQRERRRAAKEEELLRLQQLQEEKERKLQELELLQEAQRQAERLLQEEEERRRSQHRELQQALEGQLREAEQARASMQAEMELKEEEAARQRQRIKELEEMQQRLQEALQLEVKARRDEESVRIAQTRLLEEEEEKLKQLMQLKEEQERYIERAQQEKEELQQEMAQQSRSLQQAQQQLEEVRQNRQRADEDVEAAQRKLRQASTNVKHWNVQMNRLMHPIEPGDKRPVTSSSFSGFQPPLLAHRDSSLKRLTRWGSQGNRTPSPNSNEQQKSLNGGDEAPAPASTPQEDKLDPAPEN

SEQ ID NO: 211033 - DNA, 1896 bp, Artificial Sequence
  derived and/or modified sequence
atggcccttaggaaagagttgctcaaaagtatatggtatgcatttaccgcgctggacgtggagaagtcagggaaagtgagcaaatcccaattaaaggtgttaagtcacaatctgtataccgttttacacatcccacacgaccccgttgcactcgaagaacattttcgagacgatgacgacggcccggtctctagccagggatatatgccctatctgaacaagtacattctggataaggtggaagagggtgcatttgtcaaggagcattttgacgagttgtgctggaccctcacagccaaaaagaactatcgggcggattctaatgggaacagtatgttaagcaaccaagacgcatttcgactgtggtgcttgtttaatttcttatccgaggataaatacccacttatcatggtgcctgatgaagtagagtacctcttgaagaaagtcctgtcatcgatgtcattagaggtgtcactgggcgaacttgaagaactgctggcccaggaagcccaggtcgcccagacaacaggcgggctctccgtgtggcagttcctggagctgttcaattccggaagatgcctgcgcggggttggcagggatacacttagcatggccattcacgaagtgtaccaagagctgatccaagatgtgctgaagcagggctacctgtggaaacgtggtcacctgcgacggaactgggcagaacgctggttccaattgcagccctcctgcctgtgctattttggaagcgaagagtgcaaggaaaagagaggaatcatcccgttggacgcgcactgctgtgtggaggtcctgcctgatagagacggtaaaaggtgtatgttctgcgtgaaaacagcaaatcgcacctacgagatgtccgcttctgacacacgacagcggcaagagtggactgcggccatccagatggctatacggctacaggccgagggaaagacaagcctccacaaagacctcaagcagaagcgcagggagcagcgagaacagcgcgaaaggcgacgcgccgcaaaagaggaagagctgttacgcttgcaacagctgcaggaagagaaagaaaggaaacttcaggagctcgagcttctgcaagaagcccagaggcaggctgagcgcctgctgcaggaagaagaggagagacggagaagccagcacagggagctgcagcaggcactggagggtcagctgcgagaggccgaacaggcccgcgcttcgatgcaggctgagatggaacttaaggaggaagaagctgcacgacagaggcagcgaataaaagaactggaggagatgcagcagaggctgcaggaggctttgcaactagaagtgaaggccaggcgagacgaggaatctgtgcgcatcgcccagacccgcctgttagaggaagaggaggagaagctgaagcagctgatgcagctgaaagaagaacaggaacgctatattgagagagcacagcaggagaaagaagaacttcaacaggaaatggctcagcaatctcgatcactgcagcaggcgcaacagcagcttgaggaggttcgccagaacagacagagagccgacgaggatgtggaggcggctcagcgcaaactccgccaggcatccacaaacgttaaacattggaacgtgcagatgaatcggctgatgcaccccatcgaaccgggcgacaaacgaccagtgacttctagcagtttctcaggtttccaacctcctctcttggctcatcgagactcttcactcaagcgtcttacaaggtgggggtctcagggtaacagaacgccaagtcccaattctaatgaacagcagaagagcttaaacggaggggacgaagcacccgcaccagcgtccacaccccaggaagataaactggacccagcgccagaaaattag

SEQ ID NO: 211034 - DNA, 555 bp, Artificial Sequence
  derived and/or modified sequence
atggccctccgcaaggagttgctcaagtcgatctggtatgcatttactgctctggatgtcgaaaaatctgggaaagtctcaaagtcccagcttaaagtgctctcacacaatctctatactgtcctgcacattccccatgaccccgtggccctggaggagcactttcgtgacgatgatgatggacccgttagctctcaagggtatatgccctacctgaacaagtatattcttgacaaagatgcctttcggctgtggtgtttgttcaatttcctgagcgaggataaataccccttgattatggtccctgatgaagtcgaatatctgctcaaaaaggttttgtcttccatgtctctcgaggtgtccctgggcgaattagaggaacttctggcacaagaggctcaagtagcccaaacgactggtggcctaagcgtgtggcagttccttgagctgttcaattccggccgctgtctacgaggcgtgggccgtgataccctctcaatggccatccacgaagtgtaccaggagctaattcaagacgtgctcaaacagggctag

SEQ ID NO: 211035 - DNA, 393 bp, Artificial Sequence
  derived and/or modified sequence
taacgggacgacgatgacggacctgtctcctcacagggttacatgccttacctgaacaagtacattcttgacaaagacgcctttcgtctatggtgtttattcaactttttgtctgaagacaaatatccattgatcatggtgcctgatgaggtggagtacctgctgaagaaggtcctgagcagcatgtctcttgaggtcagtctgggggagttggaggaactgctcgcacaggaagctcaagtggcccaaactacggggggcctctccgtgtggcaatttcttgaactttttaacagcgggagatgtctcagaggcgtgggcagagatacactgtccatggccatacacgaagtgtaccaggagttgattcaagacgttctcaaacagggatag

SEQ ID NO: 211036 - DNA, 1131 bp, Artificial Sequence
  derived and/or modified sequence
atgatctgcccgccacggccacctaaagtgctgggactccaggtacttcccgatagagacgggaaacgttgtatgttttgtgtcaaaactgcaaatcgcacatacgagatgagcgcttctgacacacgccagagacaggagtggactgcggcaattcagatggccattaggttgcaagccgaggggaaaactagcctgcacaaggatctcaaacagaagcgccgcgagcagcgggaacagcgggagaggcgtcgagctgcaaaggaggaagagcttcttcgtctccagcagcttcaagaggagaaagaaaggaaactgcaggagttagagcttttgcaggaagcccagcgtcaggctgaaaggttgctgcaagaggaggaagaaagacgccgatcccaacaccgcgagctgcaacaagctttggagggccagctgagagaagccgagcaggctcgagcgagtatgcaggctgagatggaactcaaggaggaggaagctgcgcgacaacgccaaagaattaaggaactggaagagatgcagcagaggctgcaggaggctttgcagttagaggtcaaggctcggcgggatgaggagagtgtgaggattgcccaaactcgcctgttagaagaggaagaggagaaactgaaacaactgatgcaactgaaggaggagcaggaacgttatatcgaaagggcccagcaggaaaaggaagagctgcagcaggaaatggcccagcaaagtcggtcgttgcagcaggcccagcagcagttggaggaggtgcggcagaatcgccagcgagccgacgaagacgtggaagctgcgcagagaaaactccggcaggcctcgacaaacgtcaagcattggaatgtgcaaatgaatcggctgatgcaccccattgagccaggggacaaacggcctgtgacctcaagcagctttagcgggttccaaccaccacttttggcccatcgcgattcgtcactgaagcgtcttactaggtggggctcccaaggcaaccggactccctcccccaactccaacgaacagcaaaagtccctaaacggcggcgacgaagcacctgctccggccagcacaccacaggaggacaaattggaccccgcccccgagaattag

SEQ ID NO: 211037 - DNA, 1896 bp, Artificial Sequence
  derived and/or modified sequence
atggccctgaggaaggagctgctgaagagcatctggtacgccttcaccgccctggatgtggagaagagcggcaaggtgtccaagagccagctgaaggtgctgagccacaacctgtacacagtgctgcacatcccccatgaccctgtggccctggaggagcacttcagagatgatgatgatggccctgtgagcagccagggctacatgccctacctgaacaagtacatcctggacaaggtggaggagggcgcctttgtgaaggagcactttgatgagctgtgctggaccctgacagccaagaagaactacagagctgacagcaatggaaacagcatgctgagcaaccaggatgccttccggctgtggtgcctcttcaacttcctgtctgaggacaagtaccccctcatcatggtgcctgatgaggtggagtacctgctgaagaaggtgctgagctccatgagcctggaggtgtccctgggggagctggaggagctgctggcccaggaggcccaggtggcccagaccaccggcggcctgtctgtgtggcagttcctggagctgttcaacagcggccgctgcctgcggggcgtgggccgggacaccctgtccatggccatccacgaggtgtaccaggagctgatccaggatgtgctgaagcagggctacctgtggaagaggggccacctgcggaggaactgggccgagcgctggttccagctgcagcccagctgcctgtgctacttcggcagcgaggagtgcaaggagaagaggggcatcatccccctggatgcccactgctgcgtggaggtgctgcctgacagagatggcaagcgctgcatgttctgtgtgaagacagccaacagaacctatgagatgtctgccagtgacacccggcagaggcaggagtggacagctgccatccagatggccatccggctgcaggccgagggcaagaccagcctgcacaaggacctgaagcagaagagaagagagcagcgggagcagcgggagaggagaagagctgccaaggaggaggagctgctgcggctgcagcagctgcaggaggagaaggagaggaagctgcaggagctggagctgctgcaggaggcccagaggcaggccgagcggctgctgcaggaggaggaggagaggagaagaagccagcaccgggagctgcagcaggccctggagggccagctgcgggaggccgagcaggcccgggcctccatgcaggccgagatggagctgaaggaggaggaggccgcccggcagaggcagaggatcaaggagctggaggagatgcagcagaggctgcaggaggccctgcagctggaggtgaaggccaggagagatgaggagagcgtgagaattgcccagacccggctgctggaggaggaggaggagaagctgaagcagctgatgcagctgaaggaggagcaggagcgctacatcgagcgggcccagcaggagaaggaggagctgcagcaggagatggcccagcagagccgcagcctgcagcaggcccagcagcagctggaggaggtgcggcagaaccggcagagagcagatgaagatgtggaggccgcccagaggaagctgcggcaggccagcaccaacgtgaagcactggaatgtgcagatgaaccggctgatgcaccccatcgagcccggggacaagaggcctgtgaccagcagcagcttcagcggcttccagccccccctgctggcccaccgggacagcagcctgaagaggctgacccgctggggcagccagggcaacagaacacccagccccaacagcaatgagcagcagaagagcctgaatggaggagatgaggccccagccccagccagcaccccccaggaggacaagctggaccctgcccctgagaactag

SEQ ID NO: 211038 - DNA, 555 bp, Artificial Sequence
  derived and/or modified sequence
atggccctgaggaaggagctgctgaagagcatctggtacgccttcaccgccctggatgtggagaagagcggcaaggtgtccaagagccagctgaaggtgctgagccacaacctgtacacagtgctgcacatcccccatgaccctgtggccctggaggagcacttcagagatgatgatgatggccctgtgagcagccagggctacatgccctacctgaacaagtacatcctggacaaggatgccttccggctgtggtgcctcttcaacttcctgtctgaggacaagtaccccctcatcatggtgcctgatgaggtggagtacctgctgaagaaggtgctgagctccatgagcctggaggtgtccctgggggagctggaggagctgctggcccaggaggcccaggtggcccagaccactggaggcctgtctgtgtggcagttcctggagctgttcaacagcggccgctgcctgcggggcgtgggccgggacaccctgtccatggccatccacgaggtgtaccaggagctgatccaggatgtgctgaagcagggctag

SEQ ID NO: 211039 - DNA, 393 bp, Artificial Sequence
  derived and/or modified sequence
tgaagagatgatgatgatggccctgtgagcagccagggctacatgccctacctgaacaagtacatcctggacaaggatgccttccggctgtggtgcctcttcaacttcctgtctgaggacaagtaccccctcatcatggtgcctgatgaggtggagtacctgctgaagaaggtgctgagctccatgagcctggaggtgtccctgggggagctggaggagctgctggcccaggaggcccaggtggcccagaccactggaggcctgtctgtgtggcagttcctggagctgttcaacagcggccgctgcctgcggggcgtgggccgggacaccctgtccatggccatccacgaggtgtaccaggagctgatccaggatgtgctgaagcagggctag

SEQ ID NO: 211040 - DNA, 1131 bp, Artificial Sequence
  derived and/or modified sequence
atgatctgcccccccaggcctcccaaggtgctgggcctgcaggtgctgcctgacagagatggcaagcgctgcatgttctgtgtgaagacagccaacagaacctatgagatgtctgccagtgacacccggcagaggcaggagtggacagctgccatccagatggccatccggctgcaggccgagggcaagaccagcctgcacaaggacctgaagcagaagaggcgggagcagcgggagcagcgggagcggcggcgggccgccaaggaggaggagctgctgcggctgcagcagctgcaggaggagaaggagaggaagctgcaggagctggagctgctgcaggaggcccagaggcaggccgagcggctgctgcaggaggaggaggagcggcggcgcagccagcaccgggagctgcagcaggccctggagggccagctgcgggaggccgagcaggcccgggcctccatgcaggccgagatggagctgaaggaggaggaggccgcccggcagaggcagaggatcaaggagctggaggagatgcagcagaggctgcaggaggccctgcagctggaggtgaaggccaggagagatgaggagagcgtgcgcatcgcccagacccggctgctggaggaggaggaggagaagctgaagcagctgatgcagctgaaggaggagcaggagcgctacatcgagcgggcccagcaggagaaggaggagctgcagcaggagatggcccagcagagccgcagcctgcagcaggcccagcagcagctggaggaggtgcggcagaaccggcagagagcagatgaagatgtggaggccgcccagaggaagctgcggcaggccagcaccaacgtgaagcactggaatgtgcagatgaaccggctgatgcaccccatcgagcccggggacaagaggcctgtgaccagcagcagcttcagcggcttccagccccccctgctggcccaccgggacagcagcctgaagaggctgacccgctggggcagccagggcaacagaacacccagccccaacagcaatgagcagcagaagagcctgaatggaggagatgaggccccagccccagccagcaccccccaggaggacaagctggaccctgccccagaaaattag

SEQ ID NO: 211041 - DNA, 1896 bp, Artificial Sequence
  derived and/or modified sequence
atggccctgcggaaggagctgctgaagagcatctggtacgccttcactgctctggacgtggaaaaatctgggaaagtatcgaaatcacagctgaaggttttgtctcacaacctgtataccgtgctccacatcccacatgatcctgtcgcactcgaggagcacttccgcgacgacgatgatggccctgtgagcagccaaggatacatgccctatcttaataagtatattttagacaaagtcgaagaaggcgcatttgtgaaagagcacttcgatgagctctgttggaccctgactgctaagaagaactaccgcgccgactctaatgggaactctatgctctccaaccaggatgcatttcgcctatggtgtttatttaacttcttatcagaagataaataccctctcatcatggtaccggatgaagtagagtacttacttaagaaagtccttagctctatgtccttagaagtctcccttggtgagcttgaagagctcctcgctcaggaggcgcaggtagcacagacaacgggtggactttctgtctggcagtttctggaactgttcaattctggcaggtgcctgcggggggtgggacgtgacacactgtctatggcaatccatgaagtgtatcaagaacttatccaagacgtccttaagcaggggtacctctggaagaggggacacctccgccggaactgggcagaaagatggtttcagctgcaaccctcctgcctttgctatttcgggagcgaggagtgtaaggaaaagagagggatcatcccacttgatgcccactgctgtgtggaagtgctcccagacagagatggaaagcgctgtatgttttgcgtgaaaaccgcgaaccgcacgtatgaaatgtccgcttctgatacgagacagcgacaagaatggacggccgcgatacagatggccatcaggctccaagcggaaggcaagacatccctacacaaggacctaaagcagaaacgcagggaacagcgtgagcaaagagagaggcggcgagccgctaaggaggaagaactgctgcgccttcagcaactccaggaagagaaggagaggaagttgcaggagcttgagttgctgcaagaagcacagcggcaagcagaaaggttactacaggaagaggaagagcggcgccgttctcagcaccgcgaactgcagcaggccctggagggtcagctgagagaggccgagcaggccagagcctctatgcaggcagaaatggaattaaaagaggaggaggccgcccggcagcgtcagcgcatcaaggagctggaagaaatgcaacagcgcctgcaggaggctttgcaactggaggttaaggcaagacgggacgaggaaagcgttcgcatcgctcagaccaggcttctggaagaagaagaagaaaagctcaagcaactgatgcaactgaaggaggagcaggaaaggtacattgaacgcgcgcagcaggaaaaagaggagctgcagcaggagatggcccagcaatctaggtctctgcaacaagcccagcagcagcttgaggaggtaaggcagaatcgccagcgtgccgacgaggatgtggaggccgctcagcggaagctccgccaggcaagcacaaatgtgaaacattggaatgtacagatgaatcggctgatgcaccctattgaaccaggggataaaaggccagtcacgtcttcgtccttttccgggttccagccacccctgctcgctcacagggattctagcctcaagcgtctcacccgatgggggtcacagggaaaccggactccctctccgaactctaacgagcagcagaagtctctgaacggaggcgatgaagccccagctcctgcgagtactccgcaggaggataagcttgatccagctccagaaaactag

SEQ ID NO: 211042 - DNA, 555 bp, Artificial Sequence
  derived and/or modified sequence
atggccctgcggaaggagctgctgaagagcatctggtacgccttcactgccctcgatgtggaaaagtctggcaaggtgtcaaagtcacagctcaaagtgctgagtcataatctgtacacagtcctgcacattccccacgatcctgtggccctggaggagcacttcagggacgatgacgacggacctgtatcaagccagggctatatgccctacctcaacaaatatatcctggacaaggacgcattccggctttggtgtctcttcaattttctctccgaggacaagtatcccttaatcatggtgcctgatgaggttgagtacctgctgaagaaggttttatcgagcatgtcactagaggtgagtctcggggagttagaggagctgttggcccaggaggcccaggtggctcagaccaccggcgggttgagcgtttggcagttcctggaactttttaactcagggaggtgtctacgcggagtgggaagagatactttgagcatggccatccacgaagtgtaccaggagctcatccaggacgtactcaaacagggctag

SEQ ID NO: 211043 - DNA, 393 bp, Artificial Sequence
  derived and/or modified sequence
tgacgggacgacgacgacggccccgtgagcagccagggctacatgccttacctcaataagtatatactagacaaggatgcattccgtctctggtgcctgtttaactttttatccgaggacaagtacccactgattatggtaccagacgaggtggaatacctgttgaagaaagtcctcagctctatgagcctcgaggtcagcttgggcgaacttgaagagctgctggcacaggaggcgcaggtggcacagactacagggggattgagcgtttggcagtttcttgaattgtttaacagtggtcgatgtctccgaggtgtcgggcgggataccctttctatggctatacatgaggtgtaccaggagctgatccaggatgtcctgaagcaaggttag

SEQ ID NO: 211044 - DNA, 1131 bp, Artificial Sequence
  derived and/or modified sequence
atgatctgccccccccggccccccaaggtgctgggcctgcaggtgctgccagatcgggacggcaaacgctgtatgttctgcgttaagacggctaacaggacatatgaaatgtccgcatcggatacccggcagagacaggaatggaccgctgctatccagatggccatccggttgcaggctgaaggcaagaccagtctgcataaggaccttaagcagaagcggagagagcagcgggaacaacgcgagagacgccgagctgctaaggaggaggaattactacgactgcagcagcttcaagaagagaaggaaagaaagttacaagagctggagctgcttcaggaggcccagcggcaggccgaaaggctgctccaggaggaggaggaaaggagacggtcccagcatcgggagttgcaacaggcgctggaaggtcagctgcgggaagctgagcaggcccgcgcatcaatgcaagctgagatggagctgaaggaagaggaggcagctcggcagagacagagaattaaagagctggaagagatgcagcagcggctccaggaggcgctgcaactggaggtcaaggccaggagagacgaagagagcgtgcgcatcgcccaaactagattgttggaggaggaggaagagaaactaaagcagctcatgcagctgaaggaagagcaagagcgttacatcgaacgcgcccagcaagagaaggaggagttacagcaagaaatggcccaacagtcaagatctctgcaacaggcgcagcaacagttggaagaggttcgccagaaccgacaacgggcagatgaggatgtggaagcggcacagaggaagctccggcaggcgtcgactaacgtgaaacactggaacgtccagatgaatcgcctgatgcaccccattgagcccggtgataagcgccctgtaacatcgtcctccttcagtgggtttcagccccctttattggctcacagagatagctctcttaaacgattgactaggtgggggagtcagggtaaccgcactccctcacccaatagcaacgagcagcagaaatctctcaacggaggggatgaagcacctgcccccgccagtactccccaggaggataagctggatcccgccccggagaactag

SEQ ID NO: 211045 - DNA, 1896 bp, Artificial Sequence
  derived and/or modified sequence
atggctctgcggaaggaattgcttaaaagtatttggtatgcctttactgcattggacgtcgagaagtccggcaaggtcagcaaatctcagctgaaggtcctgtctcataacctgtacacagtgcttcatattccccatgacccagtggctctagaggagcacttccgggacgatgacgatggtcctgtgtctagtcaggggtacatgccttatctaaacaaatacatattggataaagtggaagagggagcatttgtgaaggaacatttcgatgaactttgctggacgctgactgcaaaaaagaactacagggcggatagtaatggcaacagcatgctgagcaaccaagacgcctttcgtctttggtgcctgttcaacttcttaagcgaggataaatatcccctgatcatggtcccggatgaagtggaatacttgctcaagaaagtgttaagctcaatgagcctcgaggtctctctgggagagctggaggaacttttagcacaggaggctcaagttgcccagactactggtggactttccgtatggcagttccttgagctgtttaatagcggacggtgtctgaggggcgtcggccgagatactctgagcatggctatacatgaagtgtatcaggagctgatccaggacgttctgaagcagggttacctgtggaagagagggcacctgcgccgtaactgggctgaaagatggttccagctccaaccatcttgtctgtgttatttcggatcagaggagtgcaaggaaaaaaggggaatcattcccctcgatgcccactgctgcgtggaagtgttgccagacagggacggcaagcgctgtatgttctgtgttaaaaccgctaaccggacatatgagatgtccgcatccgatactcggcagagacaggagtggactgccgctattcagatggcgattaggctgcaagcagaaggtaaaactagcctccacaaagatttaaaacagaagcgccgtgaacagagggaacagcgcgaaaggcggagggctgcaaaagaggaagagttacttcgactgcagcaattacaggaggaaaaagaacgaaaacttcaggagctggagttactgcaagaagcacagcggcaagccgagagattgctccaagaagaggaggagaggagacgctctcagcaccgggagttacagcaggctctggaaggacagttacgagaggcagaacaggctcgagcatccatgcaagccgagatggagctgaaggaagaggaggctgccagacagagacagaggatcaaggagctggaggaaatgcagcagaggctccaagaagctctccagctagaagtcaaagccagaagggacgaagagagcgtgcggattgcccaaacccggctgcttgaggaggaggaggagaagcttaagcaattaatgcagttgaaggaagaacaggagcgctatatcgagcgtgcgcagcaggaaaaagaagagttacagcaggagatggcacagcaatcccggagcttgcagcaggctcagcagcaactcgaagaggtaagacaaaaccgtcagagagctgacgaagacgtggaggcagcacaacgaaagcttcgccaagcatcaactaacgtgaagcactggaacgtgcagatgaaccgattgatgcatccaattgagccaggggataagcggccagtcacatctagctcttttagcggcttccagccgcctctccttgcacatagagatagcagcctaaaaaggctaacgaggtgggggtcccaaggtaacagaacaccatcaccgaattctaatgaacagcagaagagcctgaatggcggtgatgaagcccctgcacctgcctcgaccccacaggaagataagctggatccggctcctgagaactag

SEQ ID NO: 211046 - DNA, 555 bp, Artificial Sequence
  derived and/or modified sequence
atggcacttcgtaaggagcttctaaaatctatctggtacgctttcacggcgctcgatgtagaaaagtccggaaaggtgtctaaatcacaactgaaggtgctttcccacaacctgtataccgtgctacacatcccccacgaccccgtggcactcgaggagcattttagagatgatgacgatgggccagttagttctcaggggtacatgccataccttaacaaatacatcttggataaggatgcttttcgcctttggtgtctttttaattttttgagcgaagacaagtatccactgattatggttcctgacgaagtggaatacttgctgaagaaggtgctcagctctatgagccttgaagtgagcctcggcgaactggaagaactgctggcccaggaggcccaggtagcacagacgactggtggcctgtccgtgtggcagttcttggagttgttcaatagcggtaggtgtctccgcggagtgggcagggacaccctgtcgatggctatacatgaagtttaccaggaactgatccaagatgtgctgaaacaaggttag

SEQ ID NO: 211047 - DNA, 393 bp, Artificial Sequence
  derived and/or modified sequence
tagagagacgatgatgatggacctgtatctagtcagggctatatgccttatctcaacaagtatatactcgacaaggatgcctttcggctctggtgtctgtttaacttcttgtcggaggataagtacccgctgatcatggtccccgacgaggttgagtatttactgaagaaagtcctgtcctctatgagcctggaggtgtctctgggcgaactggaagaactgctcgcgcaggaggctcaagtggcacagactaccggtggactcagtgtttggcagtttttggagctctttaattcgggacggtgtcttcggggtgtcggaagggatactctcagtatggctatacatgaagtgtaccaggaattgatacaggacgtgttgaagcagggctag

SEQ ID NO: 211048 - DNA, 1131 bp, Artificial Sequence
  derived and/or modified sequence
atgatctgtccgcctagaccacccaaagtgctaggcctgcaagtgctgccggatagagatggcaagagatgtatgttttgcgtgaagactgccaacaggacctacgagatgagcgcttcagacacaaggcagagacaagagtggacagcggcaatccagatggcgatccgcctgcaagccgaaggcaaaacctccctacacaaggatcttaagcagaagagaagggaacagagggagcagagagaacgcaggagagcagcaaaggaagaagaactgctcagacttcaacaacttcaggaggagaaggaacggaaattgcaggagctggagctgcttcaggaggcccagcgccaagcagagaggcttctgcaagaggaggaagaacgcaggcgaagtcagcatagggagctgcagcaggctctcgaaggccaactgcgggaagccgaacaggctagagcatcaatgcaggccgaaatggaactcaaggaagaggaagccgcacgccagcgccagcggataaaggaactagaagagatgcaacaaaggcttcaagaagcactgcagctggaagtgaaagcacggagagacgaggaatccgtgaggatcgcacagacacggctgctggaggaagaggaagagaaattaaagcagctgatgcaacttaaggaggagcaggaaaggtacattgagagagctcagcaggaaaaggaggagctgcaacaggagatggcccagcagtcaaggtctctgcagcaagcgcagcagcagctggaggaagttaggcagaatagacagagagccgatgaagacgtggaagccgctcaacggaagctgcggcaagcgtctaccaatgtcaagcattggaacgtccagatgaaccgtttaatgcacccaatcgagcccggagataagcgccctgttacttcctcgagcttttccggctttcagccacccctattggctcatagggactcgtccctcaagagactaacccgatggggatctcagggcaaccggacaccgtcacccaactctaatgaacagcagaaatctttgaatggcggagacgaagctcccgcaccggcttcaacgccgcaggaagataaactggatcccgcaccagagaattag

SEQ ID NO: 211049 - DNA, 1896 bp, Artificial Sequence
  derived and/or modified sequence
atggccctgagaaaggagctgctgaagagcatctggtacgccttcaccgccctggacgtggagaagagcggcaaggtgagcaagagccagctgaaggtgctgagccacaacctgtacaccgtgctgcacatcccccacgaccccgtggccctggaggagcacttcagagacgacgacgacggccccgtgagcagccagggctacatgccctacctgaacaagtacatcctggacaaggtggaggagggcgccttcgtgaaggagcacttcgacgagctgtgctggaccctgaccgccaagaagaactacagagccgacagcaacggcaacagcatgctgagcaaccaggacgccttcagactgtggtgcctgttcaacttcctgagcgaggacaagtaccccctgatcatggtgcccgacgaggtggagtacctgctgaagaaggtgctgagcagcatgagcctggaggtgagcctgggcgagctggaggagctgctggcccaggaggcccaggtggcccagaccaccggcggcctgagcgtgtggcagttcctggagctgttcaacagcggcagatgcctgagaggcgtgggcagagacaccctgagcatggccatccacgaggtgtaccaggagctgatccaggacgtgctgaagcagggctacctgtggaagagaggccacctgagaagaaactgggccgagagatggttccagctgcagcccagctgcctgtgctacttcggcagcgaggagtgcaaggagaagagaggcatcatccccctggacgcccactgctgcgtggaggtgctgcccgacagagacggcaagagatgcatgttctgcgtgaagaccgccaacagaacctacgagatgagcgccagcgacaccagacagagacaggagtggaccgccgccatccagatggccatcagactgcaggccgagggcaagaccagcctgcacaaggacctgaagcagaagagaagagagcagagagagcagagagagagaagaagagccgccaaggaggaggagctgctgagactgcagcagctgcaggaggagaaggagagaaagctgcaggagctggagctgctgcaggaggcccagagacaggccgagagactgctgcaggaggaggaggagagaagaagaagccagcacagagagctgcagcaggccctggagggccagctgagagaggccgagcaggccagagccagcatgcaggccgagatggagctgaaggaggaggaggccgccagacagagacagagaatcaaggagctggaggagatgcagcagagactgcaggaggccctgcagctggaggtgaaggccagaagagacgaggagagcgtgagaatcgcccagaccagactgctggaggaggaggaggagaagctgaagcagctgatgcagctgaaggaggagcaggagagatacatcgagagagcccagcaggagaaggaggagctgcagcaggagatggcccagcagagcagaagcctgcagcaggcccagcagcagctggaggaggtgagacagaacagacagagagccgacgaggacgtggaggccgcccagagaaagctgagacaggccagcaccaacgtgaagcactggaacgtgcagatgaacagactgatgcaccccatcgagcccggcgacaagagacccgtgaccagcagcagcttcagcggcttccagccccccctgctggcccacagagacagcagcctgaagagactgaccagatggggcagccagggcaacagaacccccagccccaacagcaacgagcagcagaagagcctgaacggcggcgacgaggcccccgcccccgccagcaccccccaggaggacaagctggaccccgcccccgagaactag

SEQ ID NO: 211050 - DNA, 555 bp, Artificial Sequence
  derived and/or modified sequence
atggccctgagaaaggagctgctgaagagcatctggtacgccttcaccgccctggacgtggagaagagcggcaaggtgagcaagagccagctgaaggtgctgagccacaacctgtacaccgtgctgcacatcccccacgaccccgtggccctggaggagcacttcagagacgacgacgacggccccgtgagcagccagggctacatgccctacctgaacaagtacatcctggacaaggacgccttcagactgtggtgcctgttcaacttcctgagcgaggacaagtaccccctgatcatggtgcccgacgaggtggagtacctgctgaagaaggtgctgagcagcatgagcctggaggtgagcctgggcgagctggaggagctgctggcccaggaggcccaggtggcccagaccaccggcggcctgagcgtgtggcagttcctggagctgttcaacagcggcagatgcctgagaggcgtgggcagagacaccctgagcatggccatccacgaggtgtaccaggagctgatccaggacgtgctgaagcagggctag

SEQ ID NO: 211051 - DNA, 393 bp, Artificial Sequence
  derived and/or modified sequence
tgaagagacgacgacgacggccccgtgagcagccagggctacatgccctacctgaacaagtacatcctggacaaggacgccttcagactgtggtgcctgttcaacttcctgagcgaggacaagtaccccctgatcatggtgcccgacgaggtggagtacctgctgaagaaggtgctgagcagcatgagcctggaggtgagcctgggcgagctggaggagctgctggcccaggaggcccaggtggcccagaccaccggcggcctgagcgtgtggcagttcctggagctgttcaacagcggcagatgcctgagaggcgtgggcagagacaccctgagcatggccatccacgaggtgtaccaggagctgatccaggacgtgctgaagcagggctag

SEQ ID NO: 211052 - DNA, 1131 bp, Artificial Sequence
  derived and/or modified sequence
atgatctgcccccccagaccccccaaggtgctgggcctgcaggtgctgcccgacagagacggcaagagatgcatgttctgcgtgaagaccgccaacagaacctacgagatgagcgccagcgacaccagacagagacaggagtggaccgccgccatccagatggccatcagactgcaggccgagggcaagaccagcctgcacaaggacctgaagcagaagagaagagagcagagagagcagagagagagaagaagagccgccaaggaggaggagctgctgagactgcagcagctgcaggaggagaaggagagaaagctgcaggagctggagctgctgcaggaggcccagagacaggccgagagactgctgcaggaggaggaggagagaagaagaagccagcacagagagctgcagcaggccctggagggccagctgagagaggccgagcaggccagagccagcatgcaggccgagatggagctgaaggaggaggaggccgccagacagagacagagaatcaaggagctggaggagatgcagcagagactgcaggaggccctgcagctggaggtgaaggccagaagagacgaggagagcgtgagaatcgcccagaccagactgctggaggaggaggaggagaagctgaagcagctgatgcagctgaaggaggagcaggagagatacatcgagagagcccagcaggagaaggaggagctgcagcaggagatggcccagcagagcagaagcctgcagcaggcccagcagcagctggaggaggtgagacagaacagacagagagccgacgaggacgtggaggccgcccagagaaagctgagacaggccagcaccaacgtgaagcactggaacgtgcagatgaacagactgatgcaccccatcgagcccggcgacaagagacccgtgaccagcagcagcttcagcggcttccagccccccctgctggcccacagagacagcagcctgaagagactgaccagatggggcagccagggcaacagaacccccagccccaacagcaacgagcagcagaagagcctgaacggcggcgacgaggcccccgcccccgccagcaccccccaggaggacaagctggaccccgcccccgagaactag

SEQ ID NO: 211053 - DNA, 2262 bp, Artificial Sequence
  derived and/or modified sequence
cagccatggccctgcgcaaggaactgctcaagtccatctggtacgcctttaccgcgctggacgtggagaagagtggcaaagtctccaagtcccagctcaaggtgctgtcccacaacctgtacacggtcctgcacatcccccatgaccccgtggccctggaggaacacttccgagatgatgatgacggccctgtgtccagccagggatacatgccctacctcaacaagtacatcctggacaaggtggaggagggggcttttgttaaagagcactttgatgagctgtgctggacgctgacggccaagaagaactatcgggcagatagcaacgggaacagtatgctctccaatcaggatgccttccgcctctggtgcctcttcaacttcctgtctgaggacaagtaccctctgatcatggttcctgatgaggtggaatacctgctgaaaaaggtactcagcagcatgagcttggaggtgagcttgggtgagctggaggagcttctggcccaggaggcccaggtggcccagaccaccggggggctcagcgtctggcagttcctggagctcttcaattcgggccgctgcctgcggggcgtgggccgggacaccctcagcatggccatccacgaggtctaccaggagctcatccaagatgtcctgaagcagggctacctgtggaagcgagggcacctgagaaggaactgggccgaacgctggttccagctgcagcccagctgcctctgctactttgggagtgaagagtgcaaagagaaaaggggcattatcccgctggatgcacactgctgcgtggaggtgctgccagaccgcgacggaaagcgctgcatgttctgtgtgaagacagccaaccgcacgtatgagatgagcgcctcagacacgcgccagcgccaggagtggacagctgccatccagatggcgatccggctgcaggccgaggggaagacgtccctacacaaggacctgaagcagaaacggcgcgagcagcgggagcagcgggagcggcgccgggcggccaaggaagaggagctgctgcggctgcagcagctgcaggaggagaaggagcggaagctgcaggagctggagctgctgcaggaggcgcagcggcaggccgagcggctgctgcaggaggaggaggaacggcgccgcagccagcaccgcgagctgcagcaggcgctcgagggccaactgcgcgaggcggagcaggcccgggcctccatgcaggctgagatggagctgaaggaggaggaggctgcccggcagcggcagcgcatcaaggagctggaggagatgcagcagcggttgcaggaggccctgcaactagaggtgaaagctcggcgagatgaagaatctgtgcgaatcgctcagaccagactgctggaagaggaggaagagaagctgaagcagttgatgcagctgaaggaggagcaggagcgctacatcgaacgggcgcagcaggagaaggaagagctgcagcaggagatggcacagcagagccgctccctgcagcaggcccagcagcagctggaggaggtgcggcagaaccggcagagggctgacgaggatgtggaggctgcccagagaaaactgcgccaggccagcaccaacgtgaaacactggaatgtccagatgaaccggctgatgcatccaattgagcctggagataagcgtccggtcaccagcagctccttctcaggcttccagccccctctgcttgcccaccgtgactcctccctaaagcgcctgacccgctggggatcccagggcaacaggaccccctcgcccaacagcaatgagcagcagaagtccctcaatggtggggatgaggctcctgccccggcttccacccctcaggaagataaactggatccagcaccagaaaattagcctctcttagccccttgttcttcccaatgtcatatccaccaggacctggccacagctggcctgtgggtgatcccagctcttactaggagagggagctgaggtcctggtgccaggggcccaggccctccaaccataaacagtccaggatggaacctggttcacccttcataccagctccaagccccagaccatgggagctgtctgggatgttgatccttgagaacttggccctgtgctttagacccaaggacccgattcttgggctaggaaagagagaacaagcaagccggggctacctgcccccaggtggccaccaagttgtggaagcacatttctaaataaaaactgctcttagaatgaa

SEQ ID NO: 211054 - DNA, 591 bp, Artificial Sequence
  derived and/or modified sequence
agtgtcagagccgcccccagccgggcgggcgcctcagccatggccctgcgcaaggaactgctcaagtccatctggtacgcctttaccgcgctggacgtggagaagagtggcaaagtctccaagtcccagctcaaggtgctgtcccacaacctgtacacggtcctgcacatcccccatgaccccgtggccctggaggaacacttccgagatgatgatgacggccctgtgtccagccagggatacatgccctacctcaacaagtacatcctggacaaggatgccttccgcctctggtgcctcttcaacttcctgtctgaggacaagtaccctctgatcatggttcctgatgaggtggaatacctgctgaaaaaggtactcagcagcatgagcttggaggtgagcttgggtgagctggaggagcttctggcccaggaggcccaggtggcccagaccaccggggggctcagcgtctggcagttcctggagctcttcaattcgggccgctgcctgcggggcgtgggccgggacaccctcagcatggccatccacgaggtctaccaggagctcatccaagatgtcctgaagcagggt

SEQ ID NO: 211055 - DNA, 387 bp, Artificial Sequence
  derived and/or modified sequence
ccgagatgatgatgacggccctgtgtccagccagggatacatgccctacctcaacaagtacatcctggacaaggatgccttccgcctctggtgcctcttcaacttcctgtctgaggacaagtaccctctgatcatggttcctgatgaggtggaatacctgctgaaaaaggtactcagcagcatgagcttggaggtgagcttgggtgagctggaggagcttctggcccaggaggcccaggtggcccagaccaccggggggctcagcgtctggcagttcctggagctcttcaattcgggccgctgcctgcggggcgtgggccgggacaccctcagcatggccatccacgaggtctaccaggagctcatccaagatgtcctgaagcaggg

SEQ ID NO: 211056 - DNA, 2006 bp, Artificial Sequence
  derived and/or modified sequence
agtgtcagagccgcccccagccgggcgggcgcctcagccatggccctgcgcaaggaactgctcaagtccatctggtacgcctttaccgcgctggacgtggagaagagtggcaaagtctccaagtcccagctcaaggtgctgtcccacaacctgtacacggtcctgcacatcccccatgaccccgtggccctggaggaacacttccgagatgatgatgacggccctgtgtccagccagggatacatgccctacctcaacaagtacatcctggacaaggtggaggagggggcttttgttaaagagcactttgatgagctgtgctggacgctgacggccaagaagaactatcgggcagatagcaacgggaacagtatgctctccaatcaggatgccttccgcctctggtgcctcttcaacttcctgtctgaggacaagtaccctctgatcatggttcctgatgagtagagacagcatttcaccgtgttggccaggctggtctcaaactcctgacctcagatgatctgcccacctcggcctcccaaagtgctgggattacaggtgctgccagaccgcgacggaaagcgctgcatgttctgtgtgaagacagccaaccgcacgtatgagatgagcgcctcagacacgcgccagcgccaggagtggacagctgccatccagatggcgatccggctgcaggccgaggggaagacgtccctacacaaggacctgaagcagaaacggcgcgagcagcgggagcagcgggagcggcgccgggcggccaaggaagaggagctgctgcggctgcagcagctgcaggaggagaaggagcggaagctgcaggagctggagctgctgcaggaggcgcagcggcaggccgagcggctgctgcaggaggaggaggaacggcgccgcagccagcaccgcgagctgcagcaggcgctcgagggccaactgcgcgaggcggagcaggcccgggcctccatgcaggctgagatggagctgaaggaggaggaggctgcccggcagcggcagcgcatcaaggagctggaggagatgcagcagcggttgcaggaggccctgcaactagaggtgaaagctcggcgagatgaagaatctgtgcgaatcgctcagaccagactgctggaagaggaggaagagaagctgaagcagttgatgcagctgaaggaggagcaggagcgctacatcgaacgggcgcagcaggagaaggaagagctgcagcaggagatggcacagcagagccgctccctgcagcaggcccagcagcagctggaggaggtgcggcagaaccggcagagggctgacgaggatgtggaggctgcccagagaaaactgcgccaggccagcaccaacgtgaaacactggaatgtccagatgaaccggctgatgcatccaattgagcctggagataagcgtccggtcaccagcagctccttctcaggcttccagccccctctgcttgcccaccgtgactcctccctaaagcgcctgacccgctggggatcccagggcaacaggaccccctcgcccaacagcaatgagcagcagaagtccctcaatggtggggatgaggctcctgccccggcttccacccctcaggaagataaactggatccagcaccagaaaattagcctctcttagccccttgttcttcccaatgtcatatccaccaggacctggccacagctggcctgtgggtgatcccagctcttactaggagagggagctgaggtcctggtgccaggggcccaggccctccaaccataaacagtccaggatggaacctggttcacccttcataccagctccaagccccagaccatgggagctgtctgggatgttgatccttgagaacttggccctgtgctttagacccaaggacccgattcttgggctaggaaagagagaacaagcaagccggggctacctgcccccaggtggccaccaagttgtggaagcacatttctaaataaaaactgctcttagaatg

SEQ ID NO: 211057 - protein, 426 aa, Artificial Sequence
  derived and/or modified sequence
MANDSGGPGGPSPSERDRQYCELCGKMENLLRCSRCRSSFYCCKEHQRQDWKKHKLVCQGSEGALGHGVGPHQHSGPAPPAAVPPPRAGAREPRKAAARRDNASGDAAKGKVKAKPPADPAAAASPCRAAAGGQGSAVAAEAEPGKEEPPARSSLFQEKANLYPPSNTPGDALSPGGGLRPNGQTKPLPALKLALEYIVPCMNKHGICVVDDFLGKETGQQIGDEVRALHDTGKFTDGQLVSQKSDSSKDIRGDKITWIEGKEPGCETIGLLMSSMDDLIRHCNGKLGSYKINGRTKAMVACYPGNGTGYVRHVDNPNGDGRCVTCIYYLNKDWDAKVSGGILRIFPEGKAQFADIEPKFDRLLFFWSDRRNPHEVQPAYATRYAITVWYFDADERARAKVKYLTGEKGVRVELNKPSDSVGKDVF

SEQ ID NO: 211058 - DNA, 7102 bp, Artificial Sequence
  derived and/or modified sequence
ttaggggcagaaaaacatttgtaataattaatggctttgagagacacaaggctttgtttgccccagagtattagttaacccacctagtgctcctaatcatacaatattaaggattgggagggacattcattgcctcactctctatttgtttcaccttctgtaaaattggtagaataatagtacccacttcatagcattgtatgatgattaaattggttaatatttttaaaatgcttagaacacagattgggcacataacagcaagcaccacatgtgtttataagataaattcctttgtgttgccttccgttaaagtttaaataagtaaataaataaataaatacttgcatgacattttgaagtctctctataacatctgagtaagtggcggctgcgacaatgctactggagttccagaatcgtgttggtgacaagattgttcaccagcatatggtgtggtgaaaactcactaatttggaattagttcagattattaagcctgaataggtgaaaatcctgaaatcaaggatctttggaactatttgaaatcagtattttatattttcctgttgtattcattaaagtgttgcaagtgttctatttgatggattaagtatatttaggatatacatgttcaatttgtgattttgtatacttaattggaacaagaaagctaataaaggttttgatatggacatctattcttttaagtaaacttcaatgaaaatatatgagtagagcatatagagatgtaaataatttgtggacacaccacagactgaaatagcaaatttaaaagaaattgttggaagaatcaagtgtttgtggaatgagtcctcctagtaaagttcctgctcttgtgaataattaagcctcatgtataattactatagcaaaaggaagcctaagaagtattagactctacttgtatttaaattacattttacataatttatgtgtatgaaaaatgttttaaatgcttattttcgtaagccatgagatagctcctttatattttaagaatttctgaattaatttgcttggattttattagtgcaaatggcagagctagcaattcctttttctgtgttcccattccatcctattcatccctcttttaggaaactctgaactctggattgtccttgtttacatacctgcctcctgcattggactatgtgtctctgagtgtagtatgactaattcatttgtttgtcaaggactctcaatgcatttgttgaacagcctaattagtaatgtctgcaacaatgacattttactgtatttaataaagctctgggaaagtaggatacacataagacaggtctaggtctaaattctttacagaaacttggatttttagttcggtttgaaatttgaagatgtgagtatatttatctcagtttcccaaaggacaagctaattggaattatcatcctctttcacttgattggatccccagaatgccatttacgcatgcagcaggattttataacagttttaaattctgtatatttgatgaagaggttttatatttttggattcaagcctctttttaaacttctacaatatggtttacaataattccttatatcctgcttttgaaatacatattacaactttttaagtttggaaggctatatttcaaggactgaagttacagtatactcaagtgatacacaagcctagcaccccactttccacatagtgttcgataaagattgataaactcgaaatcacagaccttttaattcttaagacaaatagcagcagaaagaaacatctttggcttatttctggtaaggtttttatgctctgtaaaacaaagaattgtattcatccgcgcagcacagattctattaaaaataaatgtgagagtcgttaatgtagtactgctcatttaccatcaaaattcacttttcaggaataatcccatcagtttaaattggatattggaatgagcattgattacatttaacttggtagcccaaaatttcttcatggggttttgaactcggcgggatttcaaaggttttaaaaatgagtttttgattttttttaaaaccctcaaatttcattacctttaaactaggtcgaaacggggcgcaagagattggattaacaccatagtaatacttattttgttcttaaccatttcagggcttcttgaaatagaggctgtatggtgtaatggaaaaaacagccttggaatctgggagcctgattcctggattcagtcccagttttgcgtgaccttgggcaagttactttacttctctgaatttccgtttcctcctctgcaaaatgaggatcgcaatagccaccttgcaaccttgactggagcgagcctcgcacaccccgcgccggcctggaggaagagcagccatgattacgccgccttcgctccgctacccgcttgcggctggcgccctcctccagcaggtgtaggcgctgccgcgctgccccacgcctttccgccgctcgcgggcctgcgcctcggcgtccccgaggaggccgctgcgggctgaggtagcgcaccggcctctcggcgtcccagtccggtcccgggcggagggaaagcgggcgacccacctccgaggcagaagccgaggcccggccccgccgagtgcggaggagcgcaggcagcccccgcccctcggccctccccccggccctcccggccctccctccgccccctccgccctcgcgcgccgcccgcccgggtcgccgcggggccgtggtgtacgtgcagagcgcgcagagcgagtggcgcccgtatgccctgcgctcctccacagcctgggccgggccgcccgggacgctgaggcggcggcggcggccgagggggccggtcttgcgctccccaggcccgcgcgcctgagcccaggttgccattcgccgcacaggccctattctctcagccctcggcggcgatgaggcgctgaggcggctgccggcgctgcgccggagcttaggactcggaagcggccgggccgagggcgtggggtgccggcctccctgaggcgagggtagcgggtgcatggcgcagtaacggcccctatctctctccccgctccccagcctcgggcgaggccgtccggccgctacccctcctgctcggccgccgcagtcgccgtcgccgccgccgccgccgccatggccaatgacagcggcgggcccggcgggccgagcccgagcgagcgagaccggcagtactgcgagctgtgcgggaagatggagaacctgctgcgctgcagccgctgccgcagctccttctactgctgcaaggagcaccagcgtcaggactggaagaagcacaagctcgtgtgccagggcagcgagggcgccctcggccacggagtgggcccacaccagcattccggccccgcgccgccggctgcagtgccgccgcccagggccggggcccgggagcccaggaaggcagcggcgcgccgggacaacgcctccggggacgcggccaagggaaaagtaaaggccaagcccccggccgacccagcggcggccgcgtcgccgtgtcgtgcggccgccggcggccagggctcggcggtggctgccgaagccgagcccggcaaggaggagccgccggcccgctcatcgctgttccaggagaaggcgaacctgtaccccccaagcaacacgcccggggatgcgctgagccccggcggcggcctgcggcccaacgggcagacgaagcccctgccggcgctgaagctggcgctcgagtacatcgtgccgtgcatgaacaagcacggcatctgtgtggtggacgacttcctcggcaaggagaccggacagcagatcggcgacgaggtgcgcgccctgcacgacaccgggaagttcacggacgggcagctggtcagccagaagagtgactcgtccaaggacatccgaggcgataagatcacctggatcgagggcaaggagcccggctgcgaaaccattgggctgctcatgagcagcatggacgacctgatacgccactgtaacgggaagctgggcagctacaaaatcaatggccggacgaaagccatggttgcttgttatccgggcaatggaacgggttatgtacgtcatgttgataatccaaatggagatggaagatgtgtgacatgtatatattatcttaataaagactgggatgccaaggtaagtggaggtatacttcgaatttttccagaaggcaaagcccagtttgctgacattgaacccaaatttgatagactgctgtttttctggtctgaccgtcgcaaccctcatgaagtacaaccagcatatgctacaaggtacgcaataactgtttggtattttgatgcagatgagagagcacgagctaaagtaaaatatctaacaggtgaaaaaggtgtgagggttgaactcaataaaccttcagattcggtcggtaaagacgtcttctagagcctttgatccagcaataccccacttcacctacaatattgttaactatttgttaacttgtgaatacgaataaatgggataaagaaaaatagacaaccagttcgcattttaataaggaaacagaaacaactttttgtgttgcatcaaacagaagattttgactgctgtgactttgtactgcatgatcaacttcaaatctgtgattgcttacaggaggaagataagctactaattgaaaatggtttttacatctggatatgaaataagtgccctgtgtagaatttttttcattcttatattttgccagatctgttatctagctgagttcatttcatctctcccttttttatatcaagtttgaatttgggataatttttctatattaggtacaatttatctaaactgaattgagaaaaaattacagtattattcctcaaaataacatcaatctatttttgtaaacctgttcatactattaaattttgccctaaaagacctcttaataatgattgttgccagtgactgatgattaattttattttacttaaaataagaaaaggagcactttaattacaactgaaaaatcagattgttttgtagtccttccttacactaatttgaactgttaaagattgctgctttttttttgacattgtcaataacgaaacctaattgtaaaacagtcaccatttactaccaataacttttagttaatgttttacaaggaaaaagacacaagaagagtttaaatttttttgttttgttttgtttttttgagacagtcttgctctgttacccaggctggaggggagtggtgcattcttggctcactgcaacctccgcctcccaggttcaagcaatcctcccacctcagcctcccaactagctgggactgcaggcacacaccaccatgcctgactaatttttgtatgtttagtagagacggggttttgccatgttgcctaggctggggtttaagttaaattttttaaaaaactaaagtgactggcactaagtgaacttgagattatcctcagcttcaagttcctaagataagggctttcttaagctttcaggtgtatgtatcctctagatgtagacaataatgtcccatttctaagtcttttccttttgcttctccttaaattgattgtacttccaaatttgctgttatgtttttttcctaatactgtgatctatctgatctgcagacaagaaccttgtctctgttgaagagcatcaaggggagattatgtacacattgaaactgaagtgtggtgttactgacggaatgtgcagtaactcctcagatatctgttaaggcatttcccagatgtgatgccagccttcttacctgtactgaaagatgcttagcttagaaaaaaacaaaacagatgcaaaatcagataattttattttgtttcatgggttttcttatttactttttaaacaaggaaggaatattagaaaatcacacaaggcctcacatacatgttatttaaagaatgaattgggacggatgtcttagacttcactttcctaggctttttagcaaaacctaaagggtggtatccatattttgcgtgaattatgggtgtaagaccttgcccacttaggttttctatctctgtccttgatcttctttgccaaaatgtgagtatacagaaattttctgtatatttcaacttaagacatttttagcatctgtatagtttgtattcaatttgagaccttttctatgggaagctcagtaatttttattaaaagattgccattgctattcatgtaaaacatggaaaaaaattgtgtagtgaagccaacagtggacttaggatgggattgaatgttcagtatagtgatctcacttaggagaatttgcaggagaaagtgatagtttattgttttttcctcgcccatattcagttttgttctacttcctccccttccttccagatgataacatcacatctctacagtaagtgcctctgccagcccaacccaggagcgcaagttgtctttgccatctggtctatagtacagtgcgcggcgttaggccacaactcaaaagcattatcttttttagggttagtagaaattgttttatgttgatgggaggtttgtttgattgtcaaaatgtacagccacagccttttaatttgggagcccctgttgtcattcaaatgtgtacctctacagttgtaaaaagtattagattctactatctgtgggttgtgcttgccagacaggtcttaaattgtatattttttggaaaagtttatatactctcttaggaatcattgtgaaaagatcaagaaatcaggatggccatttatttaatatccattcatttcatgttagtgggactattaacttgtcaccaagcaggactctatttcaaacaaaatttaaaactgtttgtggcctatatgtgtttaatcctggttaaagataaagcttcataatgctgtttttattcaacacattaaccagctgtaaaacacagacctttatcaagagtaggcaaagattttcaggattcatatacagatagactataaagtcatgtaatttgaaaagcagtgtttcattatgaaagagctctcaagttgcttgtaaagctaatctaattaaaaagatgtataaatgttgttgaaacattaaaaaa

SEQ ID NO: 211059 - DNA, 1281 bp, Artificial Sequence
  derived and/or modified sequence
atggcaaatgactctgggggacccggagggccaagcccttctgagagggaccgccagtactgtgaattatgcggtaaaatggaaaacctcttgcggtgtagccgctgtcgctcatctttctactgttgcaaagaacatcaaagacaagattggaagaaacataaactggtgtgtcagggcagtgagggggcgctcgggcatggagttggccctcaccaacattcaggaccggctcctccagccgctgtccccccaccaagagccggggcaagagagccccgaaaggctgcagcacgtcgcgacaatgcatcaggagatgctgcgaaaggcaaggtgaaggcgaaaccccccgccgaccccgccgcagccgcctcaccttgtagggcggccgcaggagggcagggttcggccgtggctgccgaagctgagccaggcaaggaggagccacccgcgcgtagttctctgtttcaggaaaaggctaacctatatccgccctccaacactccgggcgacgccttatctccagggggaggcctgcgtcccaatggtcagaccaaacccttgcccgccctaaagttggcactcgagtatatcgtcccctgtatgaataagcatgggatctgtgtggtggatgacttcctaggcaaagagacaggacagcaaattggagatgaggtgcgcgcattgcacgataccggaaagttcaccgacggacagctggtgagccagaagtctgattcaagtaaggatatacgtggagacaaaataacctggattgagggcaaggaaccaggctgtgaaaccatcggactgctgatgagcagcatggacgacctcattcgacactgcaacgggaagctgggatcttacaagatcaatggtcggaccaaggctatggtagcgtgctacccaggcaacggtacaggttatgtgcggcatgtggacaaccccaatggtgatgggcgttgtgtaacgtgcatttactacctaaataaagattgggacgctaaggttagcggaggaatacttaggatctttcccgaaggcaaagcacagtttgctgatattgagccgaaattcgaccggcttttgtttttttggagtgaccgtaggaatccccacgaagttcaaccagcctatgccacacgttatgccatcaccgtctggtacttcgatgctgacgagcgagctcgtgctaaagttaagtatctaaccggcgagaaaggagtccgcgtggagcttaacaaaccatctgattccgtaggaaaggatgtcttctag

SEQ ID NO: 211060 - DNA, 1281 bp, Artificial Sequence
  derived and/or modified sequence
atggccaatgattctgggggccctgggggccccagccccagcgagcgggaccggcagtactgtgagctgtgtgggaagatggagaacctgctgcgctgcagccgctgccgcagcagcttctactgctgcaaggagcaccagaggcaggactggaagaagcacaagctggtgtgccagggcagcgagggcgccctgggccatggagtgggcccccaccagcacagcggccctgcccctcctgctgctgtgcccccaccccgggccggggcccgggagcccaggaaggctgctgcccggcgggacaatgccagcggagatgctgccaagggcaaggtgaaggccaagcccccagctgaccctgctgctgctgccagcccctgcagagctgctgctgggggccagggcagcgctgtggccgctgaggccgagcccgggaaggaggagcccccagcccggagcagcctcttccaggagaaggccaacctgtacccacccagcaacaccccaggagatgccctgagccctgggggcggcctgcggcccaacggccagaccaagcccctgcctgccctgaagctggccctggagtacatcgtgccctgcatgaacaagcacggcatctgtgtggtggatgacttcctgggcaaggagaccggccagcagattggagatgaggtgcgggccctgcatgacaccgggaagttcacagatggccagctggtgtcccagaagagtgacagcagcaaggacatccggggggacaagatcacctggattgagggcaaggagcccggctgtgagaccatcggcctgctgatgagctccatggatgacctgatccgccactgcaatggcaagctgggcagctacaagatcaatggaagaaccaaggccatggtggcctgctacccaggaaatggcaccggctacgtgagacatgtggacaaccccaatggagatggccgctgtgtgacctgcatctactacctgaacaaggactgggatgccaaggtgtctgggggcatcctgcgcatcttccctgagggcaaggcccagtttgctgacatcgagcccaagtttgaccggctgctcttcttctggagcgacagaagaaacccccatgaggtgcagcctgcctatgccaccaggtatgccatcaccgtgtggtactttgatgctgatgagcgggcccgggccaaggtgaagtacctgactggagagaagggcgtgcgggtggagctgaacaagcccagcgacagcgtgggcaaggatgtgttctag

SEQ ID NO: 211061 - DNA, 1281 bp, Artificial Sequence
  derived and/or modified sequence
atggccaacgacagcggcggccccggcggccccagccccagcgagcgcgaccgtcagtactgtgaactgtgtggaaagatggagaatctgctgcgctgctctcggtgtcggagcagcttctattgctgcaaagaacaccagaggcaggattggaaaaaacacaagctggtgtgccaaggttctgaaggagccctgggccacggcgtcggccctcaccagcacagcggacctgctccccctgctgccgtgccccctccacgggctggcgcacgcgaaccccgcaaagcagcggccagacgtgacaatgcatctggagacgctgccaaagggaaggtgaaggcaaaaccccctgccgatcccgccgcagccgcctccccttgtcgggctgctgcgggtggtcagggttccgccgtggccgccgaagctgagccggggaaggaagagccacctgcccggtcatcgcttttccaagaaaaagctaacctgtacccaccttccaatactccaggcgatgcgctgtctcccggcggcgggctgaggcctaacggtcagactaaaccattacctgcactgaagctggcactagagtacattgttccctgtatgaacaagcatggtatttgtgtggtggacgatttcctcggcaaagaaactggtcagcagatcggcgatgaggtgcgcgcgctgcatgacacaggaaagttcaccgatgggcaacttgtgtcccagaaaagcgattcctccaaagatattaggggggataagattacatggatcgagggcaaggagccagggtgtgagactatcggtctgctgatgagtagcatggatgatctgatacgtcactgtaacggtaaactggggtcttacaaaatcaatggcagaacaaaagccatggtcgcatgttatccgggaaatggcaccgggtacgtgcggcatgtagataatcccaacggtgacggtcgatgtgtcacctgcatatactacctgaataaggattgggatgccaaagtgagcggtggcattctgaggatctttcccgagggaaaggctcaattcgctgatattgagccaaagtttgatagattgctgttcttttggtccgatcgacgaaaccctcacgaggtacagcctgcgtacgctacaagatatgcaattacagtttggtacttcgacgctgacgaaagagcccgagccaaagtaaagtacctgacaggagagaaaggagtgagggtggaattaaacaagcccagcgatagcgtcggtaaggacgtgttttag

SEQ ID NO: 211062 - DNA, 1281 bp, Artificial Sequence
  derived and/or modified sequence
atggctaacgactcaggtggacccggaggaccatcaccttccgaaagggatagacagtactgcgagctgtgcggcaaaatggaaaaccttttaaggtgcagccgatgtcgctcgtctttctactgctgcaaggagcaccaaaggcaggattggaagaaacacaagctggtgtgtcaaggatcagaaggtgccctggggcatggagtcggtcctcatcagcactctggccctgcacctcctgctgctgtcccacctccgagggcaggcgctcgggaaccaagaaaagccgcagctcgcagagataatgcctccggagatgccgcaaagggcaaggtgaaagctaaaccacccgctgaccccgcagccgcagccagtccttgtagagctgctgccggtggacaggggtctgcagtagcggcagaagcagaaccaggaaaagaggagcccccagcacggtcctctcttttccaggaaaaggctaacctctatcccccatccaatacccctggagacgcacttagccctggcggagggctccgaccaaacggccagacaaagccgcttcccgcattaaaactggccctcgagtacatcgtgccttgcatgaacaaacacggcatttgcgtcgtcgacgactttctgggcaaggagaccggacagcagataggcgacgaggttcgggctctacacgataccggtaagttcaccgacgggcagttggtttcgcagaagtcagacagcagcaaggatatacggggagacaaaattacttggatcgaagggaaagagcctggttgtgagaccattggcctcctgatgtcatccatggatgacctaatcagacactgtaatggaaagttgggatcctacaagatcaatggacggactaaggctatggtcgcgtgttatccgggaaacggaactggctacgttaggcatgtagacaacccgaatggagatggcagatgcgtgacctgcatctattacctgaataaggactgggacgctaaagtttctggcggaattctgcgaatctttcccgaaggcaaagcccagtttgctgatatagaaccaaagttcgatcgattgttgttcttttggtccgacagacggaatcctcacgaggttcagcccgcttacgccacacggtacgcaattactgtgtggtactttgatgctgacgaacgtgctcgagccaaagtgaagtatctgactggcgagaaaggtgtccgagtggaactcaataagccatccgattctgtggggaaggacgtcttctag

SEQ ID NO: 211063 - DNA, 1281 bp, Artificial Sequence
  derived and/or modified sequence
atggccaacgacagcggcggccccggcggccccagccccagcgagagagacagacagtactgcgagctgtgcggcaagatggagaacctgctgagatgcagcagatgcagaagcagcttctactgctgcaaggagcaccagagacaggactggaagaagcacaagctggtgtgccagggcagcgagggcgccctgggccacggcgtgggcccccaccagcacagcggccccgccccccccgccgccgtgcccccccccagagccggcgccagagagcccagaaaggccgccgccagaagagacaacgccagcggcgacgccgccaagggcaaggtgaaggccaagccccccgccgaccccgccgccgccgccagcccctgcagagccgccgccggcggccagggcagcgccgtggccgccgaggccgagcccggcaaggaggagccccccgccagaagcagcctgttccaggagaaggccaacctgtacccccccagcaacacccccggcgacgccctgagccccggcggcggcctgagacccaacggccagaccaagcccctgcccgccctgaagctggccctggagtacatcgtgccctgcatgaacaagcacggcatctgcgtggtggacgacttcctgggcaaggagaccggccagcagatcggcgacgaggtgagagccctgcacgacaccggcaagttcaccgacggccagctggtgagccagaagagcgacagcagcaaggacatcagaggcgacaagatcacctggatcgagggcaaggagcccggctgcgagaccatcggcctgctgatgagcagcatggacgacctgatcagacactgcaacggcaagctgggcagctacaagatcaacggcagaaccaaggccatggtggcctgctaccccggcaacggcaccggctacgtgagacacgtggacaaccccaacggcgacggcagatgcgtgacctgcatctactacctgaacaaggactgggacgccaaggtgagcggcggcatcctgagaatcttccccgagggcaaggcccagttcgccgacatcgagcccaagttcgacagactgctgttcttctggagcgacagaagaaacccccacgaggtgcagcccgcctacgccaccagatacgccatcaccgtgtggtacttcgacgccgacgagagagccagagccaaggtgaagtacctgaccggcgagaagggcgtgagagtggagctgaacaagcccagcgacagcgtgggcaaggacgtgttctag

SEQ ID NO: 211064 - DNA, 7097 bp, Artificial Sequence
  derived and/or modified sequence
ttaggggcagaaaaacatttgtaataattaatggctttgagagacacaaggctttgtttgccccagagtattagttaacccacctagtgctcctaatcatacaatattaaggattgggagggacattcattgcctcactctctatttgtttcaccttctgtaaaattggtagaataatagtacccacttcatagcattgtatgatgattaaattggttaatatttttaaaatgcttagaacacagattgggcacataacagcaagcaccacatgtgtttataagataaattcctttgtgttgccttccgttaaagtttaaataagtaaataaataaataaatacttgcatgacattttgaagtctctctataacatctgagtaagtggcggctgcgacaatgctactggagttccagaatcgtgttggtgacaagattgttcaccagcatatggtgtggtgaaaactcactaatttggaattagttcagattattaagcctgaataggtgaaaatcctgaaatcaaggatctttggaactatttgaaatcagtattttatattttcctgttgtattcattaaagtgttgcaagtgttctatttgatggattaagtatatttaggatatacatgttcaatttgtgattttgtatacttaattggaacaagaaagctaataaaggttttgatatggacatctattcttttaagtaaacttcaatgaaaatatatgagtagagcatatagagatgtaaataatttgtggacacaccacagactgaaatagcaaatttaaaagaaattgttggaagaatcaagtgtttgtggaatgagtcctcctagtaaagttcctgctcttgtgaataattaagcctcatgtataattactatagcaaaaggaagcctaagaagtattagactctacttgtatttaaattacattttacataatttatgtgtatgaaaaatgttttaaatgcttattttcgtaagccatgagatagctcctttatattttaagaatttctgaattaatttgcttggattttattagtgcaaatggcagagctagcaattcctttttctgtgttcccattccatcctattcatccctcttttaggaaactctgaactctggattgtccttgtttacatacctgcctcctgcattggactatgtgtctctgagtgtagtatgactaattcatttgtttgtcaaggactctcaatgcatttgttgaacagcctaattagtaatgtctgcaacaatgacattttactgtatttaataaagctctgggaaagtaggatacacataagacaggtctaggtctaaattctttacagaaacttggatttttagttcggtttgaaatttgaagatgtgagtatatttatctcagtttcccaaaggacaagctaattggaattatcatcctctttcacttgattggatccccagaatgccatttacgcatgcagcaggattttataacagttttaaattctgtatatttgatgaagaggttttatatttttggattcaagcctctttttaaacttctacaatatggtttacaataattccttatatcctgcttttgaaatacatattacaactttttaagtttggaaggctatatttcaaggactgaagttacagtatactcaagtgatacacaagcctagcaccccactttccacatagtgttcgataaagattgataaactcgaaatcacagaccttttaattcttaagacaaatagcagcagaaagaaacatctttggcttatttctggtaaggtttttatgctctgtaaaacaaagaattgtattcatccgcgcagcacagattctattaaaaataaatgtgagagtcgttaatgtagtactgctcatttaccatcaaaattcacttttcaggaataatcccatcagtttaaattggatattggaatgagcattgattacatttaacttggtagcccaaaatttcttcatggggttttgaactcggcgggatttcaaaggttttaaaaatgagtttttgattttttttaaaaccctcaaatttcattacctttaaactaggtcgaaacggggcgcaagagattggattaacaccatagtaatacttattttgttcttaaccatttcagggcttcttgaaatagaggctgtatggtgtaatggaaaaaacagccttggaatctgggagcctgattcctggattcagtcccagttttgcgtgaccttgggcaagttactttacttctctgaatttccgtttcctcctctgcaaaatgaggatcgcaatagccaccttgcaaccttgactggagcgagcctcgcacaccccgcgccggcctggaggaagagcagccatgattacgccgccttcgctccgctacccgcttgcggctggcgccctcctccagcaggtgtaggcgctgccgcgctgccccacgcctttccgccgctcgcgggcctgcgcctcggcgtccccgaggaggccgctgcgggctgaggtagcgcaccggcctctcggcgtcccagtccggtcccgggcggagggaaagcgggcgacccacctccgaggcagaagccgaggcccggccccgccgagtgcggaggagcgcaggcagcccccgcccctcggccctccccccggccctcccggccctccctccgccccctccgccctcgcgcgccgcccgcccgggtcgccgcggggccgtggtgtacgtgcagagcgcgcagagcgagtggcgcccgtatgccctgcgctcctccacagcctgggccgggccgcccgggacgctgaggcggcggcggcggccgagggggccggtcttgcgctccccaggcccgcgcgcctgagcccaggttgccattcgccgcacaggccctattctctcagccctcggcggcgatgaggcgctgaggcggctgccggcgctgcgccggagcttaggactcggaagcggccgggccgagggcgtggggtgccggcctccctgaggcgagggtagcgggtgcatggcgcagtaacggcccctatctctctccccgctccccagcctcgggcgaggccgtccggccgctacccctcctgctcggccgccgcagtcgccgtcgccgccgccgccgccgccatggccaatgacagcggcgggcccggcgggccgagcccgagcgagcgagaccggcagtactgcgagctgtgcgggaagatggagaacctgctgcgctgcagccgctgccgcagctccttctactgctgcaaggagcaccagcgtcaggactggaagaagcacaagctcgtgtgccagggcagcgagggcgccctcggccacggagtgggcccacaccagcattccggccccgcgccgccggctgcagtgccgccgcccagggccggggcccgggagcccaggaaggcagcggcgcgccgggacaacgcctccggggacgcggccaagggaaaagtaaaggccaagcccccggccgacccagcggcggccgcgtcgccgtgtcgtgcggccgccggcggccagggctcggcggtggctgccgaagccgagcccggcaaggaggagccgccggcccgctcatcgctgttccaggagaaggcgaacctgtaccccccaagcaacacgcccggggatgcgctgagccccggcggcggcctgcggcccaacgggcagacgaagcccctgccggcgctgaagctggcgctcgagtacatcgtgccgtgcatgaacaagcacggcatctgtgtggtggacgacttcctcggcaaggagaccggacagcagatcggcgacgaggtgcgcgccctgcacgacaccgggaagttcacggacgggcagctggtcagccagaagagtgactcgtccaaggacatccgaggcgataagatcacctggatcgagggcaaggagcccggctgcgaaaccattgggctgctcatgagcagcatggacgacctgatacgccactgtaacgggaagctgggcagctacaaaatcaatggccggacgaaagccatggttgcttgttatccgggcaatggaacgggttatgtacgtcatgttgataatccaaatggagatggaagatgtgtgacatgtatatattatcttaataaagactgggatgccaaggtaagtggaggtatacttcgaatttttccagaaggcaaagcccagtttgctgacattgaacccaaatttgatagactgctgtttttctggtctgaccgtcgcaaccctcatgaagtacaaccagcatatgctacaaggtacgcaataactgtttggtattttgatgcagatgagagagcacgagctaaagtaaaatatctaacaggtgaaaaaggtgtgagggttgaactcaataaaccttcagattcggtcggtaaagacgtcttctagagcctttgatccagcaataccccacttcacctacaatattgttaactatttgttaacttgtgaatacgaataaatgggataaagaaaaatagacaaccagttcgcattttaataaggaaacagaaacaactttttgtgttgcatcaaacagaagattttgactgctgtgactttgtactgcatgatcaacttcaaatctgtgattgcttacaggaggaagataagctactaattgaaaatggtttttacatctggatatgaaataagtgccctgtgtagaatttttttcattcttatattttgccagatctgttatctagctgagttcatttcatctctcccttttttatatcaagtttgaatttgggataatttttctatattaggtacaatttatctaaactgaattgagaaaaaattacagtattattcctcaaaataacatcaatctatttttgtaaacctgttcatactattaaattttgccctaaaagacctcttaataatgattgttgccagtgactgatgattaattttattttacttaaaataagaaaaggagcactttaattacaactgaaaaatcagattgttttgtagtccttccttacactaatttgaactgttaaagattgctgctttttttttgacattgtcaataacgaaacctaattgtaaaacagtcaccatttactaccaataacttttagttaatgttttacaaggaaaaagacacaagaagagtttaaatttttttgttttgttttgtttttttgagacagtcttgctctgttacccaggctggaggggagtggtgcattcttggctcactgcaacctccgcctcccaggttcaagcaatcctcccacctcagcctcccaactagctgggactgcaggcacacaccaccatgcctgactaatttttgtatgtttagtagagacggggttttgccatgttgcctaggctggggtttaagttaaattttttaaaaaactaaagtgactggcactaagtgaacttgagattatcctcagcttcaagttcctaagataagggctttcttaagctttcaggtgtatgtatcctctagatgtagacaataatgtcccatttctaagtcttttccttttgcttctccttaaattgattgtacttccaaatttgctgttatgtttttttcctaatactgtgatctatctgatctgcagacaagaaccttgtctctgttgaagagcatcaaggggagattatgtacacattgaaactgaagtgtggtgttactgacggaatgtgcagtaactcctcagatatctgttaaggcatttcccagatgtgatgccagccttcttacctgtactgaaagatgcttagcttagaaaaaaacaaaacagatgcaaaatcagataattttattttgtttcatgggttttcttatttactttttaaacaaggaaggaatattagaaaatcacacaaggcctcacatacatgttatttaaagaatgaattgggacggatgtcttagacttcactttcctaggctttttagcaaaacctaaagggtggtatccatattttgcgtgaattatgggtgtaagaccttgcccacttaggttttctatctctgtccttgatcttctttgccaaaatgtgagtatacagaaattttctgtatatttcaacttaagacatttttagcatctgtatagtttgtattcaatttgagaccttttctatgggaagctcagtaatttttattaaaagattgccattgctattcatgtaaaacatggaaaaaaattgtgtagtgaagccaacagtggacttaggatgggattgaatgttcagtatagtgatctcacttaggagaatttgcaggagaaagtgatagtttattgttttttcctcgcccatattcagttttgttctacttcctccccttccttccagatgataacatcacatctctacagtaagtgcctctgccagcccaacccaggagcgcaagttgtctttgccatctggtctatagtacagtgcgcggcgttaggccacaactcaaaagcattatcttttttagggttagtagaaattgttttatgttgatgggaggtttgtttgattgtcaaaatgtacagccacagccttttaatttgggagcccctgttgtcattcaaatgtgtacctctacagttgtaaaaagtattagattctactatctgtgggttgtgcttgccagacaggtcttaaattgtatattttttggaaaagtttatatactctcttaggaatcattgtgaaaagatcaagaaatcaggatggccatttatttaatatccattcatttcatgttagtgggactattaacttgtcaccaagcaggactctatttcaaacaaaatttaaaactgtttgtggcctatatgtgtttaatcctggttaaagataaagcttcataatgctgtttttattcaacacattaaccagctgtaaaacacagacctttatcaagagtaggcaaagattttcaggattcatatacagatagactataaagtcatgtaatttgaaaagcagtgtttcattatgaaagagctctcaagttgcttgtaaagctaatctaattaaaaagatgtataaatgttgttgaaacatta

SEQ ID NO: 211065 - protein, 531 aa, Artificial Sequence
  derived and/or modified sequence
MSLPSGHTTGHTDQVVQRRARCWDIYQRRFSSRSEPVNPGMHSSSHQQQDGDAAMHGAHMDSPVRYTPYTISPYNRKGSFRKQDQTHVNMEREQKPPERRMEGNMPDGTLGSWFKITVPFGIKYNEKWLLNLIQNECSVPFVPVEFHYENMHASFFVENASIAYALKNVSGKIWDEDNEKISIFVNPAGIPHFVHRELKSEKVEQIKLAMNQQCDVSQEALDIQRLPFYPDMVNRDTKMASNPRKCMAASLDVHEENIPTVMSAGEMDKWKGIEPGEKCADRSPVCTTFSDTSSNINSILELFPKLLCLDGQQSPRATLCGTEAHKRLPTCKGSFFGSEMLKNLVLQFLQQYYLIYDSGDRQGLLSAYHDEACFSLSIPFNPEDSAPSSFCKFFKDSRNIKILKDPYLRGELLKHTKLDIVDSLSALPKTQHDLSSFLVDMWYQTEWMLCFSVNGVFKEVEGQSQGSVLAFTRTFIATPGSSSSLCIVNDKLFVRDTSHQGTQSALFTLVPTAFSSSVPAFSQEQQKMLPS

SEQ ID NO: 211066 - protein, 233 aa, Artificial Sequence
  derived and/or modified sequence
MEREQKPPERRMEGNMPDGTLGSWFKITVPFGIKYNEKWLLNLIQNECSVPFVPVEFHYENMHASFFVENASIAYALKNVSGKIWDEDNEKISIFVNPAGIPHFVHRELKSEKVEQIKLAMNQQCDVSQEALDIQRLPFYPDMVNRDTKMASNPRKCMAASLDVHEENIPTVMSAGEMDKWKGIEPGEKCADRSPVCTTFSDTSSNIKSVVPSVTTWDPDLCLIAPFCRRRQH

SEQ ID NO: 211067 - protein, 203 aa, Artificial Sequence
  derived and/or modified sequence
MASSHPEQLYVVLKPTRGYQPVRYYLIYDSGDRQGLLSAYHDEACFSLSIPFNPEDSAPSSFCKFFKDSRNIKILKDPYLRGELLKHTKLDIVDSLSALPKTQHDLSSFLVDMWYQTEWMLCFSVNGVFKEVEGQSQGSVLAFTRTFIATPGSSSSLCIVNDKLFVRDTSHQGTQSALFTLVPTAFSSSVPAFSQEQQKMLPS

SEQ ID NO: 211068 - protein, 361 aa, Artificial Sequence
  derived and/or modified sequence
  misc_feature (1)..(1): Xaa can be any naturally occurring amino acid
XNEKWLLNLIQNECSVPFVPVEFHYENMHASFFVENASIAYALKNVSGKIWDEDNEKISIFVNPAGIPHFVHRELKSEKVEQIKLAMNQQCDVSQEALDIQRLPFYPDMVNRDTKMASNPRKCMAASLDVHEENIPTVMSAGEMDKWKGIEPGEKCADRSPVCTTFSDTSSNINSILELFPKLLCLDGQQSPRATLCGTEAHKRLPTCKGSFFGSEMLKNLVLQFLQQYYLIYDSGDRQGLLSAYHDEACFSLSIPFNPEDSAPSSFCKFFKDSRNIKILKDPYLRGELLKHTKLDIVDSLSALPKTQHDLSSFLVDMWYQTEWMLCFSVNGVFKEVSGFCSRLHPDLHCYPWQQFQSVHR

SEQ ID NO: 211069 - DNA, 1596 bp, Artificial Sequence
  derived and/or modified sequence
atgagtctcccaagcggacatacaactgggcacacggaccaagttgtgcagagaagagccaggtgttgggatatttaccaacgccgcttttccagtcgatccgagcccgtaaatcccggcatgcattcttccagtcaccaacagcaggacggtgatgctgcaatgcatggcgctcacatggattcacccgtgagatataccccctataccattagcccctacaaccgtaaaggtagcttccggaaacaagaccaaactcacgtgaacatggagagggaacaaaagcctcccgagagaaggatggagggcaatatgccagacgggacgcttgggagttggttcaagatcacagtaccgtttgggatcaaatacaacgaaaagtggctcttgaatcttattcaaaacgaatgcagtgtgccgttcgtgccagtggaatttcactacgagaacatgcacgcttctttcttcgtcgaaaatgcttccatcgcctatgctctaaaaaacgtgagcggtaaaatttgggatgaagataatgagaagatatccatcttcgtcaaccctgccggaattccacactttgtgcacagggaactgaagtccgagaaggtggaacagatcaagcttgctatgaaccaacagtgcgacgtctcgcaggaggctctggatatccagcggctgccattttacccagatatggtaaaccgcgacaccaagatggctagcaatcccagaaaatgtatggctgcctccctcgatgttcatgaggagaacatccccactgtcatgtctgccggcgaaatggacaaatggaagggcattgagcccggcgaaaagtgtgcggaccgaagcccagtttgtaccactttctctgacacaagcagcaatatcaactcaattctggaattattcccaaaactcttatgtctggatggtcagcagtcgccacgagcaaccttgtgcggaaccgaagctcacaaacgactgcccacctgcaaaggttctttctttggcagcgagatgctgaagaacctcgtgctccagtttctccagcagtactatcttatctatgacagtggcgacagacagggcttgctctctgcttaccatgacgaggcctgcttctcacttagcatcccttttaacccagaggacagcgcaccatctagtttctgtaagtttttcaaggacagtcgaaacataaagatccttaaggacccgtaccttcgcggggaattgttaaagcacaccaaattggatatcgtcgacagcctctcagccttgcctaaaactcagcacgatctatctagctttctcgtggatatgtggtaccagaccgagtggatgttgtgcttttcggtgaatggggtgttcaaagaggtggagggacagagccagggctctgtcctggcctttaccagaacatttatcgctactcctgggtcttcgtcaagcctttgcattgtcaacgacaaattattcgtgagggatacaagccaccagggaacccagtcagctcttttcaccctggttcccacggcctttagtagctcggtgcccgctttttcgcaggaacagcagaagatgctgcccagttag

SEQ ID NO: 211070 - DNA, 702 bp, Artificial Sequence
  derived and/or modified sequence
atggagcgggagcagaagccgccagaaagacgcatggaaggcaatatgcccgacggtaccctggggagctggttcaagattactgtccccttcgggattaaatacaacgagaaatggttactcaatttgatccaaaatgaatgctccgtacccttcgtgcccgtcgagtttcactatgagaatatgcatgccagcttcttcgtggagaacgcctctattgcttacgctctaaagaatgtgagtggcaagatatgggacgaggataatgagaaaatcagtattttcgtgaaccccgctgggattcctcacttcgttcacagggagcttaagtctgagaaggttgagcagattaaattggctatgaaccagcagtgtgacgtgagccaggaggcactcgacatccaacggctccccttctatcccgatatggtgaacagagataccaagatggccagtaatcctaggaagtgcatggctgcctcacttgatgtgcatgaggaaaatattcccactgtgatgtctgccggcgaaatggacaagtggaaagggatcgaacccggggaaaaatgcgccgatagaagcccggtttgtactacattctcagacacatcatcaaatatcaagtcggtagttcccagtgtcaccacctgggatcctgatctgtgcttaattgctccattctgcaggcggaggcaacactag

SEQ ID NO: 211071 - DNA, 612 bp, Artificial Sequence
  derived and/or modified sequence
atggcctccagccacccggagcagctctatgtggtactcaagccaactcggggttatcagccagtgagatactacttgatctatgatagcggcgaccgccaaggcctgctgtcagcttaccacgacgaggcttgctttagcttatcgatacctttcaaccctgaagattccgcacctagctctttttgtaagttttttaaggatagcaggaatattaaaatcctcaaggacccctacctaagaggagaattgctgaagcacaccaaattggatatagtcgactcacttagtgccttacccaaaactcagcacgatctatcaagttttctagtcgatatgtggtaccagaccgaatggatgctgtgtttcagcgtaaacggcgtcttcaaagaggtggagggacagtctcagggaagcgtattggcattcacacggacttttatcgccacgccgggctcctcttcgagcttgtgcatcgttaacgacaagctgtttgtgagagacacttcccaccaaggcacccaatctgctctgtttaccctcgttccaacagctttctcctcctcagttcccgcgttctcacaggaacaacagaaaatgttgccctcatag

SEQ ID NO: 211072 - DNA, 1086 bp, Artificial Sequence
  derived and/or modified sequence
tagaatgagaagtggttgcttaatcttatacagaacgagtgttctgtcccatttgttccagtggagtttcactacgaaaatatgcatgcatcttttttcgtggagaatgcatccatagcatatgctctgaagaatgtgtcgggcaaaatttgggatgaggacaatgaaaagatctcaatctttgtcaacccggcgggaattccccacttcgtccaccgagaactgaagtctgagaaagtcgagcaaattaaactggctatgaaccagcagtgcgacgtgtctcaggaagctctggatattcagaggctcccattctatcccgacatggtgaaccgtgacacaaaaatggcttctaatcctagaaagtgcatggccgcttccctggacgtgcatgaggaaaacattcctactgtgatgtcagcgggagagatggataaatggaagggaattgaacccggcgaaaagtgtgctgaccgcagtcccgtgtgcactaccttctctgatacgtccagtaacatcaactccatattagagttgtttcccaagctgctgtgtctcgatggacagcagtcaccaagggcaaccctgtgtggcactgaagctcataagcgcctgccgacctgtaagggtagtttttttggatccgagatgctcaaaaacctcgtattgcagttcttgcaacagtattatctgatctacgacagcggcgatcgccagggtcttctgagtgcgtatcatgacgaggcttgtttcagtctctccatcccgtttaatcctgaggactccgcacccagttccttctgcaaattttttaaggattctaggaacattaagatattgaaggatccttatctgagaggtgaactactcaaacacaccaagcttgacatcgtggattccctcagcgcgttgccgaagacccagcacgatctgagctcatttctcgtcgatatgtggtatcaaactgaatggatgttgtgcttttctgtgaacggcgtgtttaaggaggtaagcgggttttgctctcggcttcaccccgaccttcactgttatccatggcagcagtttcagtccgtccacagatag

SEQ ID NO: 211073 - DNA, 1596 bp, Artificial Sequence
  derived and/or modified sequence
atgagcctgcccagcggccacaccaccggccacacagaccaggtggtgcagaggcgggcccgctgctgggacatctaccagaggcgcttcagcagccgctctgagcctgtgaaccctggcatgcacagcagcagccaccagcagcaggatggagatgctgccatgcacggggcccacatggacagccctgtgcgctacaccccctacaccatcagcccctacaacaggaagggcagcttcaggaagcaggaccagacccacgtgaacatggagcgggagcagaagcccccagagaggaggatggagggcaacatgccagatggcaccctgggctcctggttcaagatcaccgtgcccttcggcatcaagtacaatgagaagtggctgctgaacctgatccagaatgaatgttctgtgccctttgtgcctgtggagttccactatgagaacatgcacgccagcttctttgtggagaatgccagcatcgcctatgccctgaagaatgtgtctgggaagatctgggatgaggacaatgagaagatcagcatctttgtgaacccagctggcatcccccactttgtgcaccgggagctgaagtctgagaaggtggagcagatcaagctggccatgaaccagcagtgtgatgtgtcccaggaggccctggacatccagaggctgcccttctacccagacatggtgaacagagacaccaagatggccagcaaccccaggaagtgcatggccgccagcctggatgtgcatgaggagaacatccccaccgtgatgtctgctggggagatggacaagtggaagggcatcgagcctggagagaagtgtgccgacaggagccctgtgtgcaccaccttcagtgacaccagcagcaacatcaacagcatcctggagctgttccccaagctgctgtgcctggatggccagcagagcccccgggccaccctgtgtggcacagaggcccacaagaggctgcccacctgcaagggcagcttcttcggcagcgagatgctgaagaacctggtgctgcagttcctgcagcagtactacctgatctatgacagcggggaccggcagggcctgctgagcgcctaccatgatgaggcctgcttcagcctgagcatccccttcaacccagaagattctgcccccagcagcttctgcaagttcttcaaggacagcaggaacatcaagatcctgaaggacccctacctgcggggggagctgctgaagcacaccaagctggacatcgtggacagcctgagcgccctgcccaagacccagcacgacctgagcagcttcctggtggacatgtggtaccagacagagtggatgctgtgcttctctgtgaatggagtcttcaaggaggtggagggccagagccagggctctgtgctggccttcaccaggaccttcatcgccaccccaggcagcagcagcagcctgtgcatcgtgaatgacaagctgtttgtgcgggacaccagccaccagggcacccagagcgccctcttcaccctggtgcccacagccttcagcagctctgtgcctgccttcagccaggagcagcagaagatgctgcccagctag

SEQ ID NO: 211074 - DNA, 702 bp, Artificial Sequence
  derived and/or modified sequence
atggagcgggagcagaagcccccagagaggaggatggagggcaacatgccagatggcaccctgggctcctggttcaagatcaccgtgcccttcggcatcaagtacaatgagaagtggctgctgaacctgatccagaatgaatgttctgtgccctttgtgcctgtggagttccactatgagaacatgcacgccagcttctttgtggagaatgccagcatcgcctatgccctgaagaatgtgtctgggaagatctgggatgaagataatgagaagatcagcatctttgtgaacccagctggcatcccccactttgtgcaccgggagctgaagtctgagaaggtggagcagatcaagctggccatgaaccagcagtgtgatgtgtcccaggaggccctggacatccagaggctgcccttctacccagacatggtgaacagagacaccaagatggccagcaaccccaggaagtgcatggccgccagcctggatgtgcatgaggagaacatccccaccgtgatgtctgctggggagatggacaagtggaagggcatcgagcccggggagaagtgtgccgacaggagccctgtgtgcaccaccttcagtgacaccagcagcaacatcaagtctgtggtgcccagcgtgaccacctgggaccctgacctgtgcctgattgcccccttctgcagaagacggcagcactag

SEQ ID NO: 211075 - DNA, 612 bp, Artificial Sequence
  derived and/or modified sequence
atggccagcagccaccctgagcagctgtatgtggtgctgaagcccacccggggctaccagcctgtgcgctactacctgatctatgacagcggggaccggcagggcctgctgagcgcctaccatgatgaggcctgcttcagcctgagcatccccttcaacccagaagattctgcccccagcagcttctgcaagttcttcaaggacagcaggaacatcaagatcctgaaggacccctacctgcggggggagctgctgaagcacaccaagctggacatcgtggacagcctgagcgccctgcccaagacccagcacgacctgagcagcttcctggtggacatgtggtaccagacagagtggatgctgtgcttctctgtgaatggagtcttcaaggaggtggagggccagagccagggctctgtgctggccttcaccaggaccttcatcgccaccccaggcagcagcagcagcctgtgcatcgtgaatgacaagctgtttgtgcgggacaccagccaccagggcacccagagcgccctcttcaccctggtgcccacagccttcagcagctctgtgcctgccttcagccaggagcagcagaagatgctgcccagctag

SEQ ID NO: 211076 - DNA, 1086 bp, Artificial Sequence
  derived and/or modified sequence
tgaaatgagaagtggctgctgaacctgatccagaatgaatgttctgtgccctttgtgcctgtggagttccactatgagaacatgcacgccagcttctttgtggagaatgccagcatcgcctatgccctgaagaatgtgtctgggaagatctgggatgaagataatgagaagatcagcatctttgtgaacccagctggcatcccccactttgtgcaccgggagctgaagtctgagaaggtggagcagatcaagctggccatgaaccagcagtgtgatgtgtcccaggaggccctggacatccagaggctgcccttctacccagacatggtgaacagagacaccaagatggccagcaaccccaggaagtgcatggccgccagcctggatgtgcatgaggagaacatccccaccgtgatgtctgctggggagatggacaagtggaagggcatcgagcccggggagaagtgtgccgacaggagccctgtgtgcaccaccttcagtgacaccagcagcaacatcaacagcatcctggagctgttccccaagctgctgtgcctggatggccagcagagcccccgggccaccctgtgtggcacagaggcccacaagaggctgcccacctgcaagggcagcttctttggaagtgagatgctgaagaacctggtgctgcagttcctgcagcagtactacctgatctatgattctggggaccggcagggcctgctgagcgcctaccatgatgaggcctgcttcagcctgagcatccccttcaaccctgaggacagcgcccccagcagcttctgcaagttcttcaaggacagcaggaacatcaagatcctgaaggacccctacctgcggggggagctgctgaagcacaccaagctggacatcgtggacagcctgagcgccctgcccaagacccagcacgacctgagcagcttcctggtggacatgtggtaccagacagagtggatgctgtgcttctctgtgaatggagtcttcaaggaggtgtctggcttctgcagccggctgcacccagacctgcactgctacccctggcagcagttccagagcgtgcacaggtag

SEQ ID NO: 211077 - DNA, 1596 bp, Artificial Sequence
  derived and/or modified sequence
atgagcctgcccagcggccacaccaccggccacaccgaccaggtggtgcaaaggagagcccgttgctgggacatctatcagagaaggttcagctctcggtctgaaccagtgaaccctggaatgcactccagttctcaccaacagcaggacggagatgctgctatgcatggagcccacatggacagccctgttcggtacaccccatacaccatttccccctacaatcgcaaaggatctttcaggaaacaggatcagacacacgtgaacatggagagggaacagaagccaccagagcgtcggatggaaggtaacatgccggatggaacccttggctcctggtttaaaatcactgttccattcggcatcaaatacaatgaaaagtggctgttgaatctgatccagaacgaatgctccgtgcctttcgtgcctgtcgagtttcattacgagaacatgcatgccagcttcttcgtcgagaatgcttctatcgcttatgcgctgaagaatgtgtccgggaaaatatgggacgaagacaacgaaaagatcagcatttttgttaaccccgccggcattccacattttgtgcatcgcgagctaaagtcagagaaggtggagcagattaaattagccatgaatcagcaatgtgacgtcagccaggaggcactggacattcagcggttgcccttttacccagacatggtgaatcgcgataccaaaatggcctctaatccgcgcaagtgcatggccgcttccttagatgtccacgaagagaacatacccaccgtgatgagcgcaggggagatggataaatggaaggggatcgagcccggcgagaagtgtgccgacagaagccccgtgtgtaccacgttctcggacacatcctccaacattaacagcattctggaacttttccccaaactgctgtgcctggacggccagcagtcacctagagccaccttgtgtggaacagaggcccacaagaggttgccaacatgcaaagggtcatttttcgggagtgaaatgctgaagaatcttgtcctgcagtttcttcagcagtattatctgatatatgacagtggcgatagacaaggacttctgtccgcttatcacgatgaagcctgcttcagcctctcaattccttttaaccctgaggacagtgccccttctagcttctgtaaattttttaaggactccagaaatatcaagattctcaaagatccttatctccgtggcgaactattgaaacatacaaaacttgacatcgtggactccctgtcagctctgcctaaaacacagcatgacctctcttccttcttagttgatatgtggtatcagaccgaatggatgctgtgtttttccgtgaatggtgtcttcaaggaagtggagggtcaatcccagggctcggttctagcatttaccagaaccttcatagcaactcccgggagtagtagcagcctctgcattgtgaatgataagctgttcgtcagagatacttcccaccagggtacgcaaagtgctctctttaccctggtgcctaccgcgtttagctcatcagtgccagcgtttagccaggagcagcaaaagatgctgccatcgtag

SEQ ID NO: 211078 - DNA, 702 bp, Artificial Sequence
  derived and/or modified sequence
atggagcgggagcagaagccccccgagcggcggatggagggcaacatgccagacggcaccttgggatcatggttcaaaatcacagttccatttgggataaagtataacgaaaaatggctgctgaatctcattcaaaacgaatgctccgtgcccttcgtacccgtggagtttcactacgagaacatgcacgccagcttctttgtggaaaacgcctcaatcgcctacgcactcaaaaacgtatccggtaaaatttgggacgaagacaatgagaagatttctatatttgtgaatcccgctggaatcccacactttgtacacagggagctgaaatcagaaaaggtagagcagattaaacttgccatgaaccagcagtgtgacgtgtcccaggaggccttggacattcagagactcccgttctatcccgacatggtgaatcgtgacacaaagatggctagcaacccgcgcaagtgcatggccgctagccttgacgtgcacgaggaaaatatcccgacagtgatgtcagcaggcgagatggacaagtggaaggggatcgagcctggtgaaaagtgtgccgatcgctccccagtctgcaccacattctcggataccagctctaatattaaatctgtggttccctccgttaccacctgggatcccgacctgtgcttgattgctcccttttgccggcggagacagcactag

SEQ ID NO: 211079 - DNA, 612 bp, Artificial Sequence
  derived and/or modified sequence
atggccagcagccaccccgagcagctgtacgtggtgctgaagcccaccaggggctaccagccagtcagatactatctgatctacgacagtggtgatagacagggcctgcttagcgcttaccacgatgaggcttgcttcagtctttccattcccttcaatcccgaagacagcgccccatccagtttctgcaagttcttcaaggattctcgcaatattaagatactcaaagatccctaccttcgaggcgagctgcttaagcataccaaactagatatcgtcgactctttgtctgctctgcccaaaactcagcatgacctgtcctcttttcttgtcgacatgtggtaccagacggaatggatgctgtgctttagcgttaatggcgtgtttaaagaagtcgaaggccagtcccagggatccgtgctcgcttttacccgcacattcatcgcaacccccgggtcaagctcctcattgtgcattgtgaacgataaactattcgtaagggacacctcacaccagggcactcagagtgccctgtttaccctcgtgcctaccgctttctcatccagcgtgcctgcattctcccaggaacaacaaaagatgctaccaagctag

SEQ ID NO: 211080 - DNA, 1086 bp, Artificial Sequence
  derived and/or modified sequence
tgaaacgagaagtggctgctgaacctgatccagaacgagtgcagcgtcccatttgtgccagtggaatttcactacgagaatatgcatgctagcttctttgttgaaaatgcatctatcgcttatgcccttaaaaacgtgtctggcaaaatttgggatgaagacaatgagaagatttctatcttcgtgaatccggccgggataccccacttcgtgcaccgcgagctcaagtccgaaaaagtggaacagatcaagctagccatgaatcagcaatgtgacgtgagccaggaagcgctcgatatccagcgcctgcctttctacccagacatggtgaatcgcgacaccaagatggcttcaaatcctcggaaatgcatggctgcaagccttgatgtccatgaagagaacattcctacagtgatgagtgcgggtgaaatggataagtggaaagggatcgaacctggcgaaaagtgcgccgatcggtctcccgtttgtactaccttttccgatacttctagcaatataaattctattctagaactctttcccaagctgctgtgcttggacgggcaacaatccccccgagccacattgtgcggaacggaggctcacaaacggctgccaacgtgcaaagggtcgttctttggatcagaaatgctgaaaaatcttgtcctccagtttttacagcaatattacctcatctatgattctggtgatagacagggtctactgtcagcctaccatgacgaggcgtgcttttccttgtcaattccatttaaccctgaggattcagctccgagcagcttttgcaagtttttcaaagatagtcgtaacatcaaaatcctcaaagatccctacttgcgcggtgagttgttgaagcacactaaacttgacatcgtcgatagcctgtccgcactcccaaagacccagcatgatttatcttctttcctggtggacatgtggtaccagactgaatggatgttgtgctttagcgtgaatggtgtattcaaggaagtatctgggttctgttccagactgcacccggacttacactgttatccctggcagcagttccagtctgtgcatcgctag

SEQ ID NO: 211081 - DNA, 1938 bp, Artificial Sequence
  derived and/or modified sequence
ttgctctcgccttcgtcagcagccctcctcaatcttctccaaactcccgtccccaggccacacagattctcctcaagagagccctataaggacattggtaaaatgtcactgccttcaggacacactacgggtcacactgatcaagttgttcaaagaagagcaagatgttgggatatttaccaaaggagatttagcagtaggtctgaacctgtcaatcctggcatgcattcttcatcccatcagcagcaagatggagatgcagcaatgcatggtgcccacatggactctccagtaagatacactccctatactatttcaccctataatcggaaaggcagttttcgtaaacaagaccaaacccacgttaacatggagagagagcaaaaacctccagagagaagaatggaggggaacatgccggatgggaccttagggagctggttcaagatcacagttccctttggcataaaatacaatgagaagtggctgctgaatttgattcagaatgaatgcagtgtacccttcgtcccagttgagtttcactatgaaaacatgcatgccagcttctttgtggagaatgccagcatcgcctatgcactgaagaatgtcagtggcaagatttgggatgaggataatgaaaagatatcaatctttgtcaaccctgctggcataccccactttgtgcacagggagctgaagtcagaaaaggtggagcagataaagctggccatgaaccaacagtgtgatgtctcccaggaagctcttgatatccagagactcccattttacccagacatggtgaaccgtgatactaagatggcatcgaatcctagaaagtgcatggctgcctccctggacgtccatgaagagaacatacctacagtgatgtctgcaggggagatggacaagtggaaagggatagagccaggagagaagtgtgcggacagaagcccagtgtgcacgaccttctcggatacctccagcaacataaactccatcctggaattgttccccaaattattatgcctggatggccagcagtcacccagagcaactttatgtggtactgaagcccacaagaggttaccaacctgtaagggaagcttctttggatctgagatgttgaagaatctggtcctgcaattcctgcagcagtattacttgatctatgactctggagatcgacagggtctccttagtgcttaccacgatgaggcctgcttctccctgagcattcccttcaatcctgaggactcagccccgagcagcttctgcaagttcttcaaggatagcaggaatataaaaattctcaaggacccctaccttcggggggagctgctgaagcacacaaaacttgatattgtggactccctcagtgcgttgcctaaaactcagcatgacctcagctccttcctggtggacatgtggtaccagacggaatggatgctctgcttttctgtcaacggggtgttcaaggaagtggaaggacagtctcagggttctgttctcgccttcacccggaccttcattgctacccctggcagcagttccagtctgtgcatcgtgaatgacaagctctttgtgcgggataccagccaccaagggacccagagtgccttgttcaccctagtgcccacagccttctccagctccgtgcctgccttctcccaggagcagcagaaaatgctgccttcgtaacaaccagtgtgactacgtcagagctcctcatgttcttgcatggcccaagatgtatttccctgtgactgaaccaggagatctggctggggctaagaagccgaagcccaactcacagggctgactctcatccttccaaaggggccagttgttctgtgcacttgtccacccctgttacccccaggatctctgttccttttcacaataaagtatggtgtcttgttatgtcaaatccctgcaaaa

SEQ ID NO: 211082 - DNA, 1196 bp, Artificial Sequence
  derived and/or modified sequence
agcaaactttggggagtggtaagaacaggaagttaattctgtgactcctaggacactcctctctatgcttggggaaggaacttcctgtaagcaaggcttgaggcttgctctcgccttcgtcagcagccctcctcaatcttctccaaactcccgtccccaggccacacagattctcctcaagagagccctataaggacattggtaaaatgtcactgccttcaggacacactacggcactccctatactatttcaccctataatcggaaaggcagttttcgtaaacaagaccaaacccacgttaacatggagagagagcaaaaacctccagagagaagaatggaggggaacatgccggatgggaccttagggagctggttcaagatcacagttccctttggcataaaatacaatgagaagtggctgctgaatttgattcagaatgaatgcagtgtacccttcgtcccagttgagtttcactatgaaaacatgcatgccagcttctttgtggagaatgccagcatcgcctatgcactgaagaatgtcagtggcaagatttgggatgaggataatgaaaagatatcaatctttgtcaaccctgctggcataccccactttgtgcacagggagctgaagtcagaaaaggtggagcagataaagctggccatgaaccaacagtgtgatgtctcccaggaagctcttgatatccagagactcccattttacccagacatggtgaaccgtgatactaagatggcatcgaatcctagaaagtgcatggctgcctccctggacgtccatgaagagaacatacctacagtgatgtctgcaggggagatggacaagtggaaagggatagagccaggagagaagtgtgcggacagaagcccagtgtgcacgaccttctcggatacctccagcaacataaagtcagttgtaccctctgtcaccacctgggaccctgacctgtgtttgatagcgcccttctgcaggaggaggcagcactagtcttctgggaggaccacagaccctctccttccccctcgccccactcctctctctgtgtcactcattcatctgtgcttagacatctcctttccttcctctgacatggtccccttttcacccgctctgggatgtgtttcccacctgtctccacccagcctcctctagcgtgccctctgtgagtgtgctccag

SEQ ID NO: 211083 - DNA, 1837 bp, Artificial Sequence
  derived and/or modified sequence
atcttctccaaactcccgtccccaggccacacagattctcctcaagagagccctataaggacattggtaaaatgtcactgccttcaggacacactacgggtcacactgatcaagttgttcaaagaagagcaagatgttgggatatttaccaaaggagatttagcagtaggtctgaacctgtcaatcctggcatgcattcttcatcccatcagcagcaagatggagatgcagcaatgcatggtgcccacatggactctccagtaagatacactccctatactatttcaccctataatcggaaaggcagttttcgtaaacaagaccaaacccacgttaacatggagagagagcaaaaacctccagagagaagaatggaggggaacatgccggatgggaccttagggagctggttcaagatcacagttccctttggcataaaatacaatgagaagtggctgctgaatttgattcagaatgaatgcagtgtacccttcgtcccagttgagtttcactatgaaaacatgcatgccagcttctttgtggagaatgccagcatcgcctatgcactgaagaatgtcagtggcaagatttgggatgaggataatgaaaagatatcaatctttgtcaaccctgctggcataccccactttgtgcacagggagctgaagtcagaaaaggtggagcagataaagctggccatgaaccaacagtgtgatgtctcccaggaagctcttgatatccagagactcccattttacccagacatggtgaaccgtgatactaagatggcatcgaatcctagaaagtgcatggctgcctccctggacgtccatgaagagaacatacctacagtgatgtctgcaggggagatggacaagtggaaagggatagagccaggagagaagtgtgcggacagaagcccagtgtgcacgaccttctcggatacctccagcaacataaactccatcctggaattgttccccaaattattatgcctggatggccagcagtcacccagagcaactttatgtggtactgaagcccacaagaggttaccaacctgtaaggtattacttgatctatgactctggagatcgacagggtctccttagtgcttaccacgatgaggcctgcttctccctgagcattcccttcaatcctgaggactcagccccgagcagcttctgcaagttcttcaaggatagcaggaatataaaaattctcaaggacccctaccttcggggggagctgctgaagcacacaaaacttgatattgtggactccctcagtgcgttgcctaaaactcagcatgacctcagctccttcctggtggacatgtggtaccagacggaatggatgctctgcttttctgtcaacggggtgttcaaggaagtggaaggacagtctcagggttctgttctcgccttcacccggaccttcattgctacccctggcagcagttccagtctgtgcatcgtgaatgacaagctctttgtgcgggataccagccaccaagggacccagagtgccttgttcaccctagtgcccacagccttctccagctccgtgcctgccttctcccaggagcagcagaaaatgctgccttcgtaacaaccagtgtgactacgtcagagctcctcatgttcttgcatggcccaagatgtatttccctgtgactgaaccaggagatctggctggggctaagaagccgaagcccaactcacagggctgactctcatccttccaaaggggccagttgttctgtgcacttgtccacccctgttacccccaggatctctgttccttttcacaataaagtatggtgtcttgttatgtc

SEQ ID NO: 211084 - DNA, 1081 bp, Artificial Sequence
  derived and/or modified sequence
caatgagaagtggctgctgaatttgattcagaatgaatgcagtgtacccttcgtcccagttgagtttcactatgaaaacatgcatgccagcttctttgtggagaatgccagcatcgcctatgcactgaagaatgtcagtggcaagatttgggatgaggataatgaaaagatatcaatctttgtcaaccctgctggcataccccactttgtgcacagggagctgaagtcagaaaaggtggagcagataaagctggccatgaaccaacagtgtgatgtctcccaggaagctcttgatatccagagactcccattttacccagacatggtgaaccgtgatactaagatggcatcgaatcctagaaagtgcatggctgcctccctggacgtccatgaagagaacatacctacagtgatgtctgcaggggagatggacaagtggaaagggatagagccaggagagaagtgtgcggacagaagcccagtgtgcacgaccttctcggatacctccagcaacataaactccatcctggaattgttccccaaattattatgcctggatggccagcagtcacccagagcaactttatgtggtactgaagcccacaagaggttaccaacctgtaagggaagcttctttggatctgagatgttgaagaatctggtcctgcaattcctgcagcagtattacttgatctatgactctggagatcgacagggtctccttagtgcttaccacgatgaggcctgcttctccctgagcattcccttcaatcctgaggactcagccccgagcagcttctgcaagttcttcaaggatagcaggaatataaaaattctcaaggacccctaccttcggggggagctgctgaagcacacaaaacttgatattgtggactccctcagtgcgttgcctaaaactcagcatgacctcagctccttcctggtggacatgtggtaccagacggaatggatgctctgcttttctgtcaacggggtgttcaaggaagtctcagggttctgttctcgccttcacccggaccttcattgctacccctggcagcagttccagtctgtgcatcgt

SEQ ID NO: 211085 - DNA, 1596 bp, Artificial Sequence
  derived and/or modified sequence
atgtctctcccttcaggccataccaccggacatactgatcaggtcgtgcagaggcgcgcacgctgctgggatatctatcaacgtaggttctcttcccgatccgaacccgtcaaccccggaatgcactccagctcccaccaacaacaggatggagacgccgctatgcacggagcccacatggattctcctgtccggtacaccccttataccatctctccttacaataggaagggctcgttccggaagcaggatcagactcatgtaaacatggagagagagcagaaacctccagagcggcgaatggagggcaatatgcctgatgggaccctggggtcatggttcaagataaccgtaccgttcggcatcaaatacaacgagaagtggctcttaaaccttatccagaacgagtgctctgtgccctttgtgccggtcgaatttcattacgagaacatgcacgcatccttttttgtcgagaatgcctccatcgcctacgccctcaagaatgtatcaggtaagatatgggatgaggacaacgagaaaattagcatctttgttaatcctgccggaattccacatttcgtccatagggagctgaagagcgaaaaagtggagcagattaaattggccatgaaccagcagtgtgacgtatctcaggaagctcttgacatccagaggttacccttttaccccgatatggttaaccgagacacaaaaatggcgagcaaccctaggaaatgcatggccgcatcactcgacgtccatgaggagaacattcctactgttatgagcgccggtgagatggacaagtggaaaggcatcgaacctggcgagaaatgtgctgaccgatccccagtttgtaccaccttcagcgatacctccagtaatattaatagcatattagagctgtttcctaagctgttgtgtttggacggccagcagagcccaagagccactctttgtggaaccgaagcccataaaagattacccacctgtaagggttcgtttttcggaagcgaaatgctgaagaatctggtcctccagtttctgcagcagtattatttgatctacgactcgggcgatcggcagggactgttgagcgcataccatgacgaggcttgcttttcactgtctattccttttaatcctgaagatagcgcccctagctctttctgtaagttcttcaaagacagtcggaacattaagattcttaaggatccctatctccggggagagctcctgaagcataccaagttggacattgttgatagtctgtcggcactcccaaaaactcagcacgacctttcatcttttttggtggacatgtggtatcagaccgaatggatgctttgtttttcagtgaatggcgtgttcaaggaagtagaagggcagagtcagggctccgttctggcgtttacccggaccttcattgcaacccccggtagctcttctagtctctgtatcgttaatgacaaactctttgtgcgcgacacctcacaccaaggcactcagtctgccctgttcacacttgtgccaaccgctttttccagtagtgtgcccgcattctcccaagaacaacagaaaatgttgccatcatag

SEQ ID NO: 211086 - DNA, 702 bp, Artificial Sequence
  derived and/or modified sequence
atggaacgcgaacagaagccaccggagcggcgaatggaagggaacatgcccgacgggacgctggggagttggttcaagattaccgtaccattcggtattaaatacaatgagaagtggctcctcaacttaatacagaacgaatgttccgtgccttttgtgccagttgaatttcactatgaaaacatgcatgcctctttttttgtggagaatgcttcaattgcctacgcgctgaagaatgtgagcggcaaaatttgggatgaggacaacgaaaaaatttccatcttcgtaaaccctgccggaattccacattttgtccatagggagttgaaatcggaaaaggtcgaacagatcaagctcgctatgaaccaacaatgcgatgtgtcacaagaggctttggacatccagcgtctgcccttctaccctgatatggtaaatagagatacaaaaatggcttctaatcccaggaaatgcatggctgccagcctagatgtgcatgaggagaacatccccacagtgatgtctgcaggagagatggacaagtggaaaggcattgagcctggcgagaagtgcgccgaccgctcccccgtgtgcaccacttttagcgatacatctagtaatattaaatctgtggtgcccagcgtgactacctgggatcccgacctgtgcttgattgccccattttgtcggcgtcggcaacattag

SEQ ID NO: 211087 - DNA, 612 bp, Artificial Sequence
  derived and/or modified sequence
atggcgtcttcccatccagaacagctatacgtggttctcaaacccactcgcggttaccagcccgtgcggtattacctaatctatgatagcggagacaggcaaggtcttctttccgcgtaccatgatgaagcctgcttttccctaagcatcccattcaatccagaagactcggcaccctcttcattctgtaagttctttaaggatagcagaaatatcaaaatattgaaagatccttatctccgaggggagctgttgaagcataccaagctggacattgtagacagtctgagtgcacttcccaaaacccagcatgacttgagttcattcctggtagatatgtggtaccagactgaatggatgctctgcttcagcgtgaacggtgtttttaaagaggtcgagggtcagagccaggggtctgtgctggccttcactcggacttttattgccactccagggtctagctccagtttgtgtatcgtgaacgacaagctgttcgtcagggatacctcgcatcaagggacccagagtgcccttttcactctggtcccaacggccttcagctcgtccgtgccagccttcagccaggaacagcagaagatgctgccctcgtag

SEQ ID NO: 211088 - DNA, 1086 bp, Artificial Sequence
  derived and/or modified sequence
tgaaacgagaagtggctacttaacctgatccagaatgaatgcagcgtgccctttgtgccggtcgaattccactatgagaatatgcacgcaagcttcttcgttgagaatgcgagcatcgcctatgcactgaagaacgtgagcggaaaaatttgggacgaggataatgagaaaatctctatctttgtgaatccagccggaattccgcattttgtgcacagagaactgaagagtgagaaggtcgaacaaattaaactggcaatgaaccagcagtgtgatgttagtcaggaagctttagatatacagaggctccccttttatcctgatatggtcaacagagacacaaagatggcaagtaatcctagaaagtgtatggccgcatcccttgacgtacacgaagagaatatacccaccgtgatgagcgctggcgagatggacaagtggaaaggcatcgaacctggggagaaatgcgctgacaggagtcctgtctgtacaactttcagtgacacaagctcaaatattaatagcattctggaattgttcccgaaactgctatgtctcgatggccagcagagccccagggcaacattgtgcggcacggaagctcataaaagactgcctacatgcaaggggagcttttttgggagtgagatgcttaagaatctggtcctccagttcttgcagcagtattatttgatatatgacagcggcgatcgccaaggcctcctcagcgcttaccacgatgaagcttgttttagcctgtctattccttttaacccggaggactccgcgccatcttctttctgcaagtttttcaaagattccaggaacataaagatccttaaggacccctacctgcgcggagaattacttaagcacaccaaattggatattgtcgattctctgagtgccctcccgaagacgcagcacgacctttcttcgttcttggtagacatgtggtatcagacagagtggatgctgtgcttcagcgtcaacggagtttttaaggaagttagtggattttgcagcaggctgcatccggacctccactgctacccatggcagcagttccagagcgtgcacagatag

SEQ ID NO: 211089 - DNA, 1596 bp, Artificial Sequence
  derived and/or modified sequence
atgagcctgcccagcggccacaccaccggccacaccgaccaggtggtgcagagaagagccagatgctgggacatctaccagagaagattcagcagcagaagcgagcccgtgaaccccggcatgcacagcagcagccaccagcagcaggacggcgacgccgccatgcacggcgcccacatggacagccccgtgagatacaccccctacaccatcagcccctacaacagaaagggcagcttcagaaagcaggaccagacccacgtgaacatggagagagagcagaagccccccgagagaagaatggagggcaacatgcccgacggcaccctgggcagctggttcaagatcaccgtgcccttcggcatcaagtacaacgagaagtggctgctgaacctgatccagaacgagtgcagcgtgcccttcgtgcccgtggagttccactacgagaacatgcacgccagcttcttcgtggagaacgccagcatcgcctacgccctgaagaacgtgagcggcaagatctgggacgaggacaacgagaagatcagcatcttcgtgaaccccgccggcatcccccacttcgtgcacagagagctgaagagcgagaaggtggagcagatcaagctggccatgaaccagcagtgcgacgtgagccaggaggccctggacatccagagactgcccttctaccccgacatggtgaacagagacaccaagatggccagcaaccccagaaagtgcatggccgccagcctggacgtgcacgaggagaacatccccaccgtgatgagcgccggcgagatggacaagtggaagggcatcgagcccggcgagaagtgcgccgacagaagccccgtgtgcaccaccttcagcgacaccagcagcaacatcaacagcatcctggagctgttccccaagctgctgtgcctggacggccagcagagccccagagccaccctgtgcggcaccgaggcccacaagagactgcccacctgcaagggcagcttcttcggcagcgagatgctgaagaacctggtgctgcagttcctgcagcagtactacctgatctacgacagcggcgacagacagggcctgctgagcgcctaccacgacgaggcctgcttcagcctgagcatccccttcaaccccgaggacagcgcccccagcagcttctgcaagttcttcaaggacagcagaaacatcaagatcctgaaggacccctacctgagaggcgagctgctgaagcacaccaagctggacatcgtggacagcctgagcgccctgcccaagacccagcacgacctgagcagcttcctggtggacatgtggtaccagaccgagtggatgctgtgcttcagcgtgaacggcgtgttcaaggaggtggagggccagagccagggcagcgtgctggccttcaccagaaccttcatcgccacccccggcagcagcagcagcctgtgcatcgtgaacgacaagctgttcgtgagagacaccagccaccagggcacccagagcgccctgttcaccctggtgcccaccgccttcagcagcagcgtgcccgccttcagccaggagcagcagaagatgctgcccagctag

SEQ ID NO: 211090 - DNA, 702 bp, Artificial Sequence
  derived and/or modified sequence
atggagagagagcagaagccccccgagagaagaatggagggcaacatgcccgacggcaccctgggcagctggttcaagatcaccgtgcccttcggcatcaagtacaacgagaagtggctgctgaacctgatccagaacgagtgcagcgtgcccttcgtgcccgtggagttccactacgagaacatgcacgccagcttcttcgtggagaacgccagcatcgcctacgccctgaagaacgtgagcggcaagatctgggacgaggacaacgagaagatcagcatcttcgtgaaccccgccggcatcccccacttcgtgcacagagagctgaagagcgagaaggtggagcagatcaagctggccatgaaccagcagtgcgacgtgagccaggaggccctggacatccagagactgcccttctaccccgacatggtgaacagagacaccaagatggccagcaaccccagaaagtgcatggccgccagcctggacgtgcacgaggagaacatccccaccgtgatgagcgccggcgagatggacaagtggaagggcatcgagcccggcgagaagtgcgccgacagaagccccgtgtgcaccaccttcagcgacaccagcagcaacatcaagagcgtggtgcccagcgtgaccacctgggaccccgacctgtgcctgatcgcccccttctgcagaagaagacagcactag

SEQ ID NO: 211091 - DNA, 612 bp, Artificial Sequence
  derived and/or modified sequence
atggccagcagccaccccgagcagctgtacgtggtgctgaagcccaccagaggctaccagcccgtgagatactacctgatctacgacagcggcgacagacagggcctgctgagcgcctaccacgacgaggcctgcttcagcctgagcatccccttcaaccccgaggacagcgcccccagcagcttctgcaagttcttcaaggacagcagaaacatcaagatcctgaaggacccctacctgagaggcgagctgctgaagcacaccaagctggacatcgtggacagcctgagcgccctgcccaagacccagcacgacctgagcagcttcctggtggacatgtggtaccagaccgagtggatgctgtgcttcagcgtgaacggcgtgttcaaggaggtggagggccagagccagggcagcgtgctggccttcaccagaaccttcatcgccacccccggcagcagcagcagcctgtgcatcgtgaacgacaagctgttcgtgagagacaccagccaccagggcacccagagcgccctgttcaccctggtgcccaccgccttcagcagcagcgtgcccgccttcagccaggagcagcagaagatgctgcccagctag

SEQ ID NO: 211092 - DNA, 1086 bp, Artificial Sequence
  derived and/or modified sequence
tgaaacgagaagtggctgctgaacctgatccagaacgagtgcagcgtgcccttcgtgcccgtggagttccactacgagaacatgcacgccagcttcttcgtggagaacgccagcatcgcctacgccctgaagaacgtgagcggcaagatctgggacgaggacaacgagaagatcagcatcttcgtgaaccccgccggcatcccccacttcgtgcacagagagctgaagagcgagaaggtggagcagatcaagctggccatgaaccagcagtgcgacgtgagccaggaggccctggacatccagagactgcccttctaccccgacatggtgaacagagacaccaagatggccagcaaccccagaaagtgcatggccgccagcctggacgtgcacgaggagaacatccccaccgtgatgagcgccggcgagatggacaagtggaagggcatcgagcccggcgagaagtgcgccgacagaagccccgtgtgcaccaccttcagcgacaccagcagcaacatcaacagcatcctggagctgttccccaagctgctgtgcctggacggccagcagagccccagagccaccctgtgcggcaccgaggcccacaagagactgcccacctgcaagggcagcttcttcggcagcgagatgctgaagaacctggtgctgcagttcctgcagcagtactacctgatctacgacagcggcgacagacagggcctgctgagcgcctaccacgacgaggcctgcttcagcctgagcatccccttcaaccccgaggacagcgcccccagcagcttctgcaagttcttcaaggacagcagaaacatcaagatcctgaaggacccctacctgagaggcgagctgctgaagcacaccaagctggacatcgtggacagcctgagcgccctgcccaagacccagcacgacctgagcagcttcctggtggacatgtggtaccagaccgagtggatgctgtgcttcagcgtgaacggcgtgttcaaggaggtgagcggcttctgcagcagactgcaccccgacctgcactgctacccctggcagcagttccagagcgtgcacagatag

SEQ ID NO: 211093 - protein, 430 aa, Artificial Sequence
  derived and/or modified sequence
MSSRSPRPPPRRSRRRLPRPSCCCCCCRRSHLNEDTGRFVLLAALIGLYLVAGATVFSALESPGEAEARARWGATLRNFSAAHGVAEPELRAFLRHYEAALAAGVRADALRPRWDFPGAFYFVGTVVSTIGFGMTTPATVGGKAFLIAYGLFGCAGTILFFNLFLERIISLLAFIMRACRERQLRRSGLLPATFRRGSALSEADSLAGWKPSVYHVLLILGLFAVLLSCCASAMYTSVEGWDYVDSLYFCFVTFSTIGFGDLVSSQHAAYRNQGLYRLGNFLFILLGVCCIYSLFNVISILIKQVLNWMLRKLSCRCCARCCPAPGAPLARRNAITPGSRLRRRLAALGADPAARDSDAEGRRLSGELISMRDLTASNKVSLALLQKQLSETANGYPRSVCVNTRQNGFSGGVGALGIMNNRLAETSASR

SEQ ID NO: 211094 - DNA, 582 bp, Artificial Sequence
  derived and/or modified sequence
atgaacatcttcatgacctttgtgattaacgtgctgcgaaaaaacctctttcatgggttcatggttatcacccaggctcccgtccggattctgcccagccaggagcgaattaggaccccctgccactcccctgctatcctgttgagcagctgtcgtgttttatcagggaataactgtatcatggccgccctgacaagcgtgattaaacgcaatctattattttttcggctggatctgttcccactgtggctgatctttctctatattgtgaagatgggagactttccaagcgcaccgacccacctgaatacagcagcgatttgcacttgcctgttgcccattcctctgggtactcactctgaccttctgtcagtcagttgttcctggttccatcttttcgagaaaggcccacccctatcatataaacacctcgtgcggcaggtgcatccactgatgaacgcagacacagcagccggtggtttcgtttacacctgtaaagataaacttagatcactgttattcggagaagtcaaagaagacggtaacgggtgcttcatatgcatgagtctggagcagtgctag

SEQ ID NO: 211095 - DNA, 1293 bp, Artificial Sequence
  derived and/or modified sequence
atgtcttcgaggtccccaagacctccccctagacgctccaggaggaggctgccacggccgagttgctgctgttgctgttgtcgccgcagccacctaaacgaagatacagggcgttttgtgctgctggccgccttgatcggcctgtatctggtcgccggagctacagtattttcagctctcgaatctcccggcgaagccgaggccagagcacgctggggagcaaccctcagaaatttcagcgccgcgcacggcgttgccgaacccgagttgcgcgcattcctccgtcattacgaggccgctctcgctgccggcgtgcgtgcagatgccctgaggccccggtgggattttcctggtgccttttacttcgtcggcacggttgtctcaaccatagggtttggtatgacaactcccgcaaccgtcggtggaaaggctttcctcatcgcctacggtctatttggctgcgccggcaccatcctttttttcaacctgtttttggaacgcataatatccctactcgcatttattatgagggcttgtagagagcggcagctcaggaggtcaggcctattgcctgcaaccttccgccggggcagcgcgctgtccgaggcagactccctggcgggctggaagccctccgtttaccatgtgctcctcattcttggtttatttgcggtgctgctttcttgctgcgcctcagctatgtatacaagcgtagagggctgggattatgtggactctttatatttttgcttcgtgactttctccaccatcggcttcggggatcttgtctcttcccagcacgccgcatacagaaaccaggggttatatcggctgggcaactttctattcattctgctgggggtttgctgcatttattccctgtttaacgttatctcaatacttataaagcaggtgctgaactggatgctccggaaattaagttgtcgctgctgcgcgcgatgctgtccagcgcccggggcccctctcgccagaaggaatgccattacacctggctcacgtctccggcgtaggctcgcagcactgggcgctgatccagctgccagagattccgacgccgaagggcggcgactgtctggagagttaattagtatgagggacctgactgcgtccaacaaagttagcctcgcactgctgcagaaacagctgtccgagacggccaatggctacccaagatccgtatgcgtgaacacacgtcaaaacggttttagcggcggtgtcggagctctgggaatcatgaacaataggctagctgagacaagcgccagtagatag

SEQ ID NO: 211096 - DNA, 1293 bp, Artificial Sequence
  derived and/or modified sequence
atgagcagccgcagcccccggcccccaccaagaagaagcagaagaaggctgccccggcccagctgctgctgctgctgctgccgccgcagccacctgaatgaagacaccggccgctttgtgctgctggccgccctgattggcctgtacctggtggccggggccaccgtcttcagcgccctggagagccctggagaggccgaggcccgggcccgctggggcgccaccctgaggaacttctctgctgcccatggagtggccgagcctgagctgcgggccttcctgcggcactatgaagctgccctggccgccggcgtgcgggcagatgccctgcggccccgctgggacttccctggggccttctactttgtgggcaccgtggtgtccaccatcggcttcggcatgaccaccccagccaccgtgggcggcaaggccttcctgattgcctacggcctgtttggctgtgccggcaccatcctcttcttcaacctcttcctggagcgcatcatcagcctgctggccttcatcatgagggcctgccgggagcggcagctgcggcgcagcggcctgctgcctgccaccttcagaagaggcagcgccctgtctgaggccgacagcctggccggctggaagcccagcgtgtaccacgtgctgctgatcctgggcctgtttgctgtgctgctgagctgctgtgccagcgccatgtacacctctgtggagggctgggactatgtggacagcctgtacttctgctttgtgaccttcagcaccatcggctttggagacctggtgagcagccagcacgccgcctacagaaaccagggcctgtaccgcctgggcaacttcctgttcatcctgctgggcgtgtgctgcatctacagcctcttcaacgtcatcagcatcctgatcaagcaggtgctgaactggatgctgaggaagctgagctgccgctgctgtgcccgctgctgcccagcccctggggcccccctggccaggagaaatgccatcaccccaggcagccggctgcggcggcggctggccgccctgggcgctgaccctgctgcccgggacagtgatgctgagggccggcggctgtctggagagctgatctccatgagggacctgacagccagcaacaaggtgtccctggccctgctgcagaagcagctgtctgaaacagccaacggctaccccaggtctgtgtgtgtgaacacccggcagaatggcttcagcggcggcgtgggcgccctgggcatcatgaacaaccggctggccgagaccagcgccagcaggtag

SEQ ID NO: 211097 - DNA, 1293 bp, Artificial Sequence
  derived and/or modified sequence
atgagcagccggagcccccggccccccccccggcggagccggcggaggctaccaaggccttcttgctgttgctgttgctgtcgaaggtctcacctcaacgaggacacaggaagattcgtcctactggcggcgttgatcggactttacctggtggccggagcgactgttttttctgctttagaatcgcccggcgaggccgaagcgcgggccaggtggggcgcgaccctgagaaatttctcagccgcacatggggtcgcagagcccgaactgagggccttcttgcggcattacgaggcagctctggcagccggcgtacgggcagatgctctccggcctcgatgggacttccctggagcattctattttgtgggcacagtcgtctccacgatcggcttcgggatgaccacccctgcgaccgtgggggggaaagcatttttgatcgcttatggcctattcggatgcgcaggaacgatattgtttttcaacctgttccttgaaaggataatcagcctcctggcctttatcatgagggcttgtcgcgaaaggcagttaagacggagcgggttgctgcctgcaacttttaggcgcggttccgccttgagtgaagcagatagcctcgccggctggaaaccgagcgtgtaccatgtcctcctgattttgggtctgtttgccgtgctgctttcttgttgtgcttccgcaatgtacacctccgttgagggctgggattatgtggatagcctctatttctgtttcgtaacttttagtaccatcggtttcggtgatctggtgagctctcagcacgccgcttaccgaaatcaggggctgtacaggcttggcaatttcttatttattctcctcggcgtctgctgcatttacagcctgttcaacgtgataagcatcctaatcaaacaggtactgaactggatgcttaggaagctctcctgccgctgttgtgcccgctgttgtcctgctcctggcgctcccctggctagacgaaatgcaatcacgccaggatctcgcctccggagacggctcgccgctttaggcgctgatcccgccgcccgggacagtgatgcggagggaaggcgtctaagtggagagcttatttcaatgcgggacctcaccgcctccaacaaggtgtctcttgcactactccaaaaacagttatccgagaccgcaaacggctatccccgttctgtctgcgtgaacacccgccagaacggtttttccgggggtgtcggagctctggggattatgaataaccggctggccgaaaccagtgcctcccgctag

SEQ ID NO: 211098 - DNA, 2037 bp, Artificial Sequence
  derived and/or modified sequence
gaaaggagcgcttccccggactcggctcggctccgaggctctgaagccgacgccgccagctcagccccgggggcgggagcaggactgcccgcacagcccgcacctaggaggcgccgatcccgaacgcctcatgggacgcccccgggggctctctccacgccttgctgccgcgtcccggtcctaggcgcccgggatccacggcccaccccgcccgcagcccgcggcctgtctggagaggagtatgaggcccggggccccgcggacgccggccaccgggcggcaggggcctagctgcggagccccgcgcccgagagcggcgggtaaggagccgcgggagccggcgaggcgtcggggcgcgcagaggagcgcccctgcccgggcacccgctgggccacgggactcgcgtgtggcctgagcgccggggaggaggcggaggcgcccctctgtccgggctctgggaaggcgacgaggggctctgcgaaggcggcgaggggctccgcggcggccccggacccctggccaccatcctcacgctcctgctcccgccggggggatgtcgtggcccgggccccgagcgccgccccggccccggggctgagctccggaccatgtcctcccgcagcccccggcccccgccccgccgtagccgccgccgcctgccgcgcccctcctgctgctgctgctgctgccgccgttcgcacctcaacgaggacaccggccgcttcgtgctgctggcggcgctcatcggcctctacctggtggcgggtgccacagtcttctcggcgctcgagagccccggcgaggcggaggcgcgggcgcgctggggcgccacgctgcgcaacttcagcgctgcgcacggcgtggccgagccagagctgcgcgccttcctccggcactacgaggccgcgctggccgccggcgtccgcgccgacgcgctgcgcccgcgctgggacttccccggcgccttctacttcgtgggcaccgtggtgtcaaccataggtttcggcatgaccacccccgcgacggtgggcgggaaggccttcctcatcgcctacgggctgttcggctgcgctgggaccatcctgttcttcaacctcttcctggagcgcatcatctcgctgctggccttcatcatgcgcgcctgccgggagcgccagctgcgccgcagcggcctgctgcccgccaccttccgccgcggctccgcgctctcggaggccgacagcctggcgggctggaagccctcggtgtaccacgtgctgctcatcctgggcctgttcgccgtgctgctgtcctgctgcgcctcggccatgtacaccagcgtggagggctgggactacgtggactcgctctacttctgcttcgtcaccttcagcaccatcggcttcggggacctggtgagcagccagcacgccgcctaccggaaccaggggctctaccgcctgggcaacttcctcttcatcctgctcggcgtgtgctgcatttactcgctcttcaacgtcatctccatcctcatcaagcaggtgctcaactggatgctgcgcaagctgagctgccgctgctgcgcgcgctgctgcccggctcctggcgcgcccctggcccggcgcaatgccatcaccccaggctcccggctgcgccgccgcctggccgcgctcggtgccgaccccgcggcccgcgacagcgacgccgagggccgccgcctctcgggcgagctcatctccatgcgcgacctcacggcctccaacaaggtgtcgctggcgctgctgcagaagcagctgtcggagacggccaacggctacccgcgcagcgtgtgcgtcaacacgcgccagaacggcttctcgggcggcgtgggcgcgctgggcatcatgaacaaccggctggccgagaccagcgcctccaggtagaccgcccgtccgcccgcgccggggaccctctccaggccgcggggccgccgggcgtggtttgcttctctcagtcactgctggcgctttcttaatctttatccaataaaatgaaacaaaaaaaatttttttaaagaaa

SEQ ID NO: 211099 - DNA, 1293 bp, Artificial Sequence
  derived and/or modified sequence
atgagtagccgctcaccacgccctcccccacgccgttctaggcgccgacttccaaggccgagctgctgttgctgctgctgtcgacgctcccatctgaacgaagataccgggcgttttgtcctgttggctgccctgataggactatacctggtcgcaggggctaccgttttcagcgctttggagtcccccggagaggctgaagcacgcgctcgctggggggcaacgttgaggaatttttccgcagcacatggagtcgccgaaccagagctgcgagcctttctacgtcactatgaggccgcacttgctgccggtgttcgggctgatgccttacggccacgctgggatttcccgggagctttttacttcgtgggaaccgtggtcagcactatcggctttggcatgactaccccagccacagtaggcggaaaagctttcctgatcgcctacggtctgtttggttgcgctggaacaatcctgtttttcaatctgtttctagaacggataatttcactgctagctttcattatgagggcctgtcgtgagcggcagcttcggaggagtgggctgcttcctgctaccttccgtcgagggagcgctctcagtgaggcagatagtctcgccggttggaagccgtctgtttaccacgtgctgttgatcctgggtctttttgccgtcttgctgtcatgttgcgcgtctgcaatgtatacctctgtcgagggttgggactatgtggattcgctgtatttctgctttgtcactttttcaacaatcggcttcggagacctggtatcatcccaacacgctgcctacagaaaccagggtctttaccgcctgggaaattttctgttcatcttgctaggcgtttgctgtatttacagtctatttaacgtgatctccatattgattaagcaggtactcaactggatgctgcgtaagctgagctgccggtgttgcgccagatgctgtccggcacctggggctccactcgcgaggaggaacgccattacacctggtagtcgactccggagacgcttagccgcactgggagcagacccagccgctcgggattccgacgccgagggcagacgactcagcggcgaactgataagcatgagagacctcaccgctagtaataaggtgtcacttgccttgctccagaaacagctgtccgaaacagcaaatggctatccgcgatctgtctgcgtgaacactagacagaacggattctccggcggtgtgggcgctctgggcatcatgaataaccgactggccgagaccagcgcaagtagatag

SEQ ID NO: 211100 - DNA, 1293 bp, Artificial Sequence
  derived and/or modified sequence
atgagcagcagaagccccagacccccccccagaagaagcagaagaagactgcccagacccagctgctgctgctgctgctgcagaagaagccacctgaacgaggacaccggcagattcgtgctgctggccgccctgatcggcctgtacctggtggccggcgccaccgtgttcagcgccctggagagccccggcgaggccgaggccagagccagatggggcgccaccctgagaaacttcagcgccgcccacggcgtggccgagcccgagctgagagccttcctgagacactacgaggccgccctggccgccggcgtgagagccgacgccctgagacccagatgggacttccccggcgccttctacttcgtgggcaccgtggtgagcaccatcggcttcggcatgaccacccccgccaccgtgggcggcaaggccttcctgatcgcctacggcctgttcggctgcgccggcaccatcctgttcttcaacctgttcctggagagaatcatcagcctgctggccttcatcatgagagcctgcagagagagacagctgagaagaagcggcctgctgcccgccaccttcagaagaggcagcgccctgagcgaggccgacagcctggccggctggaagcccagcgtgtaccacgtgctgctgatcctgggcctgttcgccgtgctgctgagctgctgcgccagcgccatgtacaccagcgtggagggctgggactacgtggacagcctgtacttctgcttcgtgaccttcagcaccatcggcttcggcgacctggtgagcagccagcacgccgcctacagaaaccagggcctgtacagactgggcaacttcctgttcatcctgctgggcgtgtgctgcatctacagcctgttcaacgtgatcagcatcctgatcaagcaggtgctgaactggatgctgagaaagctgagctgcagatgctgcgccagatgctgccccgcccccggcgcccccctggccagaagaaacgccatcacccccggcagcagactgagaagaagactggccgccctgggcgccgaccccgccgccagagacagcgacgccgagggcagaagactgagcggcgagctgatcagcatgagagacctgaccgccagcaacaaggtgagcctggccctgctgcagaagcagctgagcgagaccgccaacggctaccccagaagcgtgtgcgtgaacaccagacagaacggcttcagcggcggcgtgggcgccctgggcatcatgaacaacagactggccgagaccagcgccagcagatag

SEQ ID NO: 211101 - protein, 1088 aa, Artificial Sequence
  derived and/or modified sequence
MEIKDQGAQMEPLLPTRNDEEAVVDRGGTRSILKTHFEKEDLEGHRTLFIGVHVPLGGRKSHRRHRHRGHKHRKRDRERDSGLEDGRESPSFDTPSQRVQFILGTEDDDEEHIPHDLFTELDEICWREGEDAEWRETARWLKFEEDVEDGGERWSKPYVATLSLHSLFELRSCILNGTVLLDMHANTLEEIADMVLDQQVSSGQLNEDVRHRVHEALMKQHHHQNQKKLTNRIPIVRSFADIGKKQSEPNSMDKNAGQVVSPQSAPACVENKNDVSRENSTVDFSKVDLHFMKKIPPGAEASNILVGELEFLDRTVVAFVRLSPAVLLQGLAEVPIPTRFLFILLGPLGKGQQYHEIGRSIATLMTDEVFHDVAYKAKDRNDLVSGIDEFLDQVTVLPPGEWDPSIRIEPPKNVPSQEKRKIPAVPNGTAAHGEAEPHGGHSGPELQRTGRIFGGLILDIKRKAPYFWSDFRDAFSLQCLASFLFLYCACMSPVITFGGLLGEATEGRISAIESLFGASMTGIAYSLFGGQPLTILGSTGPVLVFEKILFKFCKEYGLSYLSLRASIGLWTATLCIILVATDASSLVCYITRFTEEAFASLICIIFIYEALEKLFELSEAYPINMHNDLELLTQYSCNCVEPHNPSNGTLKEWRESNISASDIIWENLTVSECKSLHGEYVGRACGHDHPYVPDVLFWSVILFFSTVTLSATLKQFKTSRYFPTKVRSIVSDFAVFLTILCMVLIDYAIGIPSPKLQVPSVFKPTRDDRGWFVTPLGPNPWWTVIAAIIPALLCTILIFMDQQITAVIINRKEHKLKKGCGYHLDLLMVAVMLGVCSIMGLPWFVAATVLSITHVNSLKLESECSAPGEQPKFLGIREQRVTGLMIFILMGSSVFMTSILKFIPMPVLYGVFLYMGASSLKGIQFFDRIKLFWMPAKHQPDFIYLRHVPLRKVHLFTIIQMSCLGLLWIIKVSRAAIVFPMMVLALVFVRKLMDLLFTKRELSWLDDLMPESKKKKLEDAEKEEEQSMLAMEDEGTVQLPLEGHYRDDPSVINISDEMSKTALWRNLLITADNSKDKESSFPSKSSPS

SEQ ID NO: 211102 - DNA, 3267 bp, Artificial Sequence
  derived and/or modified sequence
atggagatcaaggaccagggcgcccagatggagcccctgctgcccaccagaaacgacgaggaggccgtggtggacagaggcggcaccagaagcatcctgaagacccacttcgagaaggaggacctggagggccacagaaccctgttcatcggcgtgcacgtgcccctgggcggcagaaagagccacagaagacacagacacagaggccacaagcacagaaagagagacagagagagagacagcggcctggaggacggcagagagagccccagcttcgacacccccagccagagagtgcagttcatcctgggcaccgaggacgacgacgaggagcacatcccccacgacctgttcaccgagctggacgagatctgctggagagagggcgaggacgccgagtggagagagaccgccagatggctgaagttcgaggaggacgtggaggacggcggcgagagatggagcaagccctacgtggccaccctgagcctgcacagcctgttcgagctgagaagctgcatcctgaacggcaccgtgctgctggacatgcacgccaacaccctggaggagatcgccgacatggtgctggaccagcaggtgagcagcggccagctgaacgaggacgtgagacacagagtgcacgaggccctgatgaagcagcaccaccaccagaaccagaagaagctgaccaacagaatccccatcgtgagaagcttcgccgacatcggcaagaagcagagcgagcccaacagcatggacaagaacgccggccaggtggtgagcccccagagcgcccccgcctgcgtggagaacaagaacgacgtgagcagagagaacagcaccgtggacttcagcaaggtggacctgcacttcatgaagaagatcccccccggcgccgaggccagcaacatcctggtgggcgagctggagttcctggacagaaccgtggtggccttcgtgagactgagccccgccgtgctgctgcagggcctggccgaggtgcccatccccaccagattcctgttcatcctgctgggccccctgggcaagggccagcagtaccacgagatcggcagaagcatcgccaccctgatgaccgacgaggtgttccacgacgtggcctacaaggccaaggacagaaacgacctggtgagcggcatcgacgagttcctggaccaggtgaccgtgctgccccccggcgagtgggaccccagcatcagaatcgagccccccaagaacgtgcccagccaggagaagagaaagatccccgccgtgcccaacggcaccgccgcccacggcgaggccgagccccacggcggccacagcggccccgagctgcagagaaccggcagaatcttcggcggcctgatcctggacatcaagagaaaggccccctacttctggagcgacttcagagacgccttcagcctgcagtgcctggccagcttcctgttcctgtactgcgcctgcatgagccccgtgatcaccttcggcggcctgctgggcgaggccaccgagggcagaatcagcgccatcgagagcctgttcggcgccagcatgaccggcatcgcctacagcctgttcggcggccagcccctgaccatcctgggcagcaccggccccgtgctggtgttcgagaagatcctgttcaagttctgcaaggagtacggcctgagctacctgagcctgagagccagcatcggcctgtggaccgccaccctgtgcatcatcctggtggccaccgacgccagcagcctggtgtgctacatcaccagattcaccgaggaggccttcgccagcctgatctgcatcatcttcatctacgaggccctggagaagctgttcgagctgagcgaggcctaccccatcaacatgcacaacgacctggagctgctgacccagtacagctgcaactgcgtggagccccacaaccccagcaacggcaccctgaaggagtggagagagagcaacatcagcgccagcgacatcatctgggagaacctgaccgtgagcgagtgcaagagcctgcacggcgagtacgtgggcagagcctgcggccacgaccacccctacgtgcccgacgtgctgttctggagcgtgatcctgttcttcagcaccgtgaccctgagcgccaccctgaagcagttcaagaccagcagatacttccccaccaaggtgagaagcatcgtgagcgacttcgccgtgttcctgaccatcctgtgcatggtgctgatcgactacgccatcggcatccccagccccaagctgcaggtgcccagcgtgttcaagcccaccagagacgacagaggctggttcgtgacccccctgggccccaacccctggtggaccgtgatcgccgccatcatccccgccctgctgtgcaccatcctgatcttcatggaccagcagatcaccgccgtgatcatcaacagaaaggagcacaagctgaagaagggctgcggctaccacctggacctgctgatggtggccgtgatgctgggcgtgtgcagcatcatgggcctgccctggttcgtggccgccaccgtgctgagcatcacccacgtgaacagcctgaagctggagagcgagtgcagcgcccccggcgagcagcccaagttcctgggcatcagagagcagagagtgaccggcctgatgatcttcatcctgatgggcagcagcgtgttcatgaccagcatcctgaagttcatccccatgcccgtgctgtacggcgtgttcctgtacatgggcgccagcagcctgaagggcatccagttcttcgacagaatcaagctgttctggatgcccgccaagcaccagcccgacttcatctacctgagacacgtgcccctgagaaaggtgcacctgttcaccatcatccagatgagctgcctgggcctgctgtggatcatcaaggtgagcagagccgccatcgtgttccccatgatggtgctggccctggtgttcgtgagaaagctgatggacctgctgttcaccaagagagagctgagctggctggacgacctgatgcccgagagcaagaagaagaagctggaggacgccgagaaggaggaggagcagagcatgctggccatggaggacgagggcaccgtgcagctgcccctggagggccactacagagacgaccccagcgtgatcaacatcagcgacgagatgagcaagaccgccctgtggagaaacctgctgatcaccgccgacaacagcaaggacaaggagagcagcttccccagcaagagcagccccagctag

SEQ ID NO: 211103 - DNA, 3267 bp, Artificial Sequence
  derived and/or modified sequence
atggagattaaagatcaaggggctcagatggagccccttctgcctactcgtaatgatgaagaagcagttgtggatcgcgggggtaccaggtctatcttgaagacacactttgagaaggaggacctggaaggccatcgcacattattcattggcgtacacgtcccactgggcggacgaaagagtcatcggcggcatcgccaccgcgggcacaagcaccgaaagagggatcgcgagcgcgatagcgggcttgaagatggcagagaaagtccatcattcgacacacccagccagcgcgtccagtttattctggggacagaagatgacgacgaggagcacatacctcacgatctgtttacagagctggatgaaatctgctggcgagagggcgaagatgccgagtggagggaaacagcccgttggctgaaatttgaggaggacgttgaggatggaggggaacgctggtccaaaccgtacgttgccaccctatctctgcattctctcttcgaactcagatcctgcatcctcaacggcacggtgctgctggacatgcatgccaacacactggaagaaatcgccgatatggttctggaccagcaagtgagctccgggcagttaaatgaagatgttcggcaccgggttcatgaagccctgatgaagcagcaccaccatcagaatcagaaaaagctgactaaccgcattccaattgtacggtctttcgctgatatcggtaaaaagcagtcggagccaaactccatggataaaaacgccggacaggtcgtgagtcctcagtcggcccctgcttgtgtagagaataaaaacgacgtgtctagagagaatagtactgtggatttttctaaggtagatttgcatttcatgaaaaaaatccccccgggggcggaagcgtctaatatcttggtgggtgagctcgaatttcttgatagaacggtcgtcgcttttgttcgcctttcccctgcagtgttgttgcagggactggccgaggtgcccatccccacccggtttctgtttatcctcctaggccctctgggcaagggccagcaatatcatgaaataggcagatcaatcgccaccctcatgaccgacgaggtgttccacgacgtggcttacaaggcaaaagacagaaacgacctggtgtcaggtatagacgagttcttagatcaggttactgtattaccccctggagagtgggacccaagtatcaggatcgaaccacccaagaacgtcccctcccaagagaaaagaaaaattccagcggtgccaaatggcaccgctgcacacggcgaagccgagcctcatgggggccactcaggtcccgagttgcaaaggacaggccgtatttttggggggctgatcctggatattaaaaggaaggcgccttacttttggagtgacttccgggacgcattctctctgcagtgtctggcctctttcctgttcctgtattgcgcctgtatgtcccctgttataaccttcggtggcttactgggagaagctacggagggaaggatctcagccatcgagtcactgttcggggcatctatgacgggcattgcgtactccctctttggaggccagcctctgacgatactgggcagcacaggtccagtcctggtctttgagaagattctgtttaaattctgtaaggaatacggcctgtcgtaccttagcctgagggcatctattggcctttggacagctacactctgcattattctggtcgctacagacgcctcctccctcgtctgctacataaccagatttacagaggaagcctttgcctcacttatatgtattatttttatctacgaggccctggagaaactttttgagctgagcgaggcgtatccaattaatatgcacaatgacttggaactcctgacccagtactcctgtaattgcgtcgaaccccataatcctagtaatggtactcttaaagagtggcgggagagcaatatcagcgcctctgacatcatctgggagaatctgacggtgagcgagtgcaaatctctacacggcgaatatgtgggacgggcatgtgggcatgatcacccctatgttcctgatgttttattctggtctgtgatactgttcttttccacggtgaccttatcggccaccctgaagcagtttaaaacgtctaggtattttcccaccaaagtcaggtccatagtttccgactttgctgtcttccttaccattttatgcatggtcctgatagattatgccattggaattccttcaccaaagctccaggtgccttctgtgttcaagcctactcgggatgatcgcggctggttcgtcacacccctgggcccaaacccctggtggacagtaatcgccgctataattcccgccttattatgcacaatattaattttcatggatcagcagatcactgctgtgatcattaatcgcaaggagcacaagctcaagaagggttgcgggtatcacctggatttactgatggtggccgtgatgctgggagtgtgctcgattatggggcttccgtggttcgttgctgccacggtgcttagcatcacacatgtcaattcacttaagttggaatccgaatgtagtgccccaggcgagcagcccaagttcctggggatccgcgagcagagggtgacaggcttgatgattttcatcctgatggggtcctccgtgtttatgaccagtattttgaaattcatcccaatgcctgttctctatggggtgtttctttacatgggagccagttcactcaaaggcattcagttttttgataggattaagctcttttggatgccggctaagcatcagccagattttatctacctgaggcacgtgccccttcgcaaagtgcatttgtttactattatccagatgagctgcctcggtttactgtggattataaaggtgagcagagcagccattgtgttccctatgatggtcctcgcgcttgtgtttgtgcggaaattaatggacctgctgttcacaaagagggagctcagctggttggacgatttgatgcccgaatctaagaaaaagaagctggaagatgccgagaaggaagaggaacagagtatgctggcgatggaggacgagggaaccgtccagctgcccctggaaggccattatcgggatgacccctccgtgatcaacataagtgacgagatgtccaaaacagctctgtggcggaacctattgattaccgctgataatagcaaagataaggaatcttccttcccatctaagtccagtccatcttag

SEQ ID NO: 211104 - DNA, 3267 bp, Artificial Sequence
  derived and/or modified sequence
atggagatcaaggaccagggcgcccagatggagcccctgctgcccaccagaaatgatgaggaggccgtggtggacagaggaggcaccaggagcatcctgaagacccactttgagaaggaggacctggagggccacaggaccctcttcatcggcgtgcacgtgcccctgggcggcaggaagagccacagaagacaccgccaccggggccacaagcacaggaagagggaccgggagcgggacagcggcctggaggatggccgggagagccccagctttgacacccccagccagagggtgcagttcatcctgggcacagaagatgatgatgaggagcacatcccccatgacctcttcacagagctggatgagatctgctggagggagggggaggatgctgagtggagggagacagcccgctggctgaagtttgaagaagatgtggaggatggaggagagcgctggagcaagccctacgtggccaccctgagcctgcacagcctgtttgagctgcggagctgcatcctgaatggcaccgtgctgctggacatgcacgccaacaccctggaggagattgctgacatggtgctggaccagcaggtgagcagcggccagctgaatgaagatgtgcgccaccgggtgcatgaggccctgatgaagcagcaccaccaccagaaccagaagaagctgaccaaccgcatccccatcgtgcgcagctttgctgacatcggcaagaagcagagcgagcccaacagcatggacaagaatgccggccaggtggtgagcccccagagcgccccagcctgtgtggagaacaagaatgatgtgtcccgggagaacagcacagtggacttcagcaaggtggacctgcacttcatgaagaagatccccccaggagctgaggccagcaacatcctggtgggggagctggagttcctggacagaacagtggtggcctttgtgcggctgagccctgctgtgctgctgcagggcctggccgaggtgcccatccccacccgcttcctgttcatcctgctgggccccctgggcaagggccagcagtaccatgaaattggccgcagcatcgccaccctgatgacagatgaggtgttccatgatgtggcctacaaggccaaggacagaaatgacctggtgtctggaattgatgagttcctggaccaggtgacagtgctgcccccaggagagtgggaccccagcatccgcatcgagccccccaagaatgtgcccagccaggagaagaggaagatcccagctgtgcccaatggaacagctgcccacggggaggccgagccccacggcggccacagcggccctgagctgcagaggacaggccgcatctttggaggcctcatcctggacatcaagaggaaggccccctacttctggagcgacttcagagatgccttcagcctgcagtgcctggccagcttcctgttcctgtactgtgcctgcatgagccctgtgatcacctttggaggcctgctgggggaggccacagagggccgcatcagcgccatcgagagcctgtttggagcctccatgactggaattgcctacagcctgtttggaggccagcccctgaccatcctgggcagcactggacctgtgctggtgtttgagaagatcctcttcaagttctgcaaggagtatggcctgagctacctgagcctgcgggccagcatcggcctgtggacagccaccctgtgcatcatcctggtggccacagatgccagcagcctggtgtgctacatcacccgcttcacagaggaggcctttgccagcctcatctgcatcatcttcatctatgaggccctggagaagctgtttgagctgtctgaggcctaccccatcaacatgcacaatgacctggagctgctgacccagtacagctgcaactgtgtggagccccacaaccccagcaatggcaccctgaaggagtggagggagagcaacatcagcgccagtgacatcatctgggagaacctgactgtgtctgagtgcaagagcctgcatggagaatatgtgggccgggcctgtggccatgaccacccctacgtgcctgatgtgctcttctggagcgtcatcctcttcttcagcacagtgaccctgagcgccaccctgaagcagttcaagaccagccgctacttccccaccaaggtgcgcagcatcgtgtctgactttgctgtgttcctgaccatcctgtgcatggtgctgattgattatgccatcggcatccccagccccaagctgcaggtgcccagcgtcttcaagcccaccagagatgaccggggctggtttgtgacccccctgggccccaacccctggtggacagtgattgctgccatcatcccagccctgctgtgcaccatcctgatcttcatggaccagcagatcacagctgtgatcatcaacaggaaggagcacaagctgaagaagggctgcggctaccacctggacctgctgatggtggccgtgatgctgggcgtgtgcagcatcatgggcctgccctggtttgtggccgccaccgtgctgagcatcacccacgtgaacagcctgaagctggagagtgaatgttctgcccctggagagcagcccaagttcctgggcatccgggagcagagggtgacaggcctgatgatcttcatcctgatgggcagctctgtgttcatgaccagcatcctgaagttcatccccatgcctgtgctgtatggagtcttcctgtacatgggcgccagcagcctgaagggcatccagttctttgaccgcatcaagctgttctggatgcctgccaagcaccagcctgacttcatctacctgcggcacgtgcccctgaggaaggtgcacctgttcaccatcatccagatgagctgcctgggcctgctgtggatcatcaaggtgtccagagctgccatcgtgttccccatgatggtgctggccctggtgtttgtgaggaagctgatggacctgctcttcaccaagcgggagctgtcctggctggatgacctgatgcctgagagcaagaagaagaagctggaggatgctgagaaggaggaggagcagagcatgctggccatggaggatgagggcaccgtgcagctgcccctggagggccactacagagatgaccccagcgtcatcaacatcagtgatgagatgagcaagacagccctgtggaggaacctgctgatcacagctgacaacagcaaggacaaggagagcagcttccccagcaagagcagccccagctag

SEQ ID NO: 211105 - DNA, 3267 bp, Artificial Sequence
  derived and/or modified sequence
atggagatcaaggaccagggcgcccagatggagcccctgctgcccacccgcaacgacgaagaggccgttgtcgacagaggaggtacacgatcaattctgaagacacatttcgagaaagaggacttagagggtcacaggaccttatttattggcgtccatgtgccactgggcgggcgaaagtctcatagaagacacagacacaggggccacaagcaccgcaagagggatagggagagagattccggattagaggacggaagggaatctccctcttttgacaccccttcccagagagtacagtttatcctcggcactgaagacgacgatgaggaacacataccccacgatcttttcaccgagctagacgaaatatgctggagagagggagaggacgctgagtggcgcgagacagcccgttggctcaaattcgaagaggatgtagaagacggaggggagcgctggtctaagccctatgttgcaacgctctccctacattcattatttgagctacgctcttgcatattaaatggcacggtgctgctggatatgcacgcaaacacgttagaggagattgcagacatggttctggatcaacaggtgtcctctggccagctgaatgaggacgtcaggcaccgcgtacacgaggcactgatgaagcagcaccatcaccaaaaccaaaaaaaactgactaatagaattcccattgtgcgcagttttgctgacatcgggaaaaaacaatcagagcctaactcgatggataagaacgctggccaagtcgttagcccacaatcggcaccggcatgcgtagagaataaaaacgacgtaagtcgggagaatagcacagtagacttttcaaaagtcgatctacatttcatgaagaagataccccctggtgccgaggcatccaatatcctggtcggggaactggagttcctggacagaaccgtcgtcgccttcgtccgtctctcccctgcagtcttgctgcaggggctcgctgaggtcccaatccctacccgttttctgttcattctgttgggtccgctggggaagggccaacagtatcatgaaatcggacgatcaatcgccacactgatgacagacgaagtgtttcacgacgttgcatacaaagccaaagaccggaatgacctggtttcaggcattgacgagttcttggaccaagttacggttctgccccccggcgaatgggatccttcgatcaggatagagccacccaaaaacgttccttcccaggagaagcgaaagattcctgccgtgcccaacggcacggccgcacacggagaagctgaacctcacggggggcacagtggcccagagttgcaaaggacaggccgcatctttggggggctgatcttagacataaaacggaaagcgccttatttttggtccgattttcgggatgccttctctctgcagtgcctggcatctttcctgttcctgtattgcgcatgtatgtcccctgttatcaccttcgggggcctcctaggggaggccactgaaggtcggatttccgccatcgagtcgctgttcggagcaagcatgaccgggatcgcctattctctgttcggaggtcaacctttaactattctgggttccacaggaccagtgctagtgttcgaaaaaatcctattcaagttttgcaaggaatatggtctctcttacctgtccctgagggccagcattggcctgtggacagcaaccctgtgcattatcctggtcgctaccgacgcatctagcctggtctgctacatcacaaggtttaccgaggaagcatttgcctctttgatctgtattatcttcatatacgaagcacttgaaaaactctttgaactttcagaggcttacccaatcaatatgcataatgacctcgaactgctcactcaatactcttgcaactgcgtcgagccccacaacccgtccaacggcactctgaaggagtggcgcgagagcaatatttccgcctctgatattatttgggaaaacctgacggtgagcgaatgcaagagcctccacggagagtacgtcggcagggcatgtggacatgaccacccttacgttcctgatgtgctcttttggtctgtcatccttttttttagtaccgtcactctctccgcaacactgaaacagttcaagacgtccaggtacttcccaactaaggtgaggtccatcgtttctgacttcgccgtattcctaacaatcctgtgcatggtcctcattgattacgctatcggaatacccagccctaagctgcaagtgcccagcgtgtttaagcccacacgggatgatcgaggctggttcgtgacaccattaggcccaaacccatggtggaccgttatagctgctatcattcctgctctcttgtgcaccatactgatctttatggaccagcagattaccgccgtgatcatcaaccgcaaagaacacaagctaaaaaagggatgcggataccatctggacttgcttatggtcgcagtgatgctgggtgtttgttccattatggggctgccctggtttgtggccgccacggtcctgagcattacccatgtgaactctctcaagttggagtcagagtgttccgccccgggggagcaaccaaagttcctgggaatcagagaacaacgagtcacaggtttaatgatttttatactgatgggaagctccgtgtttatgacttctatcttgaagtttattcccatgcctgtgctttacggggtttttctgtacatgggggcttcaagtctgaaaggcattcagttttttgaccggattaagctgttttggatgcctgctaagcaccaacccgactttatctatctgcggcatgtacctctacggaaggtgcacctgtttactatcatacagatgagctgcttggggctcctgtggattataaaggtcagcagagccgctattgtgttccctatgatggttctggcgctcgtctttgttcgcaagctgatggacctgcttttcacaaagcgcgaactgtcttggctcgacgacttaatgcctgagtctaaaaagaagaaactggaagacgcagaaaaagaggaagaacaatcaatgctggccatggaagacgagggtactgtgcagctccctcttgaagggcattatcgggacgacccatccgttatcaacatttctgacgagatgtcaaagaccgcactctggcggaatctgctgataacagctgacaactcaaaggataaggaatcatcattcccctcaaagtccagccctagctag

SEQ ID NO: 211106 - DNA, 3267 bp, Artificial Sequence
  derived and/or modified sequence
atggaaataaaagatcaaggagcccagatggagcccttattaccgactcggaacgacgaagaggctgtcgtggaccgtggcggaacccgttctattcttaaaacccattttgaaaaggaagatctcgagggccataggacgctctttatcggggtccatgtacccttaggagggagaaagtcccacaggagacaccggcacaggggacacaagcataggaagagagacagggagcgcgattcaggactcgaagatggccgtgaatcaccctccttcgatacaccttctcagcgtgtacaatttatactgggaaccgaggacgatgacgaggagcatatcccacatgacctgttcaccgagctggatgagatctgctggcgagaaggagaagacgcagagtggagggagactgctcgatggctgaaattcgaagaagacgtggaggacggtggagagagatggagtaaaccgtatgtcgcaacattaagcctgcacagcttatttgaactccgaagttgcatcttgaacggtacagtgctccttgacatgcatgccaacaccctcgaggaaatcgcagacatggttctggaccagcaggtgagttctggtcagctgaacgaggacgtacggcatagagtccacgaggccctgatgaagcagcaccaccatcagaatcagaaaaaattgacaaatagaattcccattgtccgaagctttgctgacattggcaagaagcagtctgaacccaactcaatggacaagaacgctgggcaagtcgtttcacctcagagcgctccagcgtgtgtggagaacaagaatgatgtgtcacgcgagaactcaacggtcgattttagcaaggtcgatctgcactttatgaaaaaaatcccccctggcgctgaggcgtcaaacatcctcgtgggcgaactcgagttcctggacaggacagttgtcgcttttgtgcgcctctctccagcagtgctcctgcagggactcgcagaggttccaattccaaccaggttcctgtttattttgcttggtcccctgggcaaagggcagcagtatcatgaaattggaaggtctatagccactttaatgaccgacgaggtgttccacgacgtcgcttacaaggcgaaggatagaaacgatctagtgtcaggtattgatgaatttctggaccaggtgactgtcctgcccccaggtgagtgggacccctctatcagaatcgagccgccaaaaaacgtcccatcgcaggagaagaggaagatacctgccgtccctaacggaacggccgcacacggggaagcagagccccatggtgggcattccggtccggagctgcagcggacagggcgaatattcgggggtctcattctcgatattaagcgcaaggccccatacttctggagcgattttcgggacgctttctcactgcaatgtctggctagtttcctgtttctgtactgtgcctgtatgtccccagtgataacctttgggggactcctcggggaagccacagaagggcgaatcagtgctatcgaaagtctatttggtgcaagtatgacaggcatcgcatattctctgttcggtggacaacctctgacgatcctcggctcaaccgggcctgtactcgtattcgagaagatcttgttcaaattctgtaaagagtatgggttgagttacctcagtttacgtgcctccataggactttggacggccactttatgcatcatcctggtggccactgatgctagcagccttgtgtgctatattacacggttcaccgaagaggcctttgcgtcactgatctgtattatctttatatacgaggctttggaaaaactttttgagcttagtgaggcctaccctatcaacatgcacaatgaccttgagctgctcacccagtacagttgtaactgtgtggaacctcataatccttctaacggcacacttaaggagtggagggaaagcaacatcagtgcgtctgatattatttgggagaacctaactgtttctgaatgtaagtcactacacggagaatatgttggaagagcctgcgggcacgatcatccctacgtgcccgacgtccttttttggtccgtcatactcttcttttctactgtaactttgtcagcaacgctgaaacagttcaagacatccaggtattttcccactaaggtccggagcatcgtatcagacttcgcagtgtttctgactatcctctgcatggttcttattgattatgctattggcatcccctcacccaagcttcaagttccctctgtttttaagcctactagggacgatcgcggatggtttgtgacacctcttggcccaaacccctggtggactgtgattgccgcaattattccagcgttgctctgtacaatcctgatttttatggatcagcagatcaccgccgtaatcattaacagaaaagagcacaaattgaaaaaaggctgtggttatcacctcgacctcctgatggttgccgtcatgctcggagtgtgcagcatcatggggctaccttggtttgtggccgctactgtgctttccattactcatgtaaattctctcaagctagagagcgagtgctctgctcccggagagcagccaaagttcctgggaatcagggaacagagggttacaggcctgatgatcttcatactgatggggagcagcgtgtttatgacaagcatcctgaaattcattcccatgccagtgctttatggggtgttcttgtatatgggcgcttcgtctctgaagggcattcaattctttgacagaataaagttgttctggatgcccgctaagcaccagccagatttcatttacctgaggcatgttccactacgcaaggtccaccttttcactataatccagatgagctgcttaggactactctggattattaaggtgagccgagccgctatcgtttttcccatgatggtgctcgctcttgtgttcgtgcggaagctcatggatttgttattcacgaagagggagctctcttggctagacgaccttatgcctgagtccaagaaaaagaaactagaagacgctgagaaagaggaggagcagtccatgcttgccatggaagatgaagggactgtgcagctccccctcgaagggcattaccgagacgatccttccgtaattaatattagtgacgaaatgtccaaaacagcgctctggcggaatctgctcatcaccgccgataattccaaggataaagagagctctttcccctccaagtctagtccgtcgtag

SEQ ID NO: 211107 - protein, 175 aa, Artificial Sequence [sequence omitted]

SEQ ID NO: 211108 - DNA, 528 bp, Artificial Sequence
  derived and/or modified sequence
atgaggttaagcgtggccgcggcgattagccatggaagggtgttcaggcgaatggggctcggtccagaatcgcggatacatcttctccgaaacctcctcacgggcctggtgcggcacgagaggattgaggccccttgggctcgcgtggacgagatgagaggttacgctgagaagctgatcgactacggaaaactgggcgacacaaacgaacgcgccatgcgaatggccgacttttggttgaccgagaaagacctgatacccaaacttttccaggtccttgcaccgagatataaggaccagactggcggttacaccagaatgctgcagatcccaaaccggagcctggatcgggccaaaatggccgtgatcgagtataaggggaactgcctgcctcccctaccattacctcgtagagattcgcatttgaccttactcaatcagctgttacagggactgagacaggacctcagacagagccaggaagcaagtaatcattcatcccataccgcccagacccccggaatctag

SEQ ID NO: 211109 - DNA, 528 bp, Artificial Sequence
  derived and/or modified sequence
atgaggctgtctgtggccgccgccatcagccacggccgggtcttccggaggatgggcctgggccctgagagccgcatccacctgctgaggaacctgctgaccggcctggtgagacatgagcgcatcgaggccccctgggcccgggtggatgagatgaggggctacgccgagaagctgattgattatggcaagctgggggacaccaatgaaagagccatgaggatggctgacttctggctgacagagaaggacctgatccccaagctgttccaggtgctggccccccgctacaaggaccagacaggaggctacaccaggatgctgcagatccccaacagaagcctggaccgggccaagatggctgtgattgagtacaagggcaactgcctgccccccctgcccctgccccggcgggacagccacctgaccctgctgaaccagctgctgcagggcctgcggcaggacctgcggcagagccaggaggccagcaaccacagcagccacacagcccagaccccaggcatctag

SEQ ID NO: 211110 - DNA, 1969 bp, Artificial Sequence
  derived and/or modified sequence
accacgctccgagctaaggcgcatgcgttccctgaaattgccgccaccggctctaccttccagtttccagttccggcctccaaggggcgggcagaagttggaaacatgcggctgtcggtcgctgcagcgatctcccatggccgcgtatttcgccgtatgggcctcggtcccgagtcccgcatccatctgttgcggaacttgctcacagggctggtgcggcacgaacgcatcgaggcaccatgggcgcgtgtggacgaaatgaggggctacgcggagaagctcatcgactatgggaagctgggagacactaacgaacgagccatgcgcatggctgacttctggctcacagagaaggatttgatcccaaagctgtttcaagtactggcccctcggtacaaagatcaaactgggggctacacaagaatgctgcagatcccaaatcggagtttggatcgggccaagatggcagtgatcgagtataaagggaattgcctcccacccctgcctctgcctcgcagagacagccaccttacactcctaaaccagctgctgcagggtttgcggcaggacctcaggcaaagccaggaagcaagcaaccacagctcccacacagctcaaacaccagggatttaactggatctgaagagtctgcagcccttaatcagtacccatgatcacaggcctttggagcacttttactctctgagaagaactggagctagagatgtaaaatggacagtcttgatggggttgagaaccttctggggagccagatgaccctctctttgcacaatagataaaagtctttatatgaatatatataaatttatttattttttccttcctgtgggatttctggagaatgagaattatccaaatgctcagtctacctgagatagtaaattcatggcttatgcttctggtccttaaatttgggttatttttggttagtgcaattttgtttttcttaatgccagtttacatgggaatgcatcctataattccaaatgttgccagaggtggttgtgttttgacatctggtctcctagagatgagtgcttgggatttcttagagaaagattacttcctgacaggggtaggggagtgacaatctgcaagtgaaacttccttaaacaatctagtaccctgcgaaccttcaggggatactgcaatcagtcctctgttttgaggcaggatcacacattaccttaatgtgttcccttcaaccccctgaatgggcctgggaggagaggacccaagaactcagatgttccaccagtttggccaaaggggtggagacattcagcagaggatgttgggctccaggataagctccttcctcttggtgaggggaaggggtaagaaagagggtctatgcgagagaaggattaggaaattaaacctcctaggaatttcctggaagtttttattgttgtcaaatctggcctctctgggaacccagaaaagggaaatccggcttcagaatgtgagaagctgggagcccctttcttggcacagccaggctgccgttcccttgggttcagaggctttagtagggtagtagttatggaaggacttagaaaggagccatcagtcttggtccaaacacttgatagcagtgcctgataattgccatatccccagtaaagtgggtagaagagattttatcttaggctctatcttctgagtgtatttggcccactgaacccatccactgtctgagataataagtaagagtaagggtaaagggatcactggtgtagcagacatggcttcagtgacagaacgaactattctggtgctaatttagctgtagctgccttagtctgatactcatctactcccaacagagctctttatctctttttctctactatggtttgttcttcacactatagccagaaagctcttatattttaaatgaaatatagtagacactcaaaacatttatgaaataaagctacaactc

SEQ ID NO: 211111 - DNA, 528 bp, Artificial Sequence
  derived and/or modified sequence
atgcggctgagcgtggccgccgccatcagccacggccgggtgttcagacgtatggggctaggccccgagtctagaatacatctgttgcgcaatctccttaccggccttgtgcggcatgagaggatcgaggccccttgggctcgggtggatgaaatgcgcggctacgcggaaaaacttattgactatggtaagctgggagacactaacgagcgtgccatgaggatggctgacttctggttgacagagaaagatttgatcccaaagctgtttcaggtcctggctccccggtataaagatcagacaggcgggtatacccgaatgctgcagatcccaaatagatctctcgatcgcgcaaagatggctgtaatcgagtataaagggaactgtttgccgcccctaccattacccaggcgtgatagccacctgaccctgctgaatcaactcctgcagggtttacgacaggatctgagacagtctcaggaagcctcaaaccactcatcgcataccgcgcagacccctgggatctag

SEQ ID NO: 211112 - DNA, 528 bp, Artificial Sequence
  derived and/or modified sequence
atgaggttgtcagtagccgctgctatatcccacgggagagtatttcgccgaatggggctgggacctgaaagccgcattcacctcctgcggaacctgcttaccggcctcgtgcgccatgagcggatcgaagccccatgggctcgcgttgatgagatgcggggatacgccgagaaactgatagactacggcaaactcggcgacactaacgagagagctatgcgcatggcggacttttggcttactgagaaggacctaattcccaaactatttcaggtgttggcccctcgatacaaagaccagaccggaggctatacaaggatgttacagatcccaaatcgatcacttgatagggctaaaatggctgtcattgaatataagggcaactgtctaccgcctctgccccttccgcgacgggacagccatttaactctcttgaatcagttactgcaggggttgagacaggatctgcggcagagccaggaagcatcaaaccactcaagccatacagcacaaacccccggtatctag

SEQ ID NO: 211113 - DNA, 528 bp, Artificial Sequence
  derived and/or modified sequence
atgagactgagcgtggccgccgccatcagccacggcagagtgttcagaagaatgggcctgggccccgagagcagaatccacctgctgagaaacctgctgaccggcctggtgagacacgagagaatcgaggccccctgggccagagtggacgagatgagaggctacgccgagaagctgatcgactacggcaagctgggcgacaccaacgagagagccatgagaatggccgacttctggctgaccgagaaggacctgatccccaagctgttccaggtgctggcccccagatacaaggaccagaccggcggctacaccagaatgctgcagatccccaacagaagcctggacagagccaagatggccgtgatcgagtacaagggcaactgcctgccccccctgcccctgcccagaagagacagccacctgaccctgctgaaccagctgctgcagggcctgagacaggacctgagacagagccaggaggccagcaaccacagcagccacaccgcccagacccccggcatctag

SEQ ID NO: 211114 - DNA, 456 bp, Artificial Sequence
  derived and/or modified sequence
atgtggagcggcctgctgccccccggcctgaacgagagcgacgccgagagcaacagcgaggacgaggccaccctggagaacagcggcctgaacctgcaggaggacaaggaggacgagagcatcagaaagaccgagatcatcgacttcagcaccgacgagcccaagaccgagaccgagagcaacgtgaacgcctacgaggagtgccccagcggcatccccatcgacatgtggaacaagttccaggagctgcacaagaagcacagcgagcagaagagcaccaccagcagattcagaggcaagagaagaaagagaagcagaaaggacaagctgaagaacgagaaggagctgcacagcgagcccagcagcaacgagacccagtggaaggagctgacccagtacttcggcgtgaacgacagattcgacccccccgtgaagagaaagaaggtggagaagtag

SEQ ID NO: 211115 - DNA, 702 bp, Artificial Sequence
  derived and/or modified sequence
atgtggagcggcctgctgccccccggcctgaacgagagcgacgccgagagcaacagcgaggacgaggccaccctggagaacagcggcctgaacctgcaggaggacaaggaggacgagagcatcagaaagaccgagatcatcgacttcagcaccgacgagcccaagaccgagaccgagagcaacgtgaacgcctacgaggagtgccccagcggcatccccatcgacatgtggaacaagttccaggagctgcacaagaagcacagcgagcagaagagcaccaccagcagattcagaggcaagagaagaaagagaagcagaaaggacaagctgaagaacgagaaggagctgcacagcgagcccagcagcaacgagacccagtggaaggagctgacccagtacttcggcgtgaacgacagattcgacccccccgtgaagagaaagaaggtggagaagagcggcctggagaagagaatcgaccaggccgtggaggagtggaacatcgagaaggccgaggagctgagcaaccagctggccaccagagagctgggcgtgaagatcgccaaggccgtggcctgccacaacttcgtgaaggccaagaaggaggtggagaacagccaggccgccagaaagaagaagaagctggcctggggcttcgaggccaagaagagatgggagaccaagagcaacatgggctacatgtag

SEQ ID NO: 211116 - DNA, 456 bp, Artificial Sequence
  derived and/or modified sequence
atgtggagtgggttgcttccaccaggactgaacgagtccgatgcagagagcaacagcgaagacgaagcgacattggagaattcaggactgaatctgcaggaggacaaggaggacgagtccatcagaaagactgaaatcatagacttctctaccgatgagcctaagaccgaaacagagtcaaatgtaaatgcatatgaggagtgcccctctggtatcccaatcgacatgtggaacaaatttcaggaactgcacaagaagcacagcgaacagaaatccacaacgagcagattccggggcaaacgtcggaaacgaagtcggaaggacaagcttaaaaatgaaaaggagctgcattcagagccctcttcaaatgagactcagtggaaggagttaactcaatatttcggagtgaatgaccgttttgatcccccggttaagagaaagaaagtggagaagtag

SEQ ID NO: 211117 - DNA, 702 bp, Artificial Sequence
  derived and/or modified sequence
atgtggtcgggactactgccccccgggttgaacgaaagtgatgcagagagtaacagcgaggacgaagctactcttgagaacagcggactgaatttgcaagaggataaggaagatgagtcaattcgcaaaaccgaaattatcgattttagcacagatgagccaaaaactgaaacggaaagcaatgtgaatgcatacgaggagtgtcccagcggaataccaatcgatatgtggaataagtttcaagagcttcataaaaagcactcagagcaaaaaagcaccacttcgaggttcagaggaaagcggaggaaacgctctagaaaggacaaacttaagaatgagaaggaattacactccgaaccgtcatccaacgagacgcaatggaaagagttaactcagtacttcggtgtgaatgacaggtttgacccacctgtaaaaaggaaaaaagttgaaaaatctgggctagaaaagcgaatcgaccaggctgtcgaggaatggaacatcgagaaggccgaggagctgtctaatcagcttgccactcgcgagctcggagtgaaaattgctaaggctgtggcttgccataacttcgtgaaggccaaaaaagaagtcgagaacagccaggccgcccgcaagaaaaaaaaattggcttggggttttgaggcgaaaaaaagatgggagaccaagtcgaatatggggtacatgtag

SEQ ID NO: 211118 - DNA, 702 bp, Artificial Sequence
  derived and/or modified sequence
atgtggagcgggcttctacctccaggtctaaacgaatctgatgccgaaagcaactccgaggatgaagctacactcgagaacagcggcctcaacctgcaagaagataaagaggatgaatcaataaggaagaccgaaattatcgacttcagtaccgacgagcctaaaacagaaacagagagcaacgttaacgcttatgaggagtgccctagcggtatacctatcgacatgtggaataagttccaagagcttcataagaaacactctgaacagaaatcaacgactagtcggttcagggggaagagaaggaaacgctctcgaaaagacaagctgaaaaacgaaaaggagctccactctgaaccgtcctccaacgagacgcaatggaaggaacttacacaatattttggagtgaacgatagatttgatccgcctgtgaagaggaaaaaggtggagaaaagcggcctggagaagaggatagaccaagctgttgaagagtggaacatagagaaagccgaggagctctcaaatcagctcgccacgagagagctcggcgtgaaaatagccaaagcagtggcctgtcacaattttgtgaaggccaagaaggaggtggagaattctcaggctgcccgcaagaaaaaaaaactcgcttggggctttgaggcaaagaaaagatgggagaccaagtctaacatggggtacatgtag

SEQ ID NO: 211119 - DNA, 456 bp, Artificial Sequence
  derived and/or modified sequence
atgtggagcggcctgctgcccccaggcctgaatgaaagtgatgctgagagcaacagtgaagatgaggccaccctggagaacagcggcctgaacctgcaggaggacaaggaggatgagagcatcaggaagacagagatcatcgacttcagcacagatgagcccaagacagaaacagagagcaatgtgaatgcctatgaagaatgtcccagcggcatccccatcgacatgtggaacaagttccaggagctgcacaagaagcacagcgagcagaagagcaccaccagccgcttccggggcaagaggaggaagaggagcaggaaggacaagctgaagaatgagaaggagctgcacagcgagcccagcagcaatgagacccagtggaaggagctgacccagtactttggagtgaatgacagatttgacccccctgtgaagaggaagaaggtggagaagtag

SEQ ID NO: 211120 - DNA, 702 bp, Artificial Sequence
  derived and/or modified sequence
atgtggagcggcctgctgcccccaggcctgaatgaaagtgatgctgagagcaacagtgaagatgaggccaccctggagaacagcggcctgaacctgcaggaggacaaggaggatgagagcatcaggaagacagagatcatcgacttcagcacagatgagcccaagacagaaacagagagcaatgtgaatgcctatgaagaatgtcccagcggcatccccatcgacatgtggaacaagttccaggagctgcacaagaagcacagcgagcagaagagcaccaccagccgcttccggggcaagaggaggaagaggagcaggaaggacaagctgaagaatgagaaggagctgcacagcgagcccagcagcaatgagacccagtggaaggagctgacccagtactttggagtgaatgacagatttgacccccctgtgaagaggaagaaggtggagaagagcggcctggagaagagaattgaccaggccgtggaggagtggaacatcgagaaggccgaggagctgagcaaccagctggccacccgggagctgggcgtgaagatcgccaaggctgtggcctgccacaactttgtgaaggccaagaaggaggtggagaacagccaggccgccaggaagaagaagaagctggcctggggctttgaggccaagaagcgctgggagaccaagagcaacatgggctacatgtag

SEQ ID NO: 211121 - DNA, 456 bp, Artificial Sequence
  derived and/or modified sequence
atgtggagcggcctgctgccccccggcctgaacgagagcgacgccgaaagtaacagcgaagatgaggctaccctggagaatagcggactgaacttacaggaagataaagaagacgagtccattagaaaaacggagataatcgacttttcaacagacgagccaaaaaccgagactgaatctaatgtgaatgcttacgaggaatgtccctctggaatccccatagacatgtggaacaagttccaggaactgcacaaaaaacactccgaacaaaaaagcacaacaagtcgcttccgaggtaaaaggcgtaaacggtcacgaaaagataagctgaagaatgaaaaagagctgcactcagagccttcatcaaatgagacgcagtggaaagagctcacacagtatttcggggttaatgaccgctttgacccgcccgttaaacgcaagaaggtggagaagtag

SEQ ID NO: 211122 - DNA, 702 bp, Artificial Sequence
  derived and/or modified sequence
atgtggagcggcctgctgccccccggcctgaacgagagcgacgccgaaagcaattccgaggatgaggccacccttgagaatagcggcttaaatctgcaggaggacaaagaggacgaatccatacgaaagacggaaatcatcgacttcagtaccgatgagccgaagactgaaactgaatctaatgtgaatgcctacgaagaatgcccttccggcattccaatcgacatgtggaataagttccaggagctacataagaagcactccgagcagaaatccacgacatcccgcttccgggggaaacgcagaaagaggtcccgaaaggataaacttaagaatgaaaaggaactgcattccgaaccaagctccaatgagactcagtggaaggaactcacacagtatttcggcgtgaacgatcggttcgaccctcccgtaaaacgtaaaaaagtggaaaaatccggactggaaaagaggattgatcaggcggttgaggaatggaatattgaaaaggccgaagagctaagcaatcagcttgccacacgcgaactcggagtcaagatcgcaaaagccgtcgcttgccacaacttcgtcaaggccaagaaggaggtcgaaaatagccaagccgctaggaaaaagaagaagctggcatgggggttcgaggccaagaaacgctgggagaccaagtcaaatatgggatacatgtag

SEQ ID NO: 211123 - DNA, 702 bp, Artificial Sequence
  derived and/or modified sequence
atgtggagcggcctgctgccccccggcctgaacgagagcgacgccgaatcaaattctgaagatgaggccaccctggagaactccggcctgaacctccaggaggacaaggaagacgagagcattcgaaagactgaaatcatcgacttcagcactgatgagccaaagaccgagaccgaatcaaacgtcaatgcctatgaggagtgtccgagtgggatccccattgatatgtggaataagttccaggaactgcacaaaaagcatagcgaacaaaaatcaactacgtctcgattccggggaaaacgacggaaaaggagccgcaaagataagctgaaaaatgagaaggaactccacagtgaacccagttctaacgaaacacagtggaaggagctcacccagtactttggtgtaaacgacaggtttgatcctcctgtgaagaggaaaaaggttgagaagagcggactcgaaaaacgcatagaccaggcggttgaagaatggaatattgaaaaagccgaagaactgagcaaccagctggctacccgggaactaggcgtgaaaatcgcaaaggccgtggcttgccataactttgttaaggccaaaaaggaggtggagaacagccaagcagcacgcaagaagaagaagctagcatggggctttgaggctaaaaagaggtgggaaacaaagagcaacatgggttacatgtag

SEQ ID NO: 211124 - DNA, 456 bp, Artificial Sequence
  derived and/or modified sequence
atgtggagtggcctgcttcctcctggcctgaacgagagcgacgccgaatccaactccgaagatgaggccacattagagaatagcggcctgaatctgcaggaggataaagaggacgagtccattcgaaaaaccgaaatcattgactttagcactgacgaacctaaaaccgaaactgagagcaacgttaacgcctacgaagaatgcccgagcgggatcccaatagacatgtggaacaagtttcaggaactgcataaaaagcacagtgagcagaaaagtacaacctcaagatttcggggtaaacgacgtaagcgtagccggaaagacaagctgaagaacgaaaaggagttgcactcagagccctcctctaacgagacacagtggaaagagctgactcaatatttcggagtgaacgaccgatttgatccccctgtgaaacggaaaaaggtggagaagtag

SEQ ID NO: 211125 - DNA, 702 bp, Artificial Sequence
  derived and/or modified sequence
atgtggagcgggttactgccacctgggctgaatgaatccgacgctgaatcaaacagcgaggacgaagcgaccctggaaaactccgggctgaacttgcaggaagacaaggaggacgaaagcataagaaagaccgagattatcgacttttctacagacgaacccaagaccgagacggagagcaacgtgaatgcttacgaagagtgcccctctggtatacccatagatatgtggaataagttccaggaactgcataaaaagcattctgagcaaaaatccacaacatcgcggttcagaggcaagaggcgaaagcgctcgagaaaggataagctgaagaacgagaaagaactgcattcagaaccatcctccaacgaaactcagtggaaagagctgactcagtattttggagtgaacgacaggtttgaccccccagtgaagcgtaaaaaggtggagaagagcggcttagagaagagaatcgaccaggccgtggaggagtggaacatcgaaaaagcggaggaactgagcaaccagctcgccacccgcgaattaggggtgaaaatcgctaaagctgtcgcatgtcacaattttgtgaaagccaagaaggaggtcgaaaactctcaagccgctcggaaaaagaagaaattagcttggggctttgaagccaaaaagaggtgggaaacaaaaagtaacatgggctatatgtag

SEQ ID NO: 211126 - DNA, 702 bp, Artificial Sequence
  derived and/or modified sequence
atgtggtccgggctgttgccacccggtttgaatgagtccgacgccgaaagtaattctgaggatgaggccacactagaaaattctggccttaatctccaagaggataaagaggatgaaagcatcagaaaaactgagataattgatttcagcaccgatgagcccaagacagaaacagaaagcaatgtcaatgcatatgaggaatgtcctagcgggattccaatcgatatgtggaataagttccaagagcttcacaaaaagcactccgagcagaaatcaactactagcaggtttcgcggtaagcggcgaaagagaagtaggaaggacaaactcaagaacgagaaggaattacactcagagcccagctccaacgaaactcagtggaaagagctgacacaatattttggtgtcaatgatcggttcgaccctcccgtaaagagaaaaaaagtcgagaagtcgggactcgaaaagcgaatagaccaggccgtggaagagtggaatatcgaaaaggccgaggaactcagcaatcaactagccacgagagagttaggcgtgaaaatcgcgaaggccgtcgcttgtcacaacttcgtcaaagccaagaaagaggtggaaaattcacaggccgcacgtaaaaagaaaaagctggcatggggtttcgaggccaaaaaaaggtgggaaacaaaatctaacatgggctacatgtag

SEQ ID NO: 211127 - protein, 1314 aa, Artificial Sequence
  derived and/or modified sequence
MASKGAGMSFSRKSYRLTSDAEKSRVTGIVQEKLLNDYLNRIFSSSEHAPPAATSRKPLNFQNLPEHLDQLLQVDNEEEESQGQVEGRLGPSTVVLDHTGGFEGLLLVDDDLLGVIGHSNFGTIRSTTCVYKGKWLYEVLISSQGLMQIGWCTISCRFNQEEGVGDTHNSYAYDGNRVRKWNVTTTNYGKAWAAGDIVSCLIDLDDGTLSFCLNGVSLGTAFENLSRGLGMAYFPAISLSFKESVAFNFGSRPLRYPVAGYRPLQDPPSADLVRAQRLLGCFRAVLSVELDPVEGRLLDKESSKWRLRGQPTVLLTLAHIFHHFAPLLRKVYLVEAVLMSFLLGIVEKGTPTQAQSVVHQVLDLLWLFMEDYEVQDCLKQLMMSLLRLYRFSPIVPDLGLQIHYLRLTIAILRHEKSRKFLLSNVLFDVLRSVVFFYIKSPLRVEEAGLQELIPTTWWPHCSSREGKESTEMKEETAEERLRRRAYERGCQRLRKRIEVVEELQVQILKLLLDNKDDNGGEASRYIFLTKFRKFLQENASGRGNMPMLCPPEYMVCFLHRLISALRYYWDEYKASNPHASFSEEAYIPPQVFYNGKVDYFDLQRLGGLLSHLRKTLKDDLASKANIVIDPLELQSTAMDDLDEDEEPAPAMAQRPMQALAVGGPLPLPRPGWLSSPTLGRANRFLSTAAVSLMTPRRPLSTSEKVKVRTLSVEQRTREDIEGSHWNEGLLLGRPPEEPEQPLTENSLLEVLDGAVMMYNLSVHQQLGKMVGVSDDVNEYAMALRDTEDKLRRCPKRRKDILAELTKSQKVFSEKLDHLSRRLAWVHATVYSQEKMLDIYWLLRVCLRTIEHGDRTGSLFAFMPEFYLSVAINSYSALKNYFGPVHSMEELPGYEETLTRLAAILAKHFADARIVGTDIRDSLMQALASYVCYPHSLRAVERIPEEQRIAMVRNLLAPYEQRPWAQTNWILVRLWRGCGFGYRYTRLPHLLKTKLEDANLPSLQKPCPSTLLQQHMADLLQQGPDVAPSFLNSVLNQLNWAFSEFIGMIQEIQQAAERLERNFVDSRQLKVCATCFDLSVSLLRVLEMTITLVPEIFLDWTRPTSEMLLRRLAQLLNQVLNRVTAERNLFDRVVTLRLPGLESVDHYPILVAVTGILVQLLVRGPASEREQATSVLLADPCFQLRSICYLLGQPEPPAPGTALPAPDRKRFSLQSYADYISADELAQVEQMLAHLTSASAQAAAASLPTSEEDLCPICYAHPISAVFQPCGHKSCKACINQHLMNNKDCFFCKTTIVSVEDWEKGANTSTTSSAA

SEQ ID NO: 211128 - protein, 1316 aa, Artificial Sequence
  derived and/or modified sequence
MASKGAGMSFSRKSYRLTSDAEKSRVTGIVQEKLLNDYLNRIFSSSEHAPPAATSRKPLNFQNLPEHLDQLLQVDNEEEESQGQVEGRLGPSTVVLDHTGGFEGLLLVDDDLLGVIGHSNFGTIRSTTCVYKGKWLYEVLISSQGLMQIGWCTISCRFNQEEGVGDTHNSYAYDGNRVRKWNVTTTNYGKAWAAGDIVSCLIDLDDGTLSFCLNGVSLGTAFENLSRGLGMAYFPAISLSFKESVAFNFGSRPLRYPVAGYRPLQDPPSADLVRAQRLLGCFRAVLSVELDPVEGRLLDKESSKWRLRGQPTVLLTLAHIFHHFAPLLRKVYLVEAVLMSFLLGIVEKGTPTQAQSVVHQVLDLLWLFMEDYEVQDCLKQLMMSLLRLYRFSPIVPDLGLQIHYLRLTIAILRHEKSRKFLLSNVLFDVLRSVVFFYIKSPLRVEEAGLQELIPTTWWPHCSSREGKESTEMKEETAEERLRRRAYERGCQRLRKRIEVVEELQVQILKLLLDNKDDNGGEASRYIFLTKFRKFLQENASGRGNMPMLCPPEYMVCFLHRLISALRYYWDEYKASNPHASFSEEAYIPPQVFYNGKVDYFDLQRLGGLLSHLRKTLKDDLASKANIVIDPLELQSTAMDDLDEDEEPAPAMAQRPMQALAVGGPLPLPRPGWLSSPTLGRANRFLSTAAVSLMTPRRPLSTSEKVKVRTLSVEQRTREDIEGSHWNEGLLLGRPPEEPEQPLTENSLLEVLDGAVMMYNLSVHQQLGKMVGVSDDVNEYAMALRDTEDKLRRCPKRRKDILAELTKSQKVFSEKLDHLSRRLAWVHATVYSQEKMLDIYWLLRVCLRTIEHGDRTGSLFAFMPEFYLSVAINSYSALKNYFGPVHSMEELPGYEETLTRLAAILAKHFADARIVGTDIRDSLMQALASYVCYPHSLRAVERIPEEQRIAMVRNLLAPYEQRPWAQTNWILVRLWRGCGFGYRYTRLPHLLKTKLEDANLPSLQKPCPSTLLQQHMADLLQQGPDVAPSFLNSVLNQLNWAFSEFIGMIQEIQQAAERLERNFVDSRQLKVCATCFDLSVSLLRVLEMTITLVPEIFLDWTRPTSEMLLRRLAQLLNQVLNRVTAERNLFDRVVTLRLPGLESVDHYPILVAVTGILVQLLVRGPASEREQATSVLLADPCFQLRSICYLLGQPEPPAPGTALPAPDRKRFSLQSYADYISADELAQVEQMLAHLTSASAQAAAASLPTSEEDLCPICYAHPISAVFQPCGHKSCKACINQHLMNNKDCFFCKTTTSNLLACLYPHWWEPSHGPNCA

SEQ ID NO: 211129 - DNA, 3945 bp, Artificial Sequence
  derived and/or modified sequence
atggccagcaagggcgccggcatgagcttcagcagaaagagctacagactgaccagcgacgccgagaagagcagagtgaccggcatcgtgcaggagaagctgctgaacgactacctgaacagaatcttcagcagcagcgagcacgccccccccgccgccaccagcagaaagcccctgaacttccagaacctgcccgagcacctggaccagctgctgcaggtggacaacgaggaggaggagagccagggccaggtggagggcagactgggccccagcaccgtggtgctggaccacaccggcggcttcgagggcctgctgctggtggacgacgacctgctgggcgtgatcggccacagcaacttcggcaccatcagaagcaccacctgcgtgtacaagggcaagtggctgtacgaggtgctgatcagcagccagggcctgatgcagatcggctggtgcaccatcagctgcagattcaaccaggaggagggcgtgggcgacacccacaacagctacgcctacgacggcaacagagtgagaaagtggaacgtgaccaccaccaactacggcaaggcctgggccgccggcgacatcgtgagctgcctgatcgacctggacgacggcaccctgagcttctgcctgaacggcgtgagcctgggcaccgccttcgagaacctgagcagaggcctgggcatggcctacttccccgccatcagcctgagcttcaaggagagcgtggccttcaacttcggcagcagacccctgagataccccgtggccggctacagacccctgcaggacccccccagcgccgacctggtgagagcccagagactgctgggctgcttcagagccgtgctgagcgtggagctggaccccgtggagggcagactgctggacaaggagagcagcaagtggagactgagaggccagcccaccgtgctgctgaccctggcccacatcttccaccacttcgcccccctgctgagaaaggtgtacctggtggaggccgtgctgatgagcttcctgctgggcatcgtggagaagggcacccccacccaggcccagagcgtggtgcaccaggtgctggacctgctgtggctgttcatggaggactacgaggtgcaggactgcctgaagcagctgatgatgagcctgctgagactgtacagattcagccccatcgtgcccgacctgggcctgcagatccactacctgagactgaccatcgccatcctgagacacgagaagagcagaaagttcctgctgagcaacgtgctgttcgacgtgctgagaagcgtggtgttcttctacatcaagagccccctgagagtggaggaggccggcctgcaggagctgatccccaccacctggtggccccactgcagcagcagagagggcaaggagagcaccgagatgaaggaggagaccgccgaggagagactgagaagaagagcctacgagagaggctgccagagactgagaaagagaatcgaggtggtggaggagctgcaggtgcagatcctgaagctgctgctggacaacaaggacgacaacggcggcgaggccagcagatacatcttcctgaccaagttcagaaagttcctgcaggagaacgccagcggcagaggcaacatgcccatgctgtgcccccccgagtacatggtgtgcttcctgcacagactgatcagcgccctgagatactactgggacgagtacaaggccagcaacccccacgccagcttcagcgaggaggcctacatccccccccaggtgttctacaacggcaaggtggactacttcgacctgcagagactgggcggcctgctgagccacctgagaaagaccctgaaggacgacctggccagcaaggccaacatcgtgatcgaccccctggagctgcagagcaccgccatggacgacctggacgaggacgaggagcccgcccccgccatggcccagagacccatgcaggccctggccgtgggcggccccctgcccctgcccagacccggctggctgagcagccccaccctgggcagagccaacagattcctgagcaccgccgccgtgagcctgatgacccccagaagacccctgagcaccagcgagaaggtgaaggtgagaaccctgagcgtggagcagagaaccagagaggacatcgagggcagccactggaacgagggcctgctgctgggcagaccccccgaggagcccgagcagcccctgaccgagaacagcctgctggaggtgctggacggcgccgtgatgatgtacaacctgagcgtgcaccagcagctgggcaagatggtgggcgtgagcgacgacgtgaacgagtacgccatggccctgagagacaccgaggacaagctgagaagatgccccaagagaagaaaggacatcctggccgagctgaccaagagccagaaggtgttcagcgagaagctggaccacctgagcagaagactggcctgggtgcacgccaccgtgtacagccaggagaagatgctggacatctactggctgctgagagtgtgcctgagaaccatcgagcacggcgacagaaccggcagcctgttcgccttcatgcccgagttctacctgagcgtggccatcaacagctacagcgccctgaagaactacttcggccccgtgcacagcatggaggagctgcccggctacgaggagaccctgaccagactggccgccatcctggccaagcacttcgccgacgccagaatcgtgggcaccgacatcagagacagcctgatgcaggccctggccagctacgtgtgctacccccacagcctgagagccgtggagagaatccccgaggagcagagaatcgccatggtgagaaacctgctggccccctacgagcagagaccctgggcccagaccaactggatcctggtgagactgtggagaggctgcggcttcggctacagatacaccagactgccccacctgctgaagaccaagctggaggacgccaacctgcccagcctgcagaagccctgccccagcaccctgctgcagcagcacatggccgacctgctgcagcagggccccgacgtggcccccagcttcctgaacagcgtgctgaaccagctgaactgggccttcagcgagttcatcggcatgatccaggagatccagcaggccgccgagagactggagagaaacttcgtggacagcagacagctgaaggtgtgcgccacctgcttcgacctgagcgtgagcctgctgagagtgctggagatgaccatcaccctggtgcccgagatcttcctggactggaccagacccaccagcgagatgctgctgagaagactggcccagctgctgaaccaggtgctgaacagagtgaccgccgagagaaacctgttcgacagagtggtgaccctgagactgcccggcctggagagcgtggaccactaccccatcctggtggccgtgaccggcatcctggtgcagctgctggtgagaggccccgccagcgagagagagcaggccaccagcgtgctgctggccgacccctgcttccagctgagaagcatctgctacctgctgggccagcccgagccccccgcccccggcaccgccctgcccgcccccgacagaaagagattcagcctgcagagctacgccgactacatcagcgccgacgagctggcccaggtggagcagatgctggcccacctgaccagcgccagcgcccaggccgccgccgccagcctgcccaccagcgaggaggacctgtgccccatctgctacgcccaccccatcagcgccgtgttccagccctgcggccacaagagctgcaaggcctgcatcaaccagcacctgatgaacaacaaggactgcttcttctgcaagaccaccatcgtgagcgtggaggactgggagaagggcgccaacaccagcaccaccagcagcgccgcctag

SEQ ID NO: 211130 - DNA, 3951 bp, Artificial Sequence
  derived and/or modified sequence
atggccagcaagggcgccggcatgagcttcagcagaaagagctacagactgaccagcgacgccgagaagagcagagtgaccggcatcgtgcaggagaagctgctgaacgactacctgaacagaatcttcagcagcagcgagcacgccccccccgccgccaccagcagaaagcccctgaacttccagaacctgcccgagcacctggaccagctgctgcaggtggacaacgaggaggaggagagccagggccaggtggagggcagactgggccccagcaccgtggtgctggaccacaccggcggcttcgagggcctgctgctggtggacgacgacctgctgggcgtgatcggccacagcaacttcggcaccatcagaagcaccacctgcgtgtacaagggcaagtggctgtacgaggtgctgatcagcagccagggcctgatgcagatcggctggtgcaccatcagctgcagattcaaccaggaggagggcgtgggcgacacccacaacagctacgcctacgacggcaacagagtgagaaagtggaacgtgaccaccaccaactacggcaaggcctgggccgccggcgacatcgtgagctgcctgatcgacctggacgacggcaccctgagcttctgcctgaacggcgtgagcctgggcaccgccttcgagaacctgagcagaggcctgggcatggcctacttccccgccatcagcctgagcttcaaggagagcgtggccttcaacttcggcagcagacccctgagataccccgtggccggctacagacccctgcaggacccccccagcgccgacctggtgagagcccagagactgctgggctgcttcagagccgtgctgagcgtggagctggaccccgtggagggcagactgctggacaaggagagcagcaagtggagactgagaggccagcccaccgtgctgctgaccctggcccacatcttccaccacttcgcccccctgctgagaaaggtgtacctggtggaggccgtgctgatgagcttcctgctgggcatcgtggagaagggcacccccacccaggcccagagcgtggtgcaccaggtgctggacctgctgtggctgttcatggaggactacgaggtgcaggactgcctgaagcagctgatgatgagcctgctgagactgtacagattcagccccatcgtgcccgacctgggcctgcagatccactacctgagactgaccatcgccatcctgagacacgagaagagcagaaagttcctgctgagcaacgtgctgttcgacgtgctgagaagcgtggtgttcttctacatcaagagccccctgagagtggaggaggccggcctgcaggagctgatccccaccacctggtggccccactgcagcagcagagagggcaaggagagcaccgagatgaaggaggagaccgccgaggagagactgagaagaagagcctacgagagaggctgccagagactgagaaagagaatcgaggtggtggaggagctgcaggtgcagatcctgaagctgctgctggacaacaaggacgacaacggcggcgaggccagcagatacatcttcctgaccaagttcagaaagttcctgcaggagaacgccagcggcagaggcaacatgcccatgctgtgcccccccgagtacatggtgtgcttcctgcacagactgatcagcgccctgagatactactgggacgagtacaaggccagcaacccccacgccagcttcagcgaggaggcctacatccccccccaggtgttctacaacggcaaggtggactacttcgacctgcagagactgggcggcctgctgagccacctgagaaagaccctgaaggacgacctggccagcaaggccaacatcgtgatcgaccccctggagctgcagagcaccgccatggacgacctggacgaggacgaggagcccgcccccgccatggcccagagacccatgcaggccctggccgtgggcggccccctgcccctgcccagacccggctggctgagcagccccaccctgggcagagccaacagattcctgagcaccgccgccgtgagcctgatgacccccagaagacccctgagcaccagcgagaaggtgaaggtgagaaccctgagcgtggagcagagaaccagagaggacatcgagggcagccactggaacgagggcctgctgctgggcagaccccccgaggagcccgagcagcccctgaccgagaacagcctgctggaggtgctggacggcgccgtgatgatgtacaacctgagcgtgcaccagcagctgggcaagatggtgggcgtgagcgacgacgtgaacgagtacgccatggccctgagagacaccgaggacaagctgagaagatgccccaagagaagaaaggacatcctggccgagctgaccaagagccagaaggtgttcagcgagaagctggaccacctgagcagaagactggcctgggtgcacgccaccgtgtacagccaggagaagatgctggacatctactggctgctgagagtgtgcctgagaaccatcgagcacggcgacagaaccggcagcctgttcgccttcatgcccgagttctacctgagcgtggccatcaacagctacagcgccctgaagaactacttcggccccgtgcacagcatggaggagctgcccggctacgaggagaccctgaccagactggccgccatcctggccaagcacttcgccgacgccagaatcgtgggcaccgacatcagagacagcctgatgcaggccctggccagctacgtgtgctacccccacagcctgagagccgtggagagaatccccgaggagcagagaatcgccatggtgagaaacctgctggccccctacgagcagagaccctgggcccagaccaactggatcctggtgagactgtggagaggctgcggcttcggctacagatacaccagactgccccacctgctgaagaccaagctggaggacgccaacctgcccagcctgcagaagccctgccccagcaccctgctgcagcagcacatggccgacctgctgcagcagggccccgacgtggcccccagcttcctgaacagcgtgctgaaccagctgaactgggccttcagcgagttcatcggcatgatccaggagatccagcaggccgccgagagactggagagaaacttcgtggacagcagacagctgaaggtgtgcgccacctgcttcgacctgagcgtgagcctgctgagagtgctggagatgaccatcaccctggtgcccgagatcttcctggactggaccagacccaccagcgagatgctgctgagaagactggcccagctgctgaaccaggtgctgaacagagtgaccgccgagagaaacctgttcgacagagtggtgaccctgagactgcccggcctggagagcgtggaccactaccccatcctggtggccgtgaccggcatcctggtgcagctgctggtgagaggccccgccagcgagagagagcaggccaccagcgtgctgctggccgacccctgcttccagctgagaagcatctgctacctgctgggccagcccgagccccccgcccccggcaccgccctgcccgcccccgacagaaagagattcagcctgcagagctacgccgactacatcagcgccgacgagctggcccaggtggagcagatgctggcccacctgaccagcgccagcgcccaggccgccgccgccagcctgcccaccagcgaggaggacctgtgccccatctgctacgcccaccccatcagcgccgtgttccagccctgcggccacaagagctgcaaggcctgcatcaaccagcacctgatgaacaacaaggactgcttcttctgcaagaccaccaccagcaacctgctggcctgcctgtacccccactggtgggagcccagccacggccccaactgcgcctag

SEQ ID NO: 211131 - DNA, 3945 bp, Artificial Sequence
  derived and/or modified sequence
atggcctctaagggcgctgggatgtcctttagccgaaagagctacagactgaccagcgacgcagagaagagccgggtgacaggaattgtgcaagagaagttgctcaacgactatttgaacaggatctttagtagctccgagcacgccccccccgctgctacatcacggaaaccactaaattttcagaatctaccagagcaccttgaccagttacttcaggtagataatgaggaggaggagagccagggtcaagttgagggccggttgggcccttcaactgttgtgttagaccacacgggtggttttgaaggcctgttgttggtggacgatgacttgctgggtgtgatcggacactccaatttcgggacaattcgctccacaacatgtgtctacaagggtaaatggctgtacgaggttctgatcagctcacagggactaatgcagatcggctggtgtaccattagttgccggtttaatcaggaagaaggagtcggggacactcacaactcatatgcctatgacggtaatagagtgcgcaagtggaatgtgaccacaactaattacgggaaagcttgggccgcgggtgatatcgtgtcatgtttaatagatctcgatgatggcaccctttccttttgtctgaacggggtgtctctgggtacagcattcgagaatctctctagagggctgggaatggcgtacttcccagcgattagcctgagttttaaagagagcgtcgcattcaattttggatctcgtcctttgcgctatcctgttgccggctaccgcccactgcaagaccccccctcagccgacctcgttagggcgcagaggctgcttgggtgtttccgggccgtgctcagcgtcgagcttgatcctgtcgagggacggctgttggataaggagagcagcaagtggaggctgcgaggacagcccacagtcttactgaccttggcccatatctttcatcacttcgctccgttgcttcgcaaggtgtaccttgtcgaagcagtcctgatgtcgttcctcctgggcatagtggagaagggtacaccaacacaggcacagtccgtcgtgcatcaggtcttagatttgctttggctatttatggaggactacgaggtccaagactgtctgaaacagctcatgatgtctttgctgcgtctctaccgattctcacctatagttcctgatcttggcctgcagattcactatttgcggctgactatagcgatcctccgccatgagaagagccgtaagttccttctgtcaaatgtgctttttgatgtcctgcgcagcgtggtatttttttatataaagtctccattaagagtggaggaagccggacttcaggagcttatccctacaacatggtggccacattgcagtagccgggagggcaaggagagcaccgaaatgaaagaagagactgctgaagaacgactgaggcgtcgagcctatgagcgcggctgccagcgcctgagaaaaagaatcgaagtcgtagaggaactccaggttcagatactgaaactcctccttgacaataaggacgacaacggcggcgaggctagtaggtacatctttctcaccaaattcagaaagtttctgcaggagaacgcctccggaagaggcaatatgcccatgctgtgtcccccagagtatatggtttgcttcttacaccggcttatctcagccttgcgatattactgggatgaatacaaagcctctaacccccacgccagtttctctgaggaagcgtatataccaccacaggtgttctacaacggaaaggtcgattactttgatttacagcgcctcggcggcctcctgtctcacctgagaaagactctcaaggatgacctggccagcaaagccaatattgtcattgatcccctggaactacagtcaacggccatggatgatttagacgaagacgaagaacccgcacccgctatggcccaacgtcccatgcaagcccttgccgtcggaggtccgctgcccctgcccaggcctgggtggctgagttccccaactcttgggcgcgcaaaccgatttctgtctacagcggcagttagccttatgactccacgcaggcccttgagtacctcagaaaaggtcaaagtcagaacactatctgtcgaacagagaacgagggaagatattgaagggtctcattggaacgagggcctcttgctgggcagacccccggaagagcccgagcagcctttgactgagaacagcctcctagaagtgttggacggggcagtgatgatgtataatctgagcgtgcaccagcagctgggcaagatggttggggtttcagatgacgtaaatgaatatgccatggccctgagggatacggaagataagctgagacggtgcccaaagcggcgaaaggatatcctggctgagctcacaaagtctcagaaagtcttttccgaaaaactggatcatctgtcccggaggttggcctgggtgcacgctactgtgtactctcaggaaaagatgttggatatttactggctgcttcgcgtctgccttcgaaccattgaacacggggatagaaccggatccctgttcgcctttatgcctgaattctatctcagcgtggctattaactcttactctgccctgaagaattatttcggtccagtgcattctatggaggagctgcctggctacgaggaaacactgacccggctcgccgcgattctggcaaagcacttcgccgacgccaggatcgtcggcacagacataagggactcgttgatgcaggccttagcaagttacgtgtgttaccctcacagcttgagagctgttgagcgaatccccgaggagcagcgtatcgcaatggtgagaaatttgctagccccctacgaacagcgtccctgggcgcaaactaactggattctcgtaaggctgtggagaggatgtggtttcggctaccgatacaccagactgcctcaccttctgaagactaaactggaagacgcaaatctgcctagcctccagaaaccgtgcccctccaccctgttgcaacagcacatggccgatctgctccaacagggacctgatgttgctcctagcttcttgaactcggtgctgaaccagctcaactgggccttcagtgagttcattggtatgatacaagagattcaacaggctgccgagcgactcgagcgcaatttcgtcgattcccggcagttgaaggtgtgtgccacttgcttcgatctttcagtttctttgttgcgcgtgctggagatgacaattaccctggtgcccgaaatctttctggattggacccggcccacttccgagatgttgctgcggaggctcgcgcagctacttaaccaggtactgaatcgagtgacagctgaaaggaacctattcgacagagtcgtcactctccgccttccgggtctcgagtcagtggaccattatcctattctggttgccgttactggtatactggtccagttgctggtgcgtggacccgctagcgagcgcgaacaggcaacaagcgtcttattggcggacccttgctttcaattgaggtcgatttgttacctgcttggacaaccagagccccctgcgcctggaaccgccctcccggcccccgatcgtaagcgattcagtttgcagagttacgccgactatatcagtgcggacgagctggcacaggtggaacaaatgctagcgcatcttacatccgcctccgcacaggcagcagccgcctctctgcccacctcagaggaggatctctgccctatatgctacgcacaccccatttctgctgttttccagccttgtggccataaatcatgtaaggcttgtatcaaccaacatctgatgaataacaaagattgctttttctgtaagacgacaattgtctccgtggaggactgggaaaagggggccaatacttcaacaacctcctcagctgcttag

SEQ ID NO: 211132 - DNA, 3951 bp, Artificial Sequence
  derived and/or modified sequence
atggcaagcaagggagccggcatgtctttctctagaaagtcctatcgacttacgtctgacgcagaaaaaagcagagtgacaggaattgttcaggaaaagttgctcaatgactatcttaacaggatcttctctagttctgaacatgcccctcctgcagccacttcgcgcaaacccctgaatttccaaaatttgccagaacatcttgatcaactgctccaggtcgataacgaagaagaagagagccagggacaggtggagggccgattaggtccttctactgtcgtacttgatcataccgggggatttgaggggcttctccttgtggatgacgatctgctgggtgtgatcggccatagtaacttcggcacaattaggagtactacttgcgtgtataaaggtaagtggctgtacgaggtgctcatctccagtcaagggctgatgcagattggctggtgcaccatctcctgtcggtttaatcaggaagagggagttggtgatactcacaattcttacgcatatgacggcaaccgcgtgcgcaagtggaacgtcacaacgaccaactatggtaaagcttgggctgcaggcgatatagtttcctgcctgatagacctagacgacggaactctttcgttctgcctcaacggggtgagcttggggactgcttttgagaacctaagcagagggctgggaatggcctacttccccgcaatctccctgtcatttaaagaatccgtggccttcaattttggctcacggccactccgatacccagtggcaggttaccggccgctgcaagaccccccaagtgccgacttagttagagcccagcgcttgctgggatgctttcgggctgttctgagcgtcgaactcgatccggttgagggccgcctgcttgacaaggagtcttctaaatggcgcttgaggggacaaccgacagtgctcctaaccctggcgcacatctttcaccattttgctcccttgctccgaaaggtatatctggtagaggccgttctgatgagcttcctactgggcatcgtagagaaggggacccccacacaggcccagagtgtcgttcaccaggtcctcgatctgctgtggctgtttatggaggactatgaagtgcaagactgtctcaaacagcttatgatgtcgctcctgagactttacagattttctcctatcgtgccagacctcggtctacagattcactaccttagacttacaatagctattttgcgacatgaaaagtctcggaagttcttgctatccaacgttctgttcgacgtgcttcggtctgtagtttttttctacatcaagagcccgttgcgagtagaagaagctggcttgcaggagttgattcccacaacctggtggccccattgtagcagcagggagggtaaggagtctacagagatgaaagaggagaccgccgaagagcgcttacgacggagggcatacgagcgcgggtgccagcgcctgcgcaagagaattgaagttgtcgaagaacttcaggtccagatcctgaagctgttgctggacaacaaggacgataatggcggcgaggcatcgagatacatctttttgactaagttccgcaagtttctgcaggagaacgcttccggacggggcaatatgcctatgttgtgcccccctgagtatatggtgtgttttctacatcggctaataagcgccttacggtattactgggatgagtataaagcaagcaatccgcatgcctccttttcagaggaggcgtatatccctccccaggttttttacaatggcaaggtggactactttgatctccagcgactcggggggctgctctcacatcttcgaaaaacactgaaagatgaccttgcatctaaagccaacatcgttattgacccactcgagctgcagtcaacggcaatggacgatctggatgaagacgaggaacccgcccctgccatggcacagcgcccgatgcaggccttggccgtgggcggcccactgcccttgcccagaccaggctggctgtcttctcccaccctgggacgggccaatcgctttttgtcgacggccgccgtgtctctgatgacacctaggaggcctctgtcaacttccgaaaaggttaaagtgcgaaccctgagcgtggaacagcgtaccagggaggacatagaagggagtcactggaacgaggggctgttgctcgggaggccacctgaggagccagagcagccgctgaccgaaaactccttacttgaagtgttggatggcgctgtgatgatgtacaatttatcggttcatcagcagctggggaagatggtgggggtgtccgatgatgtgaacgaatacgctatggcccttagagatactgaagataaattaagacgctgccctaagagacggaaggacattctagctgagctgactaagagtcagaaggtcttctctgagaaattggaccacctgtcgagaaggcttgcttgggttcatgccactgtctactcgcaagagaagatgttagacatttattggcttctgcgggtctgcctgcgcacgatagagcatggggacaggaccggcagtttgttcgctttcatgccggagttctacctgagcgtagccatcaactcttacagcgccctgaaaaattactttggccccgtgcactcaatggaggaactcccaggatacgaagagaccctgacacgcctggctgctatcctggctaagcattttgccgacgcgagaattgtggggacagacatccgcgacagtcttatgcaggcacttgctagctatgtctgctatccccactccctacgtgccgtcgaacggatcccagaggagcagcgcattgctatggtacgcaaccttctcgctccttatgaacagagaccgtgggcacaaacgaactggatactcgtgcgcctatggcggggctgtggtttcgggtacagatatacccggttaccccaccttttaaagaccaagcttgaggatgccaatttgccctccctgcagaagccctgtcccagtaccctgttacaacagcatatggctgaccttctgcaacaggggcccgatgtcgccccttccttcctgaactcggtcctcaatcaactgaattgggcgttttcagaatttattggcatgattcaggagattcagcaggcagccgaaagactcgaacgcaactttgtcgattcaaggcagttgaaggtctgtgccacctgtttcgatctatccgtgagcttgctccgggtgctcgaaatgaccatcactctagtgccagagattttcctggactggacacgccctacatcggagatgctgttacggcgtctggcccaactcctcaaccaggtgctgaatcgagtgacagcagagcgaaatctgtttgacagggtcgttactttgagacttcctggattggagagtgtggatcactaccccattctagtagctgtgacgggcatcctggtccaactgctggtgaggggacctgcctccgaaagggaacaggctacctccgtattgctggctgacccttgcttccagttaaggtccatttgctacctcctagggcagcctgagcctcccgcgccaggtaccgcgctgcccgctccagatcggaaacgatttagcctgcagtcttacgccgattacataagcgctgatgagctcgctcaggtggaacaaatgctagctcatttaacctcggcttcagcacaggctgccgcggcatcactgccaacctccgaagaagacctttgccccatctgctacgctcatcccatcagtgccgtctttcagccatgcgggcacaaaagttgtaaggcctgtatcaaccaacacctgatgaataataaggattgctttttttgcaaaaccaccacaagtaacctcctggcctgtttgtacccgcattggtgggaaccttctcacggccccaactgcgcttag

SEQ ID NO: 211133 - DNA, 3945 bp, Artificial Sequence
  derived and/or modified sequence
atggccagcaagggggccggcatgtccttcagcaggaagagctaccgcctgaccagtgatgctgagaagagccgggtgactggaattgtgcaggagaagctgctgaatgactacctgaaccgcatcttcagcagcagcgagcacgcccccccagctgccaccagcaggaagcccctgaacttccagaacctgcctgagcacctggaccagctgctgcaggtggacaatgaggaggaggagagccagggccaggtggagggccgcctgggccccagcacagtggtgctggaccacactggaggctttgagggcctgctgctggtggatgatgacctgctgggcgtcatcggccacagcaactttggcaccatccgcagcaccacctgtgtgtacaagggcaagtggctgtatgaggtgctgatcagcagccagggcctgatgcagatcggctggtgcaccatcagctgccgcttcaaccaggaggagggcgtgggggacacccacaacagctatgcctatgatggcaacagagtgaggaagtggaatgtgaccaccaccaactacggcaaggcctgggccgccggggacatcgtgtcctgcctgattgacctggatgatggcaccctgtccttctgcctgaatggagtgtccctgggcacagcctttgagaacctgagccggggcctgggcatggcctacttccctgccatcagcctgtccttcaaggagagcgtggccttcaactttggcagccggcccctgcgctaccctgtggccggctaccggcccctgcaggaccccccatctgctgacctggtgcgggcccagaggctgctgggctgcttccgggctgtgctgtctgtggagctggaccctgtggagggccgcctgctggacaaggagagcagcaagtggaggctgcggggccagcccaccgtgctgctgaccctggcccacatcttccaccactttgcccccctgctgaggaaggtgtacctggtggaggccgtgctgatgtccttcctgctgggcatcgtggagaagggcacccccacccaggcccagagcgtggtgcaccaggtgctggacctgctgtggctgttcatggaggactatgaggtgcaggactgcctgaagcagctgatgatgagcctgctgcggctgtaccgcttcagccccatcgtgcctgacctgggcctgcagatccactacctgcggctgaccatcgccatcctgcggcatgagaagagcaggaagttcctgctgagcaatgtgctgtttgatgtgctgcggtctgtggtgttcttctacatcaagagccccctgcgggtggaggaggccggcctgcaggagctgatccccaccacctggtggccccactgcagcagccgggagggcaaggagagcacagagatgaaggaggagacagctgaggagcggctgcggcggcgggcctatgaaagaggctgccagaggctgaggaagagaattgaggtggtggaggagctgcaggtgcagatcctgaagctgctgctggacaacaaggatgacaatggaggagaggccagccgctacatcttcctgaccaagttcaggaagttcctgcaggagaatgccagcggccggggcaacatgcccatgctgtgccccccagagtacatggtgtgcttcctgcacaggctcatcagcgccctgcgctactactgggatgagtacaaggccagcaacccccacgccagcttcagcgaggaggcctacatccccccccaggtgttctacaacgggaaggtggactactttgacctgcagaggctgggcggcctgctgagccacctgaggaagaccctgaaggatgacctggccagcaaggccaacatcgtcatcgaccccctggagctgcagagcacagccatggatgacctggatgaagatgaggagcccgccccagccatggcccagaggcccatgcaggccctggccgtgggcggccccctgcccctgccccggcccggctggctgagcagccccaccctgggccgggccaaccgcttcctgagcacagctgctgtgtccctgatgaccccccggcggcccctgagcaccagcgagaaggtgaaggtgaggaccctgtctgtggagcagaggacccgggaggacatcgagggcagccactggaatgaaggcctgctgctgggccggcccccagaggagcctgagcagcccctgacagagaacagcctgctggaggtgctggatggagctgtgatgatgtacaacctgtctgtgcaccagcagctgggcaagatggtgggcgtgtctgatgatgtgaatgaatatgccatggccctgcgggacacagaggacaagctgcggcgctgccccaagaggaggaaggacatcctggccgagctgaccaagagccagaaggtgttcagcgagaagctggaccacctgagccggcggctggcctgggtgcacgccaccgtgtacagccaggagaagatgctggacatctactggctgctgcgggtgtgcctgcggaccattgaacatggagacagaacaggcagcctgtttgccttcatgcctgagttctacctgtctgtggccatcaacagctacagcgccctgaagaactactttggacctgtgcacagcatggaggagctgcccggctatgaggagaccctgacccggctggccgccatcctggccaagcactttgctgatgccagaattgtgggcacagacatccgggacagcctgatgcaggccctggccagctatgtgtgctacccccacagcctgcgggctgtggagcgcatccctgaggagcagagaattgccatggtgaggaacctgctggccccctatgagcagaggccctgggcccagaccaactggatcctggtgcggctgtggaggggctgcggcttcggctaccgctacacccggctgccccacctgctgaagaccaagctggaggatgccaacctgcccagcctgcagaagccctgccccagcaccctgctgcagcagcacatggctgacctgctgcagcagggcccagatgtggcccccagcttcctgaacagcgtgctgaaccagctgaactgggccttcagcgagttcatcggcatgatccaggagatccagcaggccgctgagcggctggagaggaactttgtggacagccggcagctgaaggtgtgtgccacctgctttgacctgtctgtgtccctgctgcgggtgctggagatgaccatcaccctggtgcctgagatcttcctggactggacccggcccaccagcgagatgctgctgcggcggctggcccagctgctgaaccaggtgctgaacagagtgacagctgagaggaacctgtttgacagagtggtgaccctgcggctgcccggcctggagagcgtggaccactaccccatcctggtggccgtgacaggcatcctggtgcagctgctggtgcggggccctgccagcgagcgggagcaggccacctctgtgctgctggccgacccctgcttccagctgcggagcatctgctacctgctgggccagcctgagcccccagcccctggaacagccctgcctgccccagacaggaagcgcttcagcctgcagagctatgctgactacatctctgcagatgagctggcccaggtggagcagatgctggcccacctgaccagcgccagcgcccaggccgctgctgccagcctgcccaccagcgaggaggacctgtgccccatctgctacgcccaccccatctctgctgtgttccagccctgtggccacaagagctgcaaggcctgcatcaaccagcacctgatgaacaacaaggactgcttcttctgcaagaccaccatcgtgtctgtggaggactgggagaagggggccaacaccagcaccaccagcagcgctgcctag

SEQ ID NO: 211134 - DNA, 3951 bp, Artificial Sequence
  derived and/or modified sequence
atggccagcaagggggccggcatgtccttcagcaggaagagctaccgcctgaccagtgatgctgagaagagccgggtgactggaattgtgcaggagaagctgctgaatgactacctgaaccgcatcttcagcagcagcgagcacgcccccccagctgccaccagcaggaagcccctgaacttccagaacctgcctgagcacctggaccagctgctgcaggtggacaatgaggaggaggagagccagggccaggtggagggccgcctgggccccagcacagtggtgctggaccacactggaggctttgagggcctgctgctggtggatgatgacctgctgggcgtcatcggccacagcaactttggcaccatccgcagcaccacctgtgtgtacaagggcaagtggctgtatgaggtgctgatcagcagccagggcctgatgcagatcggctggtgcaccatcagctgccgcttcaaccaggaggagggcgtgggggacacccacaacagctatgcctatgatggcaacagagtgaggaagtggaatgtgaccaccaccaactacggcaaggcctgggccgccggggacatcgtgtcctgcctgattgacctggatgatggcaccctgtccttctgcctgaatggagtgtccctgggcacagcctttgagaacctgagccggggcctgggcatggcctacttccctgccatcagcctgtccttcaaggagagcgtggccttcaactttggcagccggcccctgcgctaccctgtggccggctaccggcccctgcaggaccccccatctgctgacctggtgcgggcccagaggctgctgggctgcttccgggctgtgctgtctgtggagctggaccctgtggagggccgcctgctggacaaggagagcagcaagtggaggctgcggggccagcccaccgtgctgctgaccctggcccacatcttccaccactttgcccccctgctgaggaaggtgtacctggtggaggccgtgctgatgtccttcctgctgggcatcgtggagaagggcacccccacccaggcccagagcgtggtgcaccaggtgctggacctgctgtggctgttcatggaggactatgaggtgcaggactgcctgaagcagctgatgatgagcctgctgcggctgtaccgcttcagccccatcgtgcctgacctgggcctgcagatccactacctgcggctgaccatcgccatcctgcggcatgagaagagcaggaagttcctgctgagcaatgtgctgtttgatgtgctgcggtctgtggtgttcttctacatcaagagccccctgcgggtggaggaggccggcctgcaggagctgatccccaccacctggtggccccactgcagcagccgggagggcaaggagagcacagagatgaaggaggagacagctgaggagcggctgcggcggcgggcctatgaaagaggctgccagaggctgaggaagagaattgaggtggtggaggagctgcaggtgcagatcctgaagctgctgctggacaacaaggatgacaatggaggagaggccagccgctacatcttcctgaccaagttcaggaagttcctgcaggagaatgccagcggccggggcaacatgcccatgctgtgccccccagagtacatggtgtgcttcctgcacaggctcatcagcgccctgcgctactactgggatgagtacaaggccagcaacccccacgccagcttcagcgaggaggcctacatccccccccaggtgttctacaacgggaaggtggactactttgacctgcagaggctgggcggcctgctgagccacctgaggaagaccctgaaggatgacctggccagcaaggccaacatcgtcatcgaccccctggagctgcagagcacagccatggatgacctggatgaagatgaggagcccgccccagccatggcccagaggcccatgcaggccctggccgtgggcggccccctgcccctgccccggcccggctggctgagcagccccaccctgggccgggccaaccgcttcctgagcacagctgctgtgtccctgatgaccccccggcggcccctgagcaccagcgagaaggtgaaggtgaggaccctgtctgtggagcagaggacccgggaggacatcgagggcagccactggaatgaaggcctgctgctgggccggcccccagaggagcctgagcagcccctgacagagaacagcctgctggaggtgctggatggagctgtgatgatgtacaacctgtctgtgcaccagcagctgggcaagatggtgggcgtgtctgatgatgtgaatgaatatgccatggccctgcgggacacagaggacaagctgcggcgctgccccaagaggaggaaggacatcctggccgagctgaccaagagccagaaggtgttcagcgagaagctggaccacctgagccggcggctggcctgggtgcacgccaccgtgtacagccaggagaagatgctggacatctactggctgctgcgggtgtgcctgcggaccattgaacatggagacagaacaggcagcctgtttgccttcatgcctgagttctacctgtctgtggccatcaacagctacagcgccctgaagaactactttggacctgtgcacagcatggaggagctgcccggctatgaggagaccctgacccggctggccgccatcctggccaagcactttgctgatgccagaattgtgggcacagacatccgggacagcctgatgcaggccctggccagctatgtgtgctacccccacagcctgcgggctgtggagcgcatccctgaggagcagagaattgccatggtgaggaacctgctggccccctatgagcagaggccctgggcccagaccaactggatcctggtgcggctgtggaggggctgcggcttcggctaccgctacacccggctgccccacctgctgaagaccaagctggaggatgccaacctgcccagcctgcagaagccctgccccagcaccctgctgcagcagcacatggctgacctgctgcagcagggcccagatgtggcccccagcttcctgaacagcgtgctgaaccagctgaactgggccttcagcgagttcatcggcatgatccaggagatccagcaggccgctgagcggctggagaggaactttgtggacagccggcagctgaaggtgtgtgccacctgctttgacctgtctgtgtccctgctgcgggtgctggagatgaccatcaccctggtgcctgagatcttcctggactggacccggcccaccagcgagatgctgctgcggcggctggcccagctgctgaaccaggtgctgaacagagtgacagctgagaggaacctgtttgacagagtggtgaccctgcggctgcccggcctggagagcgtggaccactaccccatcctggtggccgtgacaggcatcctggtgcagctgctggtgcggggccctgccagcgagcgggagcaggccacctctgtgctgctggccgacccctgcttccagctgcggagcatctgctacctgctgggccagcctgagcccccagcccctggaacagccctgcctgccccagacaggaagcgcttcagcctgcagagctatgctgactacatctctgcagatgagctggcccaggtggagcagatgctggcccacctgaccagcgccagcgcccaggccgctgctgccagcctgcccaccagcgaggaggacctgtgccccatctgctacgcccaccccatctctgctgtgttccagccctgtggccacaagagctgcaaggcctgcatcaaccagcacctgatgaacaacaaggactgcttcttctgcaagaccaccaccagcaacctgctggcctgcctgtacccccactggtgggagcccagccacggccccaactgtgcctag

SEQ ID NO: 211135 - DNA, 4057 bp, Artificial Sequence
  derived and/or modified sequence
cctgaacggacgccgtagccaagaggttgggcggatgttgtgagccgggtcgctgcggccgaggctccggcccccaggaccactggctgcccatgagagatgaaggatggcatccaagggggccggcatgtctttctcccgcaagagctataggctgacctcagatgctgagaaatccagggtcacaggcattgtgcaggagaagctgctgaatgactacctgaaccgcatcttttcctcttctgaacatgcacccccagcagccaccagcaggaaacccctgaacttccagaacctgccagaacatttggaccagttgctacaggtggacaatgaggaggaggaaagccagggacaggttgaagggcggcttggcccatccactgtggtcctggaccacacaggcggctttgaggggcttctcctggtggatgatgacctgctgggggtgattggacacagcaactttggcaccatccgctctaccacatgcgtgtacaaagggaaatggctctacgaggtcctcatctcctcccaggggctcatgcagatcggctggtgcaccatcagctgccgcttcaaccaggaggagggggttggagatacacacaactcctatgcctatgatggcaaccgcgtgcgcaagtggaatgtgaccacaacgaattatggcaaggcgtgggcagcgggggacatcgtgagctgcctgattgacctggatgatggcactctgtccttctgcctgaacggtgtatcactgggcactgcctttgagaacctgtccaggggcctgggtatggcctacttcccagccatcagcctctctttcaaggagtccgtggccttcaactttggcagccgtcctctgcgctacccagtggcaggctaccggcccctgcaggacccaccgagtgctgacctggtgcgggcacagaggttgctgggctgcttccgggcagtgctgagtgtggagctggaccctgtggaggggcggctgttggacaaggagagctccaagtggcggttgcggggccagcccaccgtcctcctcacactggcccacatcttccatcactttgcaccgcttctgcgcaaggtgtatctggtggaggctgtgctcatgagcttcttgctgggcatcgtggagaagggcacacccacacaggcacagtccgtggtgcaccaggtcctggacctcttgtggctcttcatggaggactacgaggtacaagattgcctcaagcagttgatgatgtctctgcttcggctgtaccgattctcacccattgtcccagacctgggcctacagatccattacctgcggctcactatcgccatcctgaggcatgagaagtcccgcaagtttctgcttagcaatgtcctcttcgacgtgctccgctccgtcgtcttcttttacatcaagagccccctgcgtgtggaggaggccggcctgcaggagctcattcccaccacctggtggccccactgctccagtagggagggcaaagagagcacggagatgaaggaggagaccgcagaggagcggctgcggcggcgagcctacgaacggggctgtcagcggctcaggaagcgcatcgaagtggtggaagaactacaggtccagatcctgaagctgctgctggacaataaagatgacaatgggggtgaagcttctaggtatatcttcctgaccaagtttcgcaagtttctgcaggagaacgccagtggccgggggaacatgcccatgctctgcccccctgagtacatggtctgcttcttacaccggctgatctctgccctgcgctactattgggatgaatacaaggcttccaatcctcatgcttccttcagtgaggaggcctacatcccgccccaggtcttctataatggcaaggtggactactttgacctgcagcgcctggggggcctcctctcgcacctgcggaagaccctcaaagatgaccttgcttccaaagccaacattgtgatcgacccactggagctccagtcaaccgccatggatgacctagatgaggatgaggagccagccccagctatggcccagcgccccatgcaggccctggctgttggggggccactgcccctgccccggcccggctggctcagttctccaactttgggccgagccaaccgcttcctcagcacagcggctgtgagcctcatgaccccacggcggcctctgagcacctcggagaaagtgaaggtccgcacgctgagcgtggagcagaggacccgtgaggacattgaaggcagccactggaatgagggcttgctgctggggcggccccccgaggagcctgagcagcccctcaccgagaactcgctgctggaagtcctggatggggcggtcatgatgtacaacctcagcgtacaccagcagctgggcaagatggtgggtgtctccgatgatgtcaatgaatacgctatggctctgagggacacagaggacaagctccgccggtgccccaagaggaggaaggacatccttgcagagttgaccaagagccagaaggttttctcagaaaagctggaccacctgagccgccgtcttgcctgggtccatgccactgtctactcccaggagaagatgctggacatctactggctgctgcgcgtctgcctgcggaccattgagcacggtgatcgcacagggtctctctttgccttcatgcccgagttctacctgagcgtggccatcaacagctacagtgctctcaagaattactttggtcccgtgcacagcatggaggagctcccaggctatgaagagaccctgacccgcctggctgccattctcgccaaacactttgccgacgcacgcattgtgggcactgacatccgagactcactgatgcaggccctggccagctacgtgtgctacccacactccctgcgggctgtggagcgaatccccgaggagcagcgtatcgccatggtgaggaacctcctggcgccctatgagcagcggccctgggcccagaccaactggatcctggtgcggctctggaggggctgtggcttcgggtaccgctatacacggctgccacatctgctgaaaaccaaacttgaggacgccaatttgcccagcctccagaagccctgcccttccaccctgctgcagcagcacatggcggacctcctacagcagggtcctgatgtggcacccagcttcctcaacagcgtcctcaatcagctcaactgggccttctctgaattcattggcatgatccaagagatccagcaggctgctgagcgcctggagcggaactttgtggacagccggcagctcaaggtatgtgccacctgctttgacctctcggtcagcctgctgcgtgtcttggagatgactatcacactggtgcctgagatattccttgactggacccggcctacctctgagatgctgctgcggcgtcttgcacagctgctaaaccaggtgctgaaccgggtgacagctgagaggaacctgtttgatcgtgtggtcaccctacggctgcctggcctagagagcgtggaccactatcccattctggtggcagtgacgggcatcctggtgcagctcctggtgcgtggcccagcctcagagagagagcaagccacatcagtgctcctggcagatccctgcttccagctacgctcaatatgctatctcctgggacagccagagcccccagcacctggcactgctctgccagcccctgaccggaagcgcttctccctgcagagctatgcggattatatcagtgccgatgagctggcccaagtggaacagatgctggcgcacctgacctctgcatctgcccaggcagcagctgcctccctgcccaccagtgaggaggacctctgccccatctgctatgcccaccccatctctgctgtgttccagccctgtggccacaagtcctgcaaagcctgtatcaaccagcacctgatgaacaacaaggactgcttcttctgcaaaaccaccacatccaacctccttgcctgcctgtatcctcattggtgggagcccagccatggccctaattgtgcctga

SEQ ID NO: 211136 - DNA, 3945 bp, Artificial Sequence
  derived and/or modified sequence
atggccagcaagggcgccggcatgagcttcagccggaagagctaccggctgacgtccgatgccgagaaaagcagggtgaccggcatagtgcaggaaaagttattgaacgactacctgaacagaattttcagttcctccgagcacgcaccaccagctgcgacatcgcgcaaacccttaaatttccagaacctgcctgaacatctggaccaactcctccaggttgacaacgaggaggaagagagccagggacaggttgaaggaaggctcggccccagtacagtcgtactcgatcacaccgggggcttcgagggacttctgctcgttgatgacgacctgctgggggtgattggtcactctaactttggcactatccgttccacaacatgtgtgtacaaagggaaatggctttatgaagtcctcataagctctcaggggctgatgcaaatcggatggtgcacgatcagctgcaggtttaaccaagaagagggtgttggtgatacccacaattcttatgcctatgatggcaaccgtgtcaggaaatggaacgtgactaccactaactatggcaaagcttgggctgcaggcgacatagtttcgtgcctcatcgacttggacgatgggaccctgtcattttgcttgaacggggtttccctcgggaccgcctttgagaacctttcacgaggtcttggtatggcttactttccagccatctcactcagctttaaagagtctgtcgcgttcaattttggctcccggccgcttagatatcccgttgccggatataggccgctgcaagatccgccctccgctgaccttgtgagggcacaaagactgctgggatgctttcgggctgtgctgtcagtggagcttgatccagtggaggggcggctgctggacaaggaatcatccaagtggcggttgcgagggcagccgactgtgctcttgactttggcccacatttttcatcattttgcgccgctcctgagaaaagtctacctggtcgaagctgtcttaatgagcttcctcctgggcatcgtcgagaaaggaacacccactcaggctcagtctgtggtccaccaggtactggatctgctgtggctgtttatggaggactacgaggtgcaggattgccttaagcagctgatgatgagcctattgcgcctatatcggttcagccctatcgtcccagatctcggcctccaaattcactatttacggcttacaattgcaatcctgcgtcacgaaaagtccaggaagttcctgctctccaacgtactctttgatgtcctacgatctgttgtttttttctatatcaagagccccttgcgagtggaagaagccgggttacaggaactgatacctaccacctggtggccccactgctcctcacgcgagggcaaggaaagtactgaaatgaaggaggagacagcggaggaacggttaagaaggagggcatacgaaagaggttgccaacggctgaggaagcgtatcgaggtggtggaagagctccaggtgcagattctgaagttgctgctggataataaggatgataacggtggcgaggcttctcggtacatctttctgacaaaatttagaaaatttctccaggagaacgccagcggccgcggcaacatgcctatgctgtgccctcccgagtacatggtgtgttttctgcaccggctgatctcggcccttaggtattactgggatgagtacaaggcttcaaaccctcacgcctccttttccgaggaggcctatatcccgccacaggtcttctataacggcaaggtagactattttgatctccagagacttggaggactcctgtcacatcttaggaaaacacttaaagacgacttagccagcaaggcaaatatcgtgatagaccctctggagttacagagcaccgctatggatgatctcgacgaggatgaagaacctgctccagctatggcacaacgcccgatgcaagccctcgcagtgggcgggccccttccgcttccgcggcctggatggctgagctcaccgaccttgggcagagccaacagattcttgagcaccgccgcagtaagtctcatgactcccagaagacctctgagcaccagtgaaaaggtgaaagtccgcactctgtccgtggagcaacggactagggaggacatcgagggctctcactggaacgaagggcttctcttgggtagacctcctgaggagcctgaacagccattaactgaaaacagcttgctggaggtgctggacggtgcagtgatgatgtacaacttgtctgtgcaccagcagctaggtaagatggtcggcgtaagtgatgacgtgaatgaatacgcaatggctctcagagatactgaagataagcttaggcgatgcccaaagcggcgcaaagatatcctagcagagctgaccaagtcccagaaagtcttcagcgagaagcttgatcatctctctcggaggctcgcgtgggtccatgccaccgtatacagccaagaaaaaatgctcgatatctattggcttctgcgggtttgtctgcgaaccatcgaacacggggatcgaaccggctccttatttgcgtttatgccagagttctatctcagcgtggctatcaattcgtatagcgcactcaaaaattacttcgggcccgtccactcgatggaggagcttccaggctatgaagagactctgacacggctggccgcaattctggctaaacacttcgcagacgctcgtattgtggggactgatattcgcgattccctaatgcaagcacttgcctcctacgtatgttatccacactctctccgggccgtcgagaggatcccagaggagcagaggatcgcaatggtgcgcaacctgctcgccccctatgagcaacgcccatgggcccagacaaattggattctcgtgcgactctggcgcggatgtggtttcggctaccgctacacgcggctgccgcatttgctcaaaactaaactggaagacgctaacttaccctccttacagaagccatgcccatccacccttctccaacagcatatggccgacctgctacaacagggacctgatgtagctccgagctttctcaactccgttctgaaccaactcaattgggcattctcggagttcataggaatgattcaggagatccagcaagctgcggagcgtttggaacggaactttgttgactctcgacagcttaaagtgtgtgccacttgcttcgatctgagtgttagccttctgagagtgcttgagatgacaattactctagttcccgagatctttctcgattggacacgcccaacaagcgagatgctgttgcgccggttggcacaattactgaatcaggtcttgaatcgggtcacagctgaaagaaatctgttcgatcgggtggtgacactgaggcttcccgggctggaaagcgtcgaccactatccaattttggtcgcggtaactggtattttagtccagctcttggtcagaggtccagcatctgagcgtgaacaggccacgtcggtactgctggccgacccgtgctttcagctaagatcaatctgctaccttttaggccagcctgaaccacccgcacctggaaccgccttaccagctcccgataggaagagattcagcctacagtcttacgcagactatatatcagccgacgagctagcccaggtggagcagatgctggcccatcttaccagcgcttctgcccaggccgctgctgcctccttgccaacgtcggaggaggatctctgtcctatctgctatgcgcacccaatcagcgccgtttttcagccttgcggacacaagtcgtgcaaagcatgtatcaatcagcacctgatgaataataaggattgctttttctgtaagaccaccattgtgtcagtcgaggactgggaaaagggagctaacacctcgaccacaagtagtgccgcgtag

SEQ ID NO: 211137 - DNA, 3951 bp, Artificial Sequence
  derived and/or modified sequence
atggccagcaagggcgccggcatgagcttcagccggaagagctacaggcttacttccgacgcggagaagagcagggtgaccggaatcgtgcaggaaaagttgctgaatgattatctgaatcgcatttttagctcttccgaacacgccccacctgctgccactagtcgcaaacctctaaatttccagaatctccccgagcacctggatcagttactgcaagtggacaacgaagaggaagagagtcagggccaggtggagggaaggctaggcccaagcaccgtcgtgctggatcacaccggcgggtttgagggactactactcgttgacgacgacttactgggagtgattggccattctaattttggaactatcaggtcaactacttgtgtttataagggaaagtggctgtacgaggtgctgatctccagtcagggcctgatgcagatcgggtggtgtaccatcagctgtcggtttaatcaggaggaaggagttggcgacacacacaactcatatgcttatgatggaaacagggtgcgtaagtggaatgtgactacaacaaactatggcaaggcttgggctgccggggatatcgtatcgtgcctgatcgacctagacgacggcaccctgagcttctgtctcaatggggtcagtctgggaaccgcctttgagaacctctcacgagggcttggtatggcatatttcccagccatcagtttgagttttaaggagtctgtcgcttttaatttcggctcccgacctctgagatatcccgtcgcagggtaccggccgctacaggatccaccttcagcggaccttgtgcgagcgcagcgcttgcttggttgcttccgggcggtgctgtcagtcgaactcgatccagtggagggccgcctgcttgataaggaaagttccaagtggagactgcggggacaacccacagtattgttaactctggcacatattttccaccattttgccccactgctccgcaaggtgtaccttgtcgaggcagtcctgatgtcctttttgttgggcattgtggagaagggaacaccaacacaggcccagtctgtcgtacatcaggtgctcgatctcttgtggttgttcatggaagattatgaggtacaggattgtctcaagcaactgatgatgtccctcctacgcctctaccgcttcagccctatcgtccctgacctgggccttcagatccattatctgcgcctgaccatcgcaatcctgagacatgagaaatctagaaagtttctcttaagcaacgtgcttttcgacgtgctgcgcagtgtcgttttcttttacattaagtcccctctgagggtggaggaggctggattacaggaactgattcctaccacgtggtggccccactgttcgagccgggaagggaaggagtcaaccgaaatgaaggaggagaccgccgaggagcgcctgcggcgtagagcgtacgagcgaggatgccagagactgaggaaaagaattgaggtcgtggaagaactgcaggtgcagatcttgaaactgctgttagacaacaaagacgacaatgggggcgaggcttctcgctacatttttctcaccaagttccgtaagttcctccaagagaatgcctcaggacgggggaacatgccaatgctctgtccccccgagtatatggtttgcttcctgcaccgactgattagcgccctccgctattattgggacgagtacaaggcttcaaacccccatgccagcttctccgaggaggcttacattccaccacaggtgttttacaatggcaaagtggattattttgatctacaaagactgggcggtctccttagccacctgagaaagacactgaaggacgatctagccagcaaagctaatatcgttatcgatccactggaactccagtctaccgctatggacgacctggacgaagatgaggaacccgcacccgccatggcccagagaccaatgcaggccctcgcagtggggggccctcttcccctcccgaggccaggatggttgtcttcccccacactgggacgcgctaataggttccttagtaccgcggccgtgagcctaatgaccccccgtcggcctttgagcacgagcgagaaggttaaagtccggactttgtcggtggagcaaagaacacgcgaggacatcgaaggaagccactggaacgagggactgctgttaggtcggccccccgaggagccagagcaacctctgacagagaacagtctccttgaggtgcttgatggggccgtaatgatgtacaatttatccgtacatcaacagctgggtaagatggtcggtgtgtctgatgacgtgaatgagtacgccatggcacttagagacacagaagacaagttaagacgctgccctaagcggagaaaagatattctcgcagaattaaccaagtctcagaaggtgttttcagagaaattggatcacttaagcagaaggctggcctgggtgcacgcaacggtctactctcaggaaaaaatgctggacatttactggctcctgcgggtctgtctgcgcacaattgagcatggcgacagaactgggtctctgttcgctttcatgcctgagttctacctcagcgtcgccatcaacagttattctgctctgaagaactacttcgggcccgttcattctatggaagagttgcccggctatgaagagactctcaccagactcgctgctatcctcgcaaagcactttgccgatgctcggattgtcggcacggacatcagagatagtctgatgcaggccctggcctcatatgtctgctaccctcactccctccgggccgtcgaaaggataccagaggaacagcgtatcgccatggtgcgcaatctcctggcaccctacgagcagcgaccatgggcacagaccaattggatcctggtccggttgtggagaggctgcggctttggatacagatatactcgtttgccccaccttctaaagacaaaattggaggacgccaatctgccgtccctgcagaaaccgtgtccaagcactttactccagcagcacatggcggatctgctgcagcagggtcccgatgttgctccaagttttctgaattctgtacttaatcaactgaactgggcgttttctgaatttatcggcatgatccaagagattcaacaagccgccgagagactagagcggaacttcgttgatagtcggcagctgaaagtatgtgccacttgtttcgatctgtccgtgagcctccttcgtgttcttgaaatgacaatcaccctcgtaccagagatctttctggactggaccaggcctacaagcgagatgttgctacggaggcttgcacagcttcttaatcaggtcctcaacagggtcactgccgagcggaatctatttgatcgggtagtaacactgcggctgccgggtctggaatctgtggatcattaccctatcctagtggccgtgaccgggatccttgtgcagttgctcgtacggggccccgcctccgagcgtgagcaggccacgagtgtactgctggctgacccctgcttccaattacgctccatttgttacctcttaggacagcctgagccgcctgccccggggaccgctttacctgccccagacaggaaacggtttagccttcagtcctatgctgattatatcagcgctgatgagctggcgcaggtggagcagatgctagcccatctcacctcagcctctgcacaggcggcagccgctagtctgcccaccagtgaagaggacctctgtcctatctgctacgcacatccaatcagcgctgtcttccagccttgcgggcacaaatcttgtaaggcctgtatcaaccaacatcttatgaacaacaaagactgctttttttgcaaaaccactacctcaaacctgctggcatgtctatatcctcattggtgggaaccttcccacgggccaaactgcgcgtag

SEQ ID NO: 211138 - DNA, 3945 bp, Artificial Sequence
  derived and/or modified sequence
atggcatcgaagggggcagggatgtccttctccaggaagagctatcgtctaacaagcgacgctgaaaaaagcagggtgaccggtatcgtgcaggagaaattgctcaacgactacctgaacagaatcttcagctcctccgagcacgccccaccagccgctaccagtcggaaaccactcaacttccaaaacctccccgaacatctggatcagctcctgcaagtggataatgaggaagaggaatcgcagggacaagttgagggaaggctggggccatccaccgtggtgctcgatcacaccggcggtttcgaaggtctactgctggtggatgacgatctgttgggcgtcatcggacacagcaacttcggaactatccggagtaccacatgtgtttataaaggaaagtggctgtatgaggtgctaatatctagccagggattaatgcagatcggctggtgcacaatttcttgccgcttcaaccaagaagaaggagtcggggatactcacaactcttacgcctatgatggcaacagagtgagaaagtggaatgtcacgaccacaaattacggtaaggcttgggctgctggcgacatcgtgtcttgcttgatcgatcttgacgatgggactctcagtttttgcttgaatggggtttccttgggtaccgcttttgagaatcttagtcgaggcctgggaatggcctacttcccggctatttccctctccttcaaagagtccgttgccttcaatttcggaagcaggcccctgcggtatccagttgcaggatacaggcctctccaggatcctccctcggcagacttggttcgggcacagcgtctgctgggctgcttcagggctgtactatcagtggaactagacccagtggagggaaggctgttggacaaggaatcatcaaaatggaggctgcggggtcaacccactgtgctgctgacattggctcatatttttcaccactttgctcctctcctgaggaaggtttacctcgtggaagctgtcctgatgagcttccttctgggaatcgtggaaaaaggcacccctactcaagctcagtcagtcgtacaccaagtcttggacctcctctggctctttatggaggattatgaagtccaggattgcctgaagcaattgatgatgagcctcttgcgcttatatcgcttctcaccaatcgtgccggaccttggcctgcagatccattatcttagactgacgatagcgatccttcgccatgaaaaaagtcgaaagtttttgctctccaacgtgttgtttgacgtgctgcggagcgtggtatttttttatataaagagccctctgcgcgtagaggaggcgggacttcaggagctgatcccaaccacctggtggcctcactgcagctctcgggagggcaaagaaagtacagagatgaaggaggagaccgcagaggagagattacgcaggagagcgtatgagcgcggatgtcaacggttacgaaaaagaattgaagtggtcgaagagttgcaggtgcaaatcctgaagctgctgctggataacaaagacgacaacgggggtgaagcctcaagatacatatttttgacgaagttcagaaaattcttgcaggaaaacgcatccggccgaggcaatatgccaatgctatgtccccctgagtatatggtctgttttttacacaggttaatttccgctttgcggtattattgggacgagtataaagcttcaaacccacacgcctcctttagcgaggaggcatacataccccctcaggtgttctataacggtaaggtggactattttgacttgcaacgtctcggaggacttctcagccacctgcggaaaactctgaaggacgatctggccagcaaggctaacatcgtcatcgacccccttgaactgcagagcaccgccatggacgacttggacgaagacgaggaacccgctcccgctatggcacaacgtccaatgcaggctttggctgtgggcggaccactgcctctcccacgtccaggatggctcagctctcctacccttggaagagctaatcggtttctatcaacagccgctgtgagtctgatgacgccgaggaggccactttctacatccgaaaaggtgaaagtacgcactctgagcgttgagcagaggacccgagaagacatcgaaggttcgcattggaacgaaggtctactcctgggccgacctcccgaggagccagagcagcctctaacagagaacagcctgctcgaggtgctggatggggcagtcatgatgtataacctctcggtgcaccagcagcttgggaagatggtaggtgtgtctgatgacgtgaatgaatatgcgatggctctgcgtgatactgaggacaaactgcgccgatgtccgaaacgcaggaaggacattctcgcagaattgaccaaaagccagaaggtcttttccgaaaaattggaccacctgtccaggcggctggcgtgggttcacgcaaccgtgtattctcaggagaagatgctggatatctattggcttttgcgggtatgcctgaggacaatcgagcacggagaccggaccggctccctatttgcgttcatgcccgaattttacttgagtgtcgcaatcaattcttacagtgcactcaaaaattacttcggacctgtgcacagtatggaggagctccctggatatgaagagaccctaacgcggctagccgcaatcctggcaaaacacttcgctgacgccagaatagtggggactgatattagggattctcttatgcaggccctggcctcttatgtttgttacccccacagcctgcgggcagtggagaggatacctgaggaacagcgcatagcgatggtgcgtaatcttctcgcaccttatgaacagcgaccttgggcacagaccaactggatcctggtgagactgtggagaggatgcggatttgggtaccgctataccaggctcccacacctgcttaaaacaaaacttgaagatgccaacctgccctcacttcagaagccatgtcccagcacactgctgcagcagcacatggccgacctgttgcagcaaggacccgatgtcgccccttctttcttgaacagtgtgctcaaccagctaaattgggcgttttcagaatttatagggatgatccaggagattcagcaagctgctgaaaggctggagcgtaacttcgtcgactctaggcaacttaaagtttgtgctacatgttttgatctaagcgtctccctgctcagagtgctggagatgacaatcacactcgttccagaaattttcctagattggaccaggcccacatccgagatgctccttcgaaggctggcccagctgctgaaccaagtcctcaatagagtcactgccgaaaggaacctcttcgaccgagtggtgaccctacgcttaccaggactcgaatcagtggaccactaccccattcttgtcgccgtgaccggtattctggtgcagctgctagttcgagggcctgcatctgagcgtgaacaggccactagcgtactgctggccgacccttgttttcaactccgaagcatttgttatctcttgggtcagccagagccccctgcgccagggacagccctgcctgcacctgaccgcaagcgctttagtctccagtcttatgctgactatatttccgccgacgaattggcacaggtagaacagatgctggcccaccttacatcggcgagtgcccaggctgcggctgcaagccttcccacctccgaagaggacctctgtccaatctgctatgcccatcctatctcagctgttttccagccctgtgggcataagtcctgtaaggcctgcattaatcaacatcttatgaacaataaggactgttttttctgcaaaactaccattgtgtctgtggaggattgggagaagggcgctaacacctccaccacctcatcagctgcttag

SEQ ID NO: 211139 - DNA, 3951 bp, Artificial Sequence
  derived and/or modified sequence
atggcctccaagggggctggaatgtcgttttccaggaaatcctaccgcctcacatctgacgccgaaaagagtcgggtgactggtatagtgcaagaaaaactgctaaatgactaccttaataggatcttctcatctagtgaacacgctccaccggctgccacgagccgtaagcccctgaactttcagaacttaccagagcaccttgaccagctgttgcaagtggataatgaagaagaggagtctcaaggccaagtcgaaggaagactgggcccttccactgtcgttttggaccataccggagggttcgagggcctgttactggtcgacgacgaccttctcggcgtgattggtcatagtaattttggaacaattcgaagcactacctgcgtctataaagggaagtggctctacgaagtgttgattagctcacagggactgatgcagattggctggtgcacaatttcctgccggtttaaccaggaggaaggcgtgggagatacccacaattcctatgcgtacgatggcaatcgagtccggaagtggaatgtcactaccacaaattacgggaaagcttgggcagccggagatatcgtctcctgcctgatcgacctcgatgacggaaccctgtctttctgcctcaacggggtttccctggggactgcctttgaaaacctatctagaggcttgggtatggcttacttcccagctatctctttatccttcaaagaatcagtcgcattcaatttcggatcccgacccctccgctacccagtcgctggctacaggccactccaggaccctccgtctgctgacctggtgcgtgcccagaggctgctcggctgttttcgggcagtcctgtctgtcgagctcgaccctgttgagggacggctgctggataaagagagctcaaaatggaggcttagagggcagcccacagtgttgcttacactggcacacatctttcatcactttgccccattgctgagaaaggtgtatcttgtggaggccgtgctgatgagttttctcttgggtattgtggaaaaagggacacctacgcaggcgcagtccgtggtgcaccaggtcctggacctgctgtggctgtttatggaggactatgaggtgcaagactgtctgaagcaattaatgatgagcctgcttaggttgtatagattcagtcctatcgttccagatttggggctgcagatccactacttgcggttaacaattgccatcctccgtcacgaaaaaagcagaaagtttctcctgtccaatgtgctgttcgatgtgcttagatctgtggtcttcttctacattaagtctcctttacgagttgaagaggcaggactccaggaattaattcctaccacttggtggccccactgctcatcgagggagggcaaggaatccacggagatgaaagaggagacagccgaagaaaggttacgtcggagagcttatgagagaggatgccagagattgcggaagcggatcgaggttgtcgaggaactgcaagtgcagattctcaaacttctgctggataacaaggatgacaacggcggagaggcctctcgttatatttttctgactaaattccgcaagtttctccaagaaaacgcttctggcagaggaaatatgccaatgctgtgcccacctgaatatatggtatgctttctgcacagactgatatcggccctaaggtactactgggacgaatacaaagcatccaaccctcatgcgtcctttagtgaggaggcttatatcccccctcaggtgttctataatgggaaggtcgactactttgacttgcaacggcttggcggactgctgagccatctgcgaaagactcttaaagacgacttagcctccaaggcaaacatcgttattgatcctttggaactgcagtcaactgcgatggatgaccttgatgaggacgaagagcctgcgccagcgatggcccaaaggccgatgcaagctcttgccgtcggagggcctcttccactgccccgtcccggatggctttccagccctacactggggagagccaataggtttctgtcaactgcagccgtctcgctgatgactcccagaagacccctgtctacttcggagaaggtcaaggtgcgtaccctcagcgtagagcagcgaactagagaagacatcgaaggcagccactggaatgaagggcttcttctagggcgaccaccagaggagcccgaacagcctttgactgaaaattcgctgctggaggtgctggacggagcggtgatgatgtataatttgtcagtacatcagcagctgggaaaaatggtgggtgttagtgacgacgttaacgaatacgccatggctctgagagatacagaagataaactccgcaggtgtcccaaacgacgtaaagatatactcgcggagctgacgaaaagccaaaaagtgttttcagaaaagctggatcatttgagcagacgactggcttgggtgcatgccactgtgtatagccaagagaagatgctggatatatactggctcctcagagtctgcctcaggacgatcgagcacggcgacagaacaggtagcctgttcgcctttatgccagaattttatttatccgtagctatcaacagctactccgctcttaagaattatttcggcccagtgcacagtatggaagaattacctggatacgaggagactctcacgcgcctggcggcaatattggccaagcactttgccgacgcgcgtattgttggaaccgacataagagattccctgatgcaagctctcgcaagttatgtctgctatcctcactcactgagggccgttgaaaggatccctgaagaacaacggatcgcaatggttagaaacctgctggccccatacgagcagcgcccatgggcacagacaaactggatccttgtccggctctggcgtggatgcggcttcggttacaggtataccagacttccccaccttctgaaaacaaagttagaggacgccaaccttccttccttacaaaagccttgcccatccaccttgttgcagcagcacatggccgacctgcttcagcaggggcctgacgtcgcgccatcattcctgaactccgtcctgaatcagctcaactgggctttctctgaatttattggcatgatccaagagatccagcaggcagccgaacgcctagaacgaaactttgtcgacagcagacaacttaaagtgtgcgctacatgtttcgatctgtcagtctcattgctcagagtgctcgaaatgaccatcacactggttcctgaaatctttcttgactggactcgacctacatccgaaatgcttctgaggcgacttgcccagctgcttaatcaagtcctcaaccgtgtgactgctgagcggaatctcttcgaccgtgtggtgaccctgagactacctggcctggagagcgtcgaccactatccaatcctggtggccgtcacaggaatccttgtccagctcctggtgcgcggacctgccagtgaacgcgaacaggctaccagcgtgctgctggctgatccatgcttccagctgcgatcaatttgttacttacttggtcaacccgaacctccggctcccggaacggccctgcccgcaccggaccgcaagcgtttcagtctgcagtcctatgccgattacatctccgctgacgagcttgcccaagtcgagcagatgctggcacacttaacatcggctagcgcccaggccgcagccgctagtttgcccacctctgaggaggacctgtgcccgatttgttacgcgcatcctatctccgcagtgttccagccttgcggtcataaaagttgcaaggcgtgtatcaaccaacacctgatgaacaacaaagattgttttttttgcaagacaactacaagcaatctattggcctgcctatatcctcactggtgggagccttcccacggacccaactgtgcttag

SEQ ID NO: 211140 - DNA, 4311 bp, Artificial Sequence
  derived and/or modified sequence
gctggaggctcagcgcgcaagcgtgcgcgtgatttggccctgaacggacgccgtagccaagaggttgggcggatgttgtgagccgggtcgctgcggccgaggctccggcccccaggaccactggctgcccatgagagatgaaggatggcatccaagggggccggcatgtctttctcccgcaagagctataggctgacctcagatgctgagaaatccagggtcacaggcattgtgcaggagaagctgctgaatgactacctgaaccgcatcttttcctcttctgaacatgcacccccagcagccaccagcaggaaacccctgaacttccagaacctgccagaacatttggaccagttgctacaggtggacaatgaggaggaggaaagccagggacaggttgaagggcggcttggcccatccactgtggtcctggaccacacaggcggctttgaggggcttctcctggtggatgatgacctgctgggggtgattggacacagcaactttggcaccatccgctctaccacatgcgtgtacaaagggaaatggctctacgaggtcctcatctcctcccaggggctcatgcagatcggctggtgcaccatcagctgccgcttcaaccaggaggagggggttggagatacacacaactcctatgcctatgatggcaaccgcgtgcgcaagtggaatgtgaccacaacgaattatggcaaggcgtgggcagcgggggacatcgtgagctgcctgattgacctggatgatggcactctgtccttctgcctgaacggtgtatcactgggcactgcctttgagaacctgtccaggggcctgggtatggcctacttcccagccatcagcctctctttcaaggagtccgtggccttcaactttggcagccgtcctctgcgctacccagtggcaggctaccggcccctgcaggacccaccgagtgctgacctggtgcgggcacagaggttgctgggctgcttccgggcagtgctgagtgtggagctggaccctgtggaggggcggctgttggacaaggagagctccaagtggcggttgcggggccagcccaccgtcctcctcacactggcccacatcttccatcactttgcaccgcttctgcgcaaggtgtatctggtggaggctgtgctcatgagcttcttgctgggcatcgtggagaagggcacacccacacaggcacagtccgtggtgcaccaggtcctggacctcttgtggctcttcatggaggactacgaggtacaagattgcctcaagcagttgatgatgtctctgcttcggctgtaccgattctcacccattgtcccagacctgggcctacagatccattacctgcggctcactatcgccatcctgaggcatgagaagtcccgcaagtttctgcttagcaatgtcctcttcgacgtgctccgctccgtcgtcttcttttacatcaagagccccctgcgtgtggaggaggccggcctgcaggagctcattcccaccacctggtggccccactgctccagtagggagggcaaagagagcacggagatgaaggaggagaccgcagaggagcggctgcggcggcgagcctacgaacggggctgtcagcggctcaggaagcgcatcgaagtggtggaagaactacaggtccagatcctgaagctgctgctggacaataaagatgacaatgggggtgaagcttctaggtatatcttcctgaccaagtttcgcaagtttctgcaggagaacgccagtggccgggggaacatgcccatgctctgcccccctgagtacatggtctgcttcttacaccggctgatctctgccctgcgctactattgggatgaatacaaggcttccaatcctcatgcttccttcagtgaggaggcctacatcccgccccaggtcttctataatggcaaggtggactactttgacctgcagcgcctggggggcctcctctcgcacctgcggaagaccctcaaagatgaccttgcttccaaagccaacattgtgatcgacccactggagctccagtcaaccgccatggatgacctagatgaggatgaggagccagccccagctatggcccagcgccccatgcaggccctggctgttggggggccactgcccctgccccggcccggctggctcagttctccaactttgggccgagccaaccgcttcctcagcacagcggctgtgagcctcatgaccccacggcggcctctgagcacctcggagaaagtgaaggtccgcacgctgagcgtggagcagaggacccgtgaggacattgaaggcagccactggaatgagggcttgctgctggggcggccccccgaggagcctgagcagcccctcaccgagaactcgctgctggaagtcctggatggggcggtcatgatgtacaacctcagcgtacaccagcagctgggcaagatggtgggtgtctccgatgatgtcaatgaatacgctatggctctgagggacacagaggacaagctccgccggtgccccaagaggaggaaggacatccttgcagagttgaccaagagccagaaggttttctcagaaaagctggaccacctgagccgccgtcttgcctgggtccatgccactgtctactcccaggagaagatgctggacatctactggctgctgcgcgtctgcctgcggaccattgagcacggtgatcgcacagggtctctctttgccttcatgcccgagttctacctgagcgtggccatcaacagctacagtgctctcaagaattactttggtcccgtgcacagcatggaggagctcccaggctatgaagagaccctgacccgcctggctgccattctcgccaaacactttgccgacgcacgcattgtgggcactgacatccgagactcactgatgcaggccctggccagctacgtgtgctacccacactccctgcgggctgtggagcgaatccccgaggagcagcgtatcgccatggtgaggaacctcctggcgccctatgagcagcggccctgggcccagaccaactggatcctggtgcggctctggaggggctgtggcttcgggtaccgctatacacggctgccacatctgctgaaaaccaaacttgaggacgccaatttgcccagcctccagaagccctgcccttccaccctgctgcagcagcacatggcggacctcctacagcagggtcctgatgtggcacccagcttcctcaacagcgtcctcaatcagctcaactgggccttctctgaattcattggcatgatccaagagatccagcaggctgctgagcgcctggagcggaactttgtggacagccggcagctcaaggtatgtgccacctgctttgacctctcggtcagcctgctgcgtgtcttggagatgactatcacactggtgcctgagatattccttgactggacccggcctacctctgagatgctgctgcggcgtcttgcacagctgctaaaccaggtgctgaaccgggtgacagctgagaggaacctgtttgatcgtgtggtcaccctacggctgcctggcctagagagcgtggaccactatcccattctggtggcagtgacgggcatcctggtgcagctcctggtgcgtggcccagcctcagagagagagcaagccacatcagtgctcctggcagatccctgcttccagctacgctcaatatgctatctcctgggacagccagagcccccagcacctggcactgctctgccagcccctgaccggaagcgcttctccctgcagagctatgcggattatatcagtgccgatgagctggcccaagtggaacagatgctggcgcacctgacctctgcatctgcccaggcagcagctgcctccctgcccaccagtgaggaggacctctgccccatctgctatgcccaccccatctctgctgtgttccagccctgtggccacaagtcctgcaaagcctgtatcaaccagcacctgatgaacaacaaggactgcttcttctgcaaaaccaccatcgtgtctgtagaggactgggagaagggagccaatacgagtactacctcctcagctgcctagccctcacagcctgtgccatcctggaacctccacctttgaacccagagccaggctgggccctatttatgagctccctttgcccttctcctgtatcccacaccaccacatccaacctccttgcctgcctgtatcctcattggtgggagcccagccatggccctaattgtgcctgagcttgactttcagtcagggccacagtgagcattaaattattattccata

SEQ ID NO: 211141 - protein, 2752 aa, Artificial Sequence
  derived and/or modified sequence
MASEVVCGLIFRLLLPICLAVACAFRYNGLSFVYLIYLLLIPLFSEPTKTTMQGHTGRLLKSLCFISLSFLLLHIIFHITLVSLEAQHRIAPGYNCSTWEKTFRQIGFESLKGADAGNGIRVFVPDIGMFIASLTIWLLCRNIVQKPVTDEAAQSNPEFENEELAEGEKIDSEEALIYEEDFNGGDGVEGELEESTKLKMFRRLASVASKLKEFIGNMITTAGKVVVTILLGSSGMMLPSLTSSVYFFVFLGLCTWWSWCRTFDPLLFSCLCVLLAIFTAGHLIGLYLYQFQFFQEAVPPNDYYARLFGIKSVIQTDCSSTWKIIVNPDLSWYHHANPILLLVMYYTLATLIRIWLQEPLVQDEGTKEEDKALACSPIQITAGRRRSLWYATHYPTDERKLLSMTQDDYKPSDGLLVTVNGNPVDYHTIHPSLPMENGPGKADLYSTPQYRWEPSDESSEKREEEEEEKEEFEEERSREEKRSIKVHAMVSVFQFIMKQSYICALIAMMAWSITYHSWLTFVLLIWSCTLWMIRNRRKYAMISSPFMVVYGNLLLILQYIWSFELPEIKKVPGFLEKKEPGELASKILFTITFWLLLRQHLTEQKALQEKEALLSEVKIGSQENEEKDEELQDIQVEGEPKEEEEEEAKEEKQERKKVEQEEAEEEDEQDIMKVLGNLVVAMFIKYWIYVCGGMFFFVSFEGKIVMYKIIYMVLFLFCVALYQVHYEWWRKILKYFWMSVVIYTMLVLIFIYTYQFENFPGLWQNMTGLKKEKLEDLGLKQFTVAELFTRIFIPTSFLLVCILHLHYFHDRFLELTDLKSIPSKEDNTIYRLAHPEGSLPDLTMMHLTASLEKPEVRKLAEPGEEKLEGYSEKAQKGDLGKDSEESEEDGEEEEESEEEEETSDLRNKWHLVIDRLTVLFLKFLEYFHKLQVFMWWILELHIIKIVSSYIIWVSVKEVSLFNYVFLISWAFALPYAKLRRLASSVCTVWTCVIIVCKMLYQLQTIKPENFSVNCSLPNENQTNIPFNELNKSLLYSAPIDPTEWVGLRKSSPLLVYLRNNLLMLAILAFEVTIYRHQEYYRGRNNLTAPVSRTIFHDITRLHLDDGLINCAKYFINYFFYKFGLETCFLMSVNVIGQRMDFYAMIHACWLIAVLYRRRRKAIAEIWPKYCCFLACIITFQYFICIGIPPAPCRDYPWRFKGASFNDNIIKWLYFPDFIVRPNPVFLVYDFMLLLCASLQRQIFEDENKAAVRIMAGDNVEICMNLDAASFSQHNPVPDFIHCRSYLDMSKVIIFSYLFWFVLTIIFITGTTRISIFCMGYLVACFYFLLFGGDLLLKPIKSILRYWDWLIAYNVFVITMKNILSIGACGYIGTLVHNSCWLIQAFSLACTVKGYQMPAANSPCTLPSGEAGIIWDSICFAFLLLQRRVFMSYYFLHVVADIKASQILASRGAELFQATIVKAVKARIEEEKKSMDQLKRQMDRIKARQQKYKKGKERMLSLTQEPGEGQDMQKLSEEDDEREADKQKAKGKKKQWWRPWVDHASMVRSGDYYLFETDSEEEEEEELKKEDEEPPRRSAFQFVYQAWITDPKTALRQRHKEKKRSAREERKRRRKGSKEGPVEWEDREDEPIKKKSDGPDNIIKRIFNILKFTWVLFLATVDSFTTWLNSISREHIDISTVLRIERCMLTREIKKGNVPTRESIHMYYQNHIMNLSRESGLDTIDEHPGAASGAQTAHRMDSLDSHDSISSEPTQCTMLYSRQGTTETIEEVEAEQEEEAGSTAPEPREAKEYEATGYDVGAMGAEEASLTPEEELTQFSTLDGDVEAPPSYSKAVSFEHLSFGSQDDSAGKNRMAVSPDDSRTDKLGSSILPPLTHELTASELLLKKMFHDDELEESEKFYVGQPRFLLLFYAMYNTLVARSEMVCYFVIILNHMVSASMITLLLPILIFLWAMLSVPRPSRRFWMMAIVYTEVAIVVKYFFQFGFFPWNKNVEVNKDKPYHPPNIIGVEKKEGYVLYDLIQLLALFFHRSILKCHGLWDEDDMTESGMAREESDDELSLGHGRRDSSDSLKSINLAASVESVHVTFPEQQTAVRRKRSGSSSEPSQRSSFSSNRSQRGSTSTRNSSQKGSSVLSIKQKGKRELYMEKLQEHLIKAKAFTIKKTLEIYVPIKQFFYNLIHPEYSAVTDVYVLMFLADTVDFIIIVFGFWAFGKHSAAADITSSLSEDQVPGPFLVMVLIQFGTMVVDRALYLRKTVLGKVIFQVILVFGIHFWMFFILPGVTERKFSQNLVAQLWYFVKCVYFGLSAYQIRCGYPTRVLGNFLTKSYNYVNLFLFQGFRLVPFLTELRAVMDWVWTDTTLSLSSWICVEDIYAHIFILKCWRESEKRYPQPRGQKKKKVVKYGMGGMIIVLLICIVWFPLLFMSLIKSVAGVINQPLDVSVTITLGGYQPIFTMSAQQSQLKVMDQQSFNKFIQAFSRDTGAMQFLENYEKEDITVAELEGNSNSLWTISPPSKQKMIHELLDPNSSFSVVFSWSIQRNLSLGAKSEIATDKLSFPLKNITRKNIAKMIAGNSTESSKTPVTIEKIYPYYVKAPSDSNSKPIKQLLSENNFMDITIILSRDNTTKYNSEWWVLNLTGNRIYNPNSQALELVVFNDKVSPPSLGFLAGYGIMGLYASVVLVIGKFVREFFSGISHSIMFEELPNVDRILKLCTDIFLVRETGELELEEDLYAKLIFLYRSPETMIKWTREKTN

SEQ ID NO: 211142 - DNA, 1635 bp, Artificial Sequence
  derived and/or modified sequence
atggagaagctgcaggagcatttaattaaggccaaggctttcactattaaaaagaccctcgaaatctacgtgcctatcaagcagtttttctacaacctgatacacccggagtacagcgctgttacagacgtgtatgtgctgatgttcctagccgatacagtcgatttcatcatcattgtcttcggcttctgggcgttcggaaaacattcagccgccgccgacataacttcttcactatccgaggatcaggtcccgggcccgtttctggtgatggtgttaatacagtttggtaccatggtggttgacagggccctctacctgcgaaagacagtgctcggcaaggtgatctttcaggtaatcctggttttcggtatccacttttggatgttctttatcctccctggcgtgacggaacggaagttctctcagaacctcgtcgcacaattgtggtatttcgtgaaatgcgtctattttggcctctctgcttaccagatcaggtgcggataccctaccagagtccttgggaattttctcaccaaatcatacaactatgtgaatcttttcctcttccaaggattcagactggtccctttcctcacggagttacgcgcagtcatggactgggtctggacagatactaccctctcactctcctcctggatatgcgtggaggatatctacgcacatatctttattctgaaatgctggagggaatcggagaagcccatcttcaccatgtccgcgcagcaatctcagctgaaagtcatggatcagcagagctttaacaaattcatacaggccttcagccgcgatactggcgccatgcagtttctagagaattatgaaaaggaggacatcacagtcgctgaactggagggaaacagtaattcactctggacaatatctcccccttccaaacaaaagatgatccacgaactgctcgaccctaactcctcattttccgtggtattctcatggtcaattcagcgtaatctttcattaggcgctaagtccgagatcgccaccgataagttaagctttccgctcaaaaacatcacccgaaaaaacatcgccaaaatgattgccggtaattctacagagagcagcaaaacaccagtgacaatcgaaaagatctacccctattatgttaaggccccctcggatagcaacagtaagccaatcaagcagttactgagtgaaaacaactttatggatatcacaattatcctgagtcgagacaataccactaaatacaatagcgagtggtgggttttgaaccttactgggaaccggatctacaatcccaattctcaagctttggagttggttgtctttaacgacaaggtcagccccccaagcttgggattcctcgcagggtatggcataatgggcctttacgccagcgtggtgctggttattggaaagttcgtgagggagttctttagcggcattagccattcaatcatgttcgaggagctgcctaatgtggatcgaattctgaaactctgtacagacatcttcctggtccgcgagactggcgaactcgagcttgaggaagatctctacgccaaactcatcttcctgtaccgtagccctgagacgatgatcaaatggactagggaaaagacaaactag

SEQ ID NO: 211143 - DNA, 8259 bp, Artificial Sequence
  derived and/or modified sequence
atggcttccgaggtcgtgtgcggcttaatctttaggctgctccttcctatctgcttagcagtggcctgcgcttttagatataatggcctgagctttgtttacctcatctacctcttattgattccactgttttctgagccaaccaagaccacaatgcaaggccataccggtcggctgcttaaaagtctgtgctttatctctctgtcctttctcctgctgcacatcatcttccacatcacgctagtttccctggaagcacagcaccggatcgcccctgggtacaactgttctacctgggaaaaaactttccggcagatcggctttgaatccctgaagggggccgatgcgggaaacgggattagggttttcgtgcctgatatcggcatgtttattgcctccctaaccatctggttattgtgtcgtaatattgtgcagaaaccagtaacggacgaggctgcccagtctaatcctgagtttgagaacgaagagctggccgagggggaaaaaatcgactccgaggaggcccttatttatgaggaagattttaatggaggggacggcgtagagggcgagctcgaagagtcgactaaacttaaaatgttcagaaggctggccagcgtggcttccaagctaaaggagtttatcggtaacatgatcactacagccggcaaagttgtcgtaacgatcctgctaggaagctctggaatgatgctgcccagcctgacctctagcgtgtatttcttcgtgttcctggggctgtgtacctggtggtcttggtgtcgaacattcgaccctctgttatttagctgtctttgtgttttgttagctattttcaccgccggacacctcattggactgtatctgtaccagttccagttcttccaggaagctgtaccaccaaatgattattacgctcgcctttttggcattaaatctgttatacagacagattgcagtagcacttggaagatcattgtcaatccggacctgagttggtatcatcatgccaacccgattctgctcttggtaatgtactacacactggctacactgattcgcatatggttgcaggagcccctcgtacaagacgaaggtacaaaggaagaggacaaggccttggcctgttctccaattcagattacagctgggcgtcgtcggagtctgtggtacgccactcattaccctaccgacgaacggaagctgctcagcatgactcaggatgactacaaaccatctgacgggctgttggtgaccgtcaacgggaaccccgtggactatcacacaattcatccatccctgccaatggaaaacgggccaggcaaagcggatttgtatagcactccacagtatcggtgggagccgagcgacgagagttccgagaaacgcgaggaggaagaggaagagaaggaagagttcgaggaggaacgcagccgagaggaaaagaggtctatcaaggtccacgctatggtcagcgtgttccagttcataatgaaacagtcttacatctgtgcgttaatcgccatgatggcctggagcataacctaccattcttggctgacctttgtgctgctcatctggagttgcaccctctggatgatccggaatagacgcaaatacgccatgatctcttcacctttcatggtggtttatggtaacttactactgatcctgcaatacatatggagcttcgagttgccagagattaagaaggtccctggttttctagagaagaaggaaccaggagaacttgcttcaaagattctgttcacaataaccttttggctccttctccggcagcacctcaccgaacagaaggcgctgcaagagaaggaggcactgctgtcagaggttaagatcggctcccaggagaatgaagaaaaggacgaggaactccaggatatacaggtcgaaggggagcctaaggaagaggaagaagaggaagccaaggaagagaagcaggaaagaaagaaggttgagcaggaggaggctgaggaggaagacgaacaggatatcatgaaagttctgggtaatctggtggtggcaatgttcataaagtattggatatacgtgtgtggcggcatgttcttctttgtgtcattcgaggggaagattgtgatgtataagattatttatatggtcttattcttattttgtgttgctctctaccaggtacactatgagtggtggaggaagatcctcaagtatttttggatgagcgtggtcatatacaccatgctggtattgatattcatttatacctaccagttcgaaaactttcccggcctctggcagaatatgaccgggctcaagaaggaaaaactcgaagacttggggctcaaacaattcaccgtggctgagttgttcacaagaatatttatcccaacctctttccttctcgtctgcatccttcatttacattatttccacgaccgctttttagaacttactgatctgaagtcaattccgtccaaagaagacaataccatatacagactagcgcaccccgagggtagcctgcccgaccttactatgatgcaccttaccgcgtcacttgagaaacccgaggtccgaaagttagctgaacccggagaggaaaaacttgaggggtactctgaaaaagcccagaagggcgatctcggaaaagattctgaagagtctgaggaggatggtgaggaggaggaggagtccgaggaagaagaagagacctctgacctccgcaacaaatggcacctggtcattgacagactcacagtcctgttcctaaaattcctcgagtactttcataagctacaggtgtttatgtggtggatactggagttacacatcatcaagattgttagctcctatatcatctgggtgtccgtcaaggaggtatctctgtttaattacgtgttcctgatttcttgggctttcgccctgccttatgcaaaactacgaagattagcctcctctgtttgtaccgtatggacatgtgtgatcattgtgtgtaagatgctgtaccagctgcaaacaatcaagccagaaaatttctctgtgaactgtagccttcctaatgagaatcagaccaacattcctttcaatgaactgaacaaatctcttttgtactctgcgcccatcgacccaacagagtgggttggactccggaagtcatctcctttactagtctatctccgtaacaacctcctgatgctggctattttagcttttgaggttaccatctataggcatcaggagtattataggggacgaaacaatctgactgccccggtgtcaagaaccatcttccatgatattactaggctgcatctggatgatggtctgataaattgcgccaagtactttattaattacttcttctacaagttcggcctggaaacatgttttttgatgtcggtaaacgtgatcggccaacgcatggatttttatgcaatgatccatgcctgttggctgatcgctgtcctttacaggagacgccgcaaagccattgctgagatctggcccaaatactgttgctttctggcttgcattattactttccagtattttatttgtatagggattccgcccgctccctgccgagactacccctggagattcaagggagcctcgtttaacgacaatatcattaagtggctgtatttccccgactttattgtaaggcccaacccagtcttcttggtgtacgatttcatgctgctattatgcgcatctttgcaacgacagatctttgaggacgagaataaggcggctgtgcgaattatggccggtgataacgtggaaatatgcatgaacctcgatgcggcctcctttagtcagcataaccctgtacccgactttatacactgccggtcgtatcttgatatgtctaaggtgataatcttctcctacctgttctggtttgtgctgactattatttttatcacaggcacaacacgcatctctatcttctgcatgggttacctagtggcctgtttttactttttgctatttggaggggacctgctgctcaaaccaattaaaagtatacttcgctactgggattggctgatcgcttataatgtcttcgtgatcaccatgaagaacatcctgtctattggggcatgcggctatatcggcaccttagtccacaactcatgctggctgatacaggctttttccctagcatgtacggtgaaaggctaccagatgcccgctgcaaattcaccctgtacattaccatccggcgaagccggcatcatttgggacagtatctgctttgcctttctgctcctgcagagacgggtatttatgtcctactatttcttacacgtggtggcagacataaaagcctcccaaattctggcctcccggggggctgagctgttccaagccactattgttaaagcggtgaaggcacgaattgaggaggaaaagaagagcatggatcagctgaagcgccagatggacagaattaaggcacgccagcagaagtacaagaaagggaaggaacggatgctcagcctgactcaagagcccggggaggggcaagacatgcaaaagctatccgaagaggatgacgaacgggaagctgacaagcagaaagccaaagggaaaaagaagcagtggtggaggccttgggttgaccatgcctctatggtaaggtccggggactattacctcttcgaaactgattcagaggaagaggaggaagaggagctcaagaaggaagatgaagagccaccccgccggtcagcctttcagttcgtgtatcaagcttggataacggacccgaaaaccgccctgcggcagcggcacaaggagaaaaaaagaagcgcccgcgaagaacgaaagcggaggcgcaagggcagtaaagaaggccccgtggagtgggaggatcgggaagatgaaccgatcaagaaaaagtcggacgggccagataacattatcaaacgcatcttcaacatcctcaagtttacatgggtactgtttttagctacagtggattcttttacaacctggttgaatagcattagccgagaacacatagacattagcacagtgttgagaatagaacgctgtatgctaacacgagaaattaagaagggtaatgtgcctacccgggagtcaatccatatgtattatcagaatcatattatgaatctgtcaagggagagcgggttggacactatcgacgagcacccaggagcagctagcggagctcaaacagcgcaccgtatggacagtttagattctcatgattccatctccagcgagcctacacaatgtacaatgctatactccagacaggggaccactgagacaatcgaagaggtggaagctgagcaggaagaggaggccggaagtaccgctccagagcctcgagaagcaaaggaatacgaagccacgggctatgatgtcggcgcaatgggtgccgaggaggcatcattgacccctgaggaagagttaacacagtttagcaccctggacggggacgttgaggcacctccttcatacagtaaggctgtctcattcgagcatttgtcattcgggagccaagacgattccgccggaaagaaccgcatggccgtctccccagatgactcccggaccgacaagctggggtcctcaattctgccacccctgacacatgagttgaccgccagcgagctgctgttaaagaaaatgtttcacgacgatgagctggaggagtccgaaaagttctacgtggggcaaccccggttcctgcttttgttctacgccatgtacaatacgctcgtggctagaagtgagatggtgtgttactttgtgattattcttaatcatatggtgagtgcatccatgatcaccttgctgctccccatccttatctttctctgggctatgctaagtgtccctcggcccagtcgacggttctggatgatggcgatcgtgtacactgaggtagccatcgtggtgaagtacttctttcagtttggcttctttccatggaataagaatgtcgaggtgaataaggacaagccgtaccaccctccaaacatcatcggtgtggagaagaaagagggctatgtgctatatgacctaatccagcttctggcgctgttttttcaccgctcaatcctaaagtgccatggtctttgggatgaggacgacatgacagaaagcggaatggcacgtgaggaatcggacgacgagctgtctctgggccacgggagacgcgactcctccgattcactgaagtctataaatctcgcagcttctgtggagagcgttcacgtcacattcccagagcagcaaacggcggtgcgccggaagaggagcggttccagttcagaaccctcgcagcggagtagtttctctagtaacaggtcacagagagggagtacatccacacggaattctagtcagaaggggagttctgtcttaagcattaaacagaaagggaagcgagagctctacatggaaaagctgcaagaacatctaattaaggcaaaagcatttaccatcaagaagactttggaaatttatgtgccaattaaacagttcttctacaatctaatccaccccgagtattctgcagtgaccgacgtctacgtgctgatgtttcttgccgacactgtagactttataatcatagtgtttggcttctgggcgtttgggaagcactccgctgcagccgatatcactagctcactcagcgaggaccaggtgcccggcccattcctcgtgatggtgctcatccagtttggcaccatggtggtcgatagagccctgtatctccgtaagaccgtgctggggaaagtcatctttcaggttatccttgtatttgggattcatttctggatgttttttattctgccgggagtaactgagcgaaagttctcccagaacctcgtcgcacagttgtggtatttcgtgaagtgtgtctatttcggtctatctgcctaccagatccgctgtgggtatccaactcgcgtcctaggcaatttccttaccaagtcctacaactacgtgaacttgtttcttttccaggggttcaggctagtccctttcctaacggagctccgcgccgtgatggactgggtgtggaccgatacaactctatcactcagcagttggatctgtgtggaagacatctacgcacacattttcattcttaaatgttggagagagagcgagaaacgctaccctcaacctagagggcagaagaagaaaaaggtcgtgaagtatggaatgggcggtatgatcattgtcctcctcatttgcattgtctggtttcctctgctgttcatgagcttgattaaaagcgtggcaggcgtgataaatcagcccctggacgtttccgtgaccatcaccctcggagggtaccagcctatctttactatgagcgcacaacaatctcaattaaaagtgatggaccagcagtcttttaacaagtttatccaagccttcagcagagacaccggcgccatgcagttcttggaaaactacgaaaaggaagatattaccgttgccgagttagaaggcaatagcaatagtttgtggacaatctctcctccaagtaagcaaaagatgattcacgaactcttagacccaaattcatcatttagcgtcgtcttttcctggagtattcagcgaaatctgtctctcggcgctaaaagtgaaatcgccacagacaaattatcctttcccctgaaaaacataacgcgcaaaaatattgctaagatgatcgctggcaacagcaccgaaagctctaaaacgcctgtgacgattgaaaagatatatccatactatgttaaggctccctccgattccaattcgaaacctataaagcagctcctctcggagaataactttatggatatcactatcatcctctctagagataacaccactaagtacaactccgagtggtgggtcctgaacctgacgggcaaccggatttataaccctaattctcaagccttggaactggtggtgtttaatgataaggtctccccaccttcccttggttttctcgccgggtacggcatcatgggcctttacgcttccgtggtattagttatcggcaaattcgttcgtgagtttttttcaggcattagtcattctatcatgttcgaggagctgccaaacgtcgatcgtatcctgaagctctgcacagacatctttctcgttcgggaaacaggtgaactagaattagaagaggacctgtacgcgaaacttatatttttgtataggtcccctgaaacgatgatcaagtggactcgtgaaaagacaaactag

SEQ ID NO: 211144 - DNA, 1941 bp, Artificial Sequence
  derived and/or modified sequence
atgaccgaaagcggcatggcccgggaggaaagcgatgatgagttgtctctcggccatggtcgcagggattcttccgactcactcaagtcgattaacctggctgctagcgtagagtccgttcacgtgaccttccccgagcagcagacggcagtgcgacgcaaacggagtgggagctcaagtgagccatcacagcgaagctctttcagcagtaacaggagtcagcgaggtagcacatcgactcggaatagctcacaaaagggcagttcagtgttatccataaagcaaaaaggaaaaagagagctctatatggagaagctccaggaacatctgataaaagcgaaagcattcaccatcaaaaagacgctcgagatctatgtccccattaagcagttcttctataatctcatccaccccgaatacagcgccgtgactgacgtgtatgtccttatgttcctggcagacacggtggattttatcatcattgtcttcggattttgggcattcggcaagcactcggcggctgcggacataacaagcagtcttagtgaagaccaggtaccaggcccattcctcgtcatggtgcttatccagtttggcacaatggtggtggaccgggccctgtacctccgtaagaccgtgctgggcaaagtgatattccaagttatattggtattcggtatacacttctggatgtttttcatcctgccaggggtgactgaacggaagttctcacagaacttggtcgcccagctgtggtacttcgtcaaatgtgtctatttcggactgagcgcttatcaaattaggtgcggatatcccaccagagtcctcggaaacttcctgacaaagtcttataactacgtcaacttatttctcttccaagggtttaggttggtgcccttccttacagaactccgcgcagttatggactgggtgtggaccgataccactctctcgctgtcttcttggatctgcgtagaggatatctatgcccacatctttattctgaaatgttggcgggaatccgagaaacctatcttcaccatgtcagcccagcagagccaactgaaagtcatggatcagcagtcttttaataaattcatacaagccttctcacgagacacaggcgctatgcagtttctggaaaattacgagaaggaggatatcacggtagcagaacttgaagggaactctaactccctgtggactatttccccccctagcaagcagaagatgatccacgagttgctggatcctaactcctccttctctgttgtgttttcttggagtatccagcgaaatctgagcttgggtgcaaagagcgagatagccaccgataaactgtccttccctttgaagaacataaccaggaaaaatatcgctaagatgatcgccgggaatagtactgagtcctctaagacacccgtgactattgagaaaatttatccatattacgtgaaagctccatccgattcaaattcaaagccaattaaacaactactatctgagaacaactttatggatattaccatcatcctaagtcgggataatactaccaaatataatagcgagtggtgggtacttaacctaaccggcaataggatatacaatccaaacagccaggctttggaactcgttgtcttcaacgacaaagtatctccaccttcactagggttcctggccgggtacggcatcatgggcttatatgcctccgtggtgctggtcatcggtaagttcgttagggaattcttttccgggattagccacagtatcatgtttgaagaactgccaaacgtcgaccgcatcctgaagttatgcaccgatatctttctggttcgtgagactggcgagctcgagttggaagaagatctgtatgccaagctaattttcctgtatcgtagtcccgagaccatgattaaatggactagggagaagacaaactag

SEQ ID NO: 211145 - DNA, 2130 bp, Artificial Sequence
  derived and/or modified sequence
atgaccgagtctgggatggctagagaagagagtgacgacgaacttagcctcggccacggcaggagagatagttccgacagcctcaaatcaatcaacctggccgcctctgttgaatcagtccatgtgaccttccccgagcaacagacggccgtgcggcgcaagcgaagtgggagctcttctgagccaagccaacgaagcagctttagctctaaccgcagccaacggggcagtacctcaacacgtaatagctcacagaaagggagctccgtcttgagtataaagcaaaagggtaaacgggagctgtacatggaaaaactgcaggagcacttgatcaaagcaaaagccttcaccatcaagaaaaccttggagatctacgttcccattaaacagttcttttacaatctcatccatcctgagtatagcgccgtcactgacgtctacgtcctgatgtttcttgccgacaccgtggatttcataatcattgtgttcggcttttgggccttcggaaagcattcagccgccgctgatatcacatcatcactgtctgaagaccaagtgccgggacccttcttggtgatggtgttgatccaatttgggacaatggttgtggatagggccttatacttgcgaaagactgtgctgggcaaggtgattttccaggtgatcctcgtcttcggcattcacttctggatgttctttatcctgcccggcgtgaccgagagaaaattctctcagaacctcgtggctcagctttggtatttcgtcaagtgcgtctacttcggcctatcagcctaccagatcaggtgtgggtaccccaccagggtcctgggaaatttcctgactaagagttacaattatgtcaacttgttcctgttccagggcttcaggttagttccctttcttactgagcttcgagctgtgatggattgggtctggacagacacaacgctgtccctcagctcttggatctgtgttgaggacatttatgcccatatttttatcctcaaatgttggagagaatccgaaaagcggtacccacagcctaggggccaaaaaaagaagaaggtggtgaaatatgggatggggggcatgataatcgtgcttctgatttgcatcgtctggttcccgctgctttttatgtctctgattaaaagcgtggccggggtcatcaaccagcccttagacgtgagcgtcacaatcacgctcggcgggtatcagccaatattcaccatgagtgcccagcagagccagttaaaggtgatggaccaacaaagctttaacaagtttattcaggcattctctcgagacacgggagccatgcagttcctggaaaattatgagaaggaagacatcacagtcgctgagctcgaggggaactccaattcactgtggacaataagcccaccttccaagcaaaagatgatacacgagctcttagatcctaactccagtttctctgttgtgttctcctggtccattcagcgcaatctcagcctgggcgctaaaagcgaaatagctacagacaaactcagctttccccttaaaaatatcacacgtaagaacatcgcaaagatgattgccggaaattccactgagagttccaagacacctgtcactatcgagaagatctacccctattatgtgaaggcaccgtcagactccaattccaaaccaattaagcagttgctgtccgagaacaatttcatggacattactatcatcctgagtcgcgacaacaccactaagtacaattcagagtggtgggtccttaatctgacagggaaccggatctataatcccaacagccaggcacttgagttggtagtttttaatgataaggtaagcccaccttctctggggttccttgccggctatgggattatgggactttacgcatccgtggtccttgttattggcaagttcgttcgggaattcttttctggtattagccactctatcatgttcgaggaactgcccaatgtggaccggatccttaaactgtgtaccgacatcttcctggtgagagaaacgggcgagctcgagttagaggaggatctgtatgccaagttgatatttttatacaggtccccagaaacaatgattaaatggaccagggaaaagaccaattag

SEQ ID NO: 211146 - DNA, 1635 bp, Artificial Sequence
  derived and/or modified sequence
atggagaagctgcaggagcacctgatcaaggccaaggccttcaccatcaagaagaccctggagatctacgtgcccatcaagcagttcttctacaacctgatccaccctgagtacagcgctgtgacagatgtgtatgtgctgatgttcctggccgacacagtggacttcatcatcatcgtgtttggcttctgggccttcggcaagcacagcgctgctgctgacatcaccagcagcctgtctgaggaccaggtgcccggccccttcctggtgatggtgctgatccagtttggcaccatggtggtggaccgggccctgtacctgaggaagacagtgctgggcaaggtgatcttccaggtgatcctggtgtttggcatccacttctggatgttcttcatcctgcccggggtgacagagaggaagttcagccagaacctggtggcccagctgtggtactttgtgaagtgtgtgtacttcggcctgagcgcctaccagatccgctgtggctaccccaccagggtgctgggcaacttcctgaccaagagctacaactacgtgaacctcttcctgttccagggcttccggctggtgcccttcctgacagagctgcgggctgtgatggactgggtgtggacagacaccaccctgagcctgagctcctggatctgtgtggaggacatctatgcccacatcttcatcctgaagtgctggagggagagcgagaagcccatcttcaccatgtctgcccagcagagccagctgaaggtgatggaccagcagagcttcaacaagttcatccaggccttcagccgggacaccggggccatgcagttcctggagaactatgagaaggaggacatcaccgtggccgagctggagggcaacagcaacagcctgtggaccatcagcccccccagcaagcagaagatgattcatgagctgctggaccccaacagcagcttctctgtggtgttctcctggagcatccagaggaacctgagcctgggcgccaagtctgagatcgccacagacaagctgtccttccccctgaagaacatcaccaggaagaacatcgccaagatgattgctggcaacagcacagagagcagcaagacccctgtgaccatcgagaagatctacccctactacgtgaaggcccccagcgacagcaacagcaagcccatcaagcagctgctgtctgagaacaacttcatggacatcaccatcatcctgagccgggacaacaccaccaagtacaacagcgagtggtgggtgctgaacctgaccggcaaccgcatctacaaccccaacagccaggccctggagctggtggtgttcaatgacaaggtgtccccacccagcctgggcttcctggccggctacggcatcatgggcctgtatgcctctgtggtgctggtgattggcaagtttgtgcgggagttcttcagcggcatcagccacagcatcatgtttgaggagctgcccaacgtggaccgcatcctgaagctgtgcacagacatcttcctggtgcgggagaccggggagctggagctggaggaggacctgtatgccaagctgatcttcctgtaccgcagccctgagaccatgatcaagtggacccgggagaagaccaactag

SEQ ID NO: 211147 - DNA, 8259 bp, Artificial Sequence
  derived and/or modified sequence
atggccagcgaggtggtgtgtggcctcatcttccggctgctgctgcccatctgcctggccgtggcctgtgccttccgctacaacggcctgagctttgtgtacctgatctacctgctgctgatccccctcttcagcgagcccaccaagaccaccatgcagggccacacaggccgcctgctgaagagcctgtgcttcatcagcctgtccttcctgctgctgcacatcatcttccacatcaccctggtgtccctggaggcccagcaccgcatcgcccctggctacaactgcagcacctgggagaagaccttccggcagatcggctttgagagcctgaagggagcagatgctggaaatggcatccgggtgtttgtgcctgacatcggcatgtttattgccagcctgaccatctggctgctgtgcagaaatattgtgcagaagcctgtgacagatgaggccgcccagagcaaccctgagtttgaaaatgaggagctggccgagggggagaagattgacagcgaggaggccctgatctatgaggaggacttcaatggaggagatggagtggagggggagctggaggagagcaccaagctgaagatgttccggcggctggcctctgtggccagcaagctgaaggagttcatcggcaacatgatcaccacagctgggaaggtggtggtgaccatcctgctgggcagcagcggcatgatgctgcccagcctgaccagctctgtgtacttctttgtgttcctgggcctgtgcacctggtggagctggtgcaggacctttgaccccctgctcttcagctgcctgtgtgtgctgctggccatcttcaccgctggccacctgattggcctgtacctgtaccagttccagttcttccaggaggccgtgcccccaaatgactactatgcccggctgtttggcatcaagagcgtcatccagacagactgcagcagcacctggaagatcatcgtgaacccagacctgtcctggtaccaccacgccaaccccatcctgctgctggtgatgtactacaccctggccaccctcatccgcatctggctgcaggagcccctggtgcaggatgagggcaccaaggaggaggacaaggccctggcctgcagccccatccagatcacagctggaagaagaagaagcctgtggtacgccacccactaccccacagatgagaggaagctgctgtccatgacccaggatgactacaagcccagtgatggcctgctggtgacagtgaatggaaatcctgtggactaccacaccatccaccccagcctgcccatggagaatggacctgggaaggctgacctgtacagcaccccccagtaccgctgggagcccagtgatgagagcagcgagaagcgggaggaggaggaggaggagaaggaggagtttgaggaggagaggagccgggaggagaagaggagcatcaaggtgcacgccatggtgtctgtgttccagttcatcatgaagcagagctacatctgtgccctgattgccatgatggcctggagcatcacctaccacagctggctgacctttgtgctgctgatctggagctgcaccctgtggatgatccggaacagaagaaaatatgccatgatcagcagccccttcatggtggtgtatggcaacctgctgctgatcctgcagtacatctggagctttgagctgcctgagatcaagaaggtgcccggcttcctggagaagaaggagcccggggagctggccagcaagatcctcttcaccatcaccttctggctgctgctgcggcagcacctgacagagcagaaggccctgcaggagaaggaggccctgctgtctgaggtgaagattggcagccaggagaatgaggagaaggatgaggagctgcaggacatccaggtggagggggagcccaaggaggaggaggaggaggaggccaaggaggagaagcaggagaggaagaaggtggagcaggaggaggccgaggaggaggatgagcaggacatcatgaaggtgctgggcaacctggtggtggccatgttcatcaagtactggatctacgtgtgtggcggcatgttcttctttgtgtcctttgagggcaagatcgtgatgtacaagatcatctacatggtgctcttcctgttctgtgtggccctgtaccaggtgcactatgagtggtggaggaagatcctgaagtacttctggatgtctgtggtgatctacaccatgctggtgctgatcttcatctacacctaccagtttgagaacttccctggcctgtggcagaacatgacaggcctgaagaaggagaagctggaggacctgggcctgaagcagttcaccgtggccgagctgttcacccgcatcttcatccccaccagcttcctgctggtgtgcatcctgcacctgcactacttccatgaccgcttcctggagctgacagacctgaagagcatccccagcaaagaagacaacaccatctaccgcctggcccaccctgagggcagcctgcctgacctgaccatgatgcacctgacagccagcctggagaagccagaggtgaggaagctggccgagcccggggaggagaagctggagggctacagcgagaaggcccagaagggggacctgggcaaggacagcgaggagagcgaggaggatggagaggaggaggaggagagcgaggaggaggaggagaccagtgacctgaggaacaagtggcacctggtgattgaccggctgactgtgctcttcctgaagttcctggagtacttccacaagctgcaggtgttcatgtggtggatcctggagctgcacatcatcaagatcgtgagcagctacatcatctgggtgtctgtgaaggaggtgtccctcttcaactacgtgttcctgatctcctgggcctttgccctgccctatgccaagctgcggcggctggccagctctgtgtgcaccgtgtggacctgtgtgatcatcgtgtgcaagatgctgtaccagctgcagaccatcaagccagagaacttctctgtgaactgcagcctgcccaatgaaaaccagaccaacatccccttcaatgagctgaacaagagcctgctgtacagcgcccccatcgaccccacagagtgggtgggcctgaggaagagcagccccctgctggtgtacctgaggaacaacctgctgatgctggccatcctggcctttgaggtgaccatctaccgccaccaggagtactaccggggcaggaacaacctgacagcccctgtgtccaggaccatcttccatgacatcacccggctgcacctggatgatggcctcatcaactgtgccaagtacttcatcaactacttcttctacaagtttggcctggagacctgcttcctgatgtctgtgaatgtgattggccagaggatggacttctacgccatgatccacgcctgctggctgattgctgtgctgtacagaagaagaaggaaggccatcgccgagatctggcccaagtactgctgcttcctggcctgcatcatcaccttccagtacttcatctgcatcggcatccccccagccccctgccgggactacccctggaggttcaagggggccagcttcaatgacaacatcatcaagtggctgtacttcccagacttcatcgtgcggcccaaccctgtgttcctggtgtatgacttcatgctgctgctgtgtgccagcctgcagaggcagatctttgaagatgagaacaaggctgctgtgcgcatcatggccggggacaacgtggagatctgcatgaacctggatgctgccagcttcagccagcacaaccctgtgcctgacttcatccactgccgcagctacctggacatgagcaaggtgatcatcttctcctacctgttctggtttgtgctgaccatcatcttcatcaccggcaccacccgcatcagcatcttctgcatgggctacctggtggcctgcttctacttcctgctgtttggaggagacctgctgctgaagcccatcaagagcatcctgcgctactgggactggctgattgcctacaacgtgtttgtgatcaccatgaagaacatcctgagcattggagcctgtggctacatcggcaccctggtgcacaacagctgctggctgatccaggccttcagcctggcctgcaccgtgaagggctaccagatgcctgctgccaacagcccctgcaccctgcccagcggggaggccggcatcatctgggacagcatctgctttgccttcctgctgctgcagaggagggtcttcatgagctactacttcctgcacgtggtggccgacatcaaggccagccagatcctggccagcagaggagctgagctgttccaggccaccatcgtgaaggctgtgaaggccagaattgaggaggagaagaagtccatggaccagctgaagaggcagatggaccgcatcaaggcccggcagcagaagtacaagaagggcaaggagaggatgctgagcctgacccaggagcctggagagggccaggacatgcagaagctgtctgaagaagatgatgagcgggaggccgacaagcagaaggccaagggcaagaagaagcagtggtggaggccctgggtggaccacgcctccatggtgcgcagcggggactactacctgtttgaaacagacagcgaggaggaggaggaggaggagctgaagaaggaggatgaggagcccccaagaagaagtgccttccagtttgtgtaccaggcctggatcacagaccccaagacagccctgcggcagaggcacaaggagaagaagaggtctgcccgggaggagaggaagagaagaaggaagggcagcaaggagggccctgtggagtgggaggacagagaagatgagcccatcaagaagaagagtgatggccctgacaacatcatcaagaggatcttcaacatcctgaagttcacctgggtgctcttcctggccaccgtggacagcttcaccacctggctgaacagcatcagccgggagcacatcgacatcagcacagtgctgagaattgagcgctgcatgctgacccgggagatcaagaagggaaatgtgcccacccgggagagcatccacatgtactaccagaaccacatcatgaacctgagccgggagagcggcctggacaccattgatgagcaccctggagctgccagcggggcccagacagcccacaggatggacagcctggacagccatgacagcatcagcagcgagcccacccagtgcaccatgctgtacagccggcagggcaccacagagaccatcgaggaggtggaggccgagcaggaggaggaggccggcagcacagcccctgagccccgggaggccaaggagtatgaggccaccggctatgatgtgggcgccatgggcgctgaggaggccagcctgaccccagaggaggagctgacccagttcagcaccctggatggagatgtggaggccccacccagctacagcaaggctgtgtcctttgagcacctgagctttggcagccaggatgacagcgctgggaagaacaggatggctgtgtccccagatgacagcaggacagacaagctgggcagcagcatcctgccccccctgacccatgagctgacagccagcgagctgctgctgaagaagatgtttcatgatgatgagctggaggagagcgagaagttctacgtgggccagccccgcttcctgctgctcttctacgccatgtacaacaccctggtggcccggtctgagatggtgtgctacttcgtcatcatcctgaaccacatggtgtctgcctccatgatcaccctgctgctgcccatcctgatcttcctgtgggccatgctgtctgtgccccggcccagccgccgcttctggatgatggccatcgtgtacacagaggtggccatcgtggtgaagtacttcttccagtttggcttcttcccctggaacaagaatgtggaggtgaacaaggacaagccctaccacccccccaacatcattggagtggagaagaaggagggctacgtgctgtatgacctgatccagctgctggccctcttcttccacaggagcatcctgaagtgccacggcctgtgggatgaagatgacatgacagaaagtggcatggcccgggaggagagtgatgatgagctgagcctgggccacggccggcgggacagcagtgacagcctgaagagcatcaacctggccgcctctgtggagagcgtgcacgtgaccttccctgagcagcagacagctgtgcggaggaagaggagcggcagcagcagcgagcccagccagaggagcagcttcagcagcaacagaagccagaggggcagcaccagcaccaggaacagcagccagaagggcagctctgtgctgagcatcaagcagaagggcaagcgggagctgtacatggagaagctgcaggagcacctgatcaaggccaaggccttcaccatcaagaagaccctggagatctacgtgcccatcaagcagttcttctacaacctgatccaccctgagtacagcgctgtgacagatgtgtatgtgctgatgttcctggccgacacagtggacttcatcatcatcgtgtttggcttctgggccttcggcaagcacagcgctgctgctgacatcaccagcagcctgtctgaggaccaggtgcccggccccttcctggtgatggtgctgatccagtttggcaccatggtggtggaccgggccctgtacctgaggaagacagtgctgggcaaggtgatcttccaggtgatcctggtgtttggcatccacttctggatgttcttcatcctgcccggggtgacagagaggaagttcagccagaacctggtggcccagctgtggtactttgtgaagtgtgtgtacttcggcctgagcgcctaccagatccgctgtggctaccccaccagggtgctgggcaacttcctgaccaagagctacaactacgtgaacctcttcctgttccagggcttccggctggtgcccttcctgacagagctgcgggctgtgatggactgggtgtggacagacaccaccctgagcctgagctcctggatctgtgtggaggacatctatgcccacatcttcatcctgaagtgctggagggagagcgagaagcgctacccccagccccggggccagaagaagaagaaggtggtgaagtatggcatgggcggcatgatcatcgtgctgctgatctgcatcgtgtggttccccctgctcttcatgagcctcatcaagtctgtggccggggtcatcaaccagcccctggatgtgtctgtgaccatcaccctgggcggctaccagcccatcttcaccatgtctgcccagcagagccagctgaaggtgatggaccagcagagcttcaacaagttcatccaggccttcagccgggacaccggggccatgcagttcctggagaactatgagaaggaggacatcaccgtggccgagctggagggcaacagcaacagcctgtggaccatcagcccccccagcaagcagaagatgattcatgagctgctggaccccaacagcagcttctctgtggtgttctcctggagcatccagaggaacctgagcctgggcgccaagtctgagatcgccacagacaagctgtccttccccctgaagaacatcaccaggaagaacatcgccaagatgattgctggcaacagcacagagagcagcaagacccctgtgaccatcgagaagatctacccctactacgtgaaggcccccagcgacagcaacagcaagcccatcaagcagctgctgtctgagaacaacttcatggacatcaccatcatcctgagccgggacaacaccaccaagtacaacagcgagtggtgggtgctgaacctgaccggcaaccgcatctacaaccccaacagccaggccctggagctggtggtgttcaatgacaaggtgtccccacccagcctgggcttcctggccggctacggcatcatgggcctgtatgcctctgtggtgctggtgattggcaagtttgtgcgggagttcttcagcggcatcagccacagcatcatgtttgaggagctgcccaacgtggaccgcatcctgaagctgtgcacagacatcttcctggtgcgggagaccggggagctggagctggaggaggacctgtatgccaagctgatcttcctgtaccgcagccctgagaccatgatcaagtggacccgggagaagaccaactag

SEQ ID NO: 211148 - DNA, 1941 bp, Artificial Sequence
  derived and/or modified sequence
atgacagagagcggcatggcccgggaggagagtgatgatgagctgagcctgggccatggaagaagagacagcagtgacagcctgaagagcatcaacctggccgcctctgtggagagcgtgcacgtgaccttccctgagcagcagacagctgtgcggaggaagaggagcggcagcagcagcgagcccagccagaggagcagcttcagcagcaacagaagccagaggggcagcaccagcaccaggaacagcagccagaagggcagctctgtgctgagcatcaagcagaagggcaagcgggagctgtacatggagaagctgcaggagcacctgatcaaggccaaggccttcaccatcaagaagaccctggagatctacgtgcccatcaagcagttcttctacaacctgatccaccctgagtacagcgctgtgacagatgtgtatgtgctgatgttcctggccgacacagtggacttcatcatcatcgtgtttggcttctgggccttcggcaagcacagcgctgctgctgacatcaccagcagcctgtctgaggaccaggtgcccggccccttcctggtgatggtgctgatccagtttggcaccatggtggtggaccgggccctgtacctgaggaagacagtgctgggcaaggtgatcttccaggtgatcctggtgtttggcatccacttctggatgttcttcatcctgcccggggtgacagagaggaagttcagccagaacctggtggcccagctgtggtactttgtgaagtgtgtgtacttcggcctgagcgcctaccagatccgctgtggctaccccaccagggtgctgggcaacttcctgaccaagagctacaactacgtgaacctcttcctgttccagggcttccggctggtgcccttcctgacagagctgcgggctgtgatggactgggtgtggacagacaccaccctgagcctgagctcctggatctgtgtggaggacatctatgcccacatcttcatcctgaagtgctggagggagagcgagaagcccatcttcaccatgtctgcccagcagagccagctgaaggtgatggaccagcagagcttcaacaagttcatccaggccttcagccgggacaccggggccatgcagttcctggagaactatgagaaggaggacatcaccgtggccgagctggagggcaacagcaacagcctgtggaccatcagcccccccagcaagcagaagatgattcatgagctgctggaccccaacagcagcttctctgtggtgttctcctggagcatccagaggaacctgagcctgggcgccaagtctgagatcgccacagacaagctgtccttccccctgaagaacatcaccaggaagaacatcgccaagatgattgctggcaacagcacagagagcagcaagacccctgtgaccatcgagaagatctacccctactacgtgaaggcccccagcgacagcaacagcaagcccatcaagcagctgctgtctgagaacaacttcatggacatcaccatcatcctgagccgggacaacaccaccaagtacaacagcgagtggtgggtgctgaacctgaccggcaaccgcatctacaaccccaacagccaggccctggagctggtggtgttcaatgacaaggtgtccccacccagcctgggcttcctggccggctacggcatcatgggcctgtatgcctctgtggtgctggtgattggcaagtttgtgcgggagttcttcagcggcatcagccacagcatcatgtttgaggagctgcccaacgtggaccgcatcctgaagctgtgcacagacatcttcctggtgcgggagaccggggagctggagctggaggaggacctgtatgccaagctgatcttcctgtaccgcagccctgagaccatgatcaagtggacccgggagaagaccaactag

SEQ ID NO: 211149 - DNA, 2130 bp, Artificial Sequence
  derived and/or modified sequence
atgacagagagcggcatggcccgggaggagagtgatgatgagctgagcctgggccatggaagaagagacagcagtgacagcctgaagagcatcaacctggccgcctctgtggagagcgtgcacgtgaccttccctgagcagcagacagctgtgcggaggaagaggagcggcagcagcagcgagcccagccagaggagcagcttcagcagcaacagaagccagaggggcagcaccagcaccaggaacagcagccagaagggcagctctgtgctgagcatcaagcagaagggcaagcgggagctgtacatggagaagctgcaggagcacctgatcaaggccaaggccttcaccatcaagaagaccctggagatctacgtgcccatcaagcagttcttctacaacctgatccaccctgagtacagcgctgtgacagatgtgtatgtgctgatgttcctggccgacacagtggacttcatcatcatcgtgtttggcttctgggccttcggcaagcacagcgctgctgctgacatcaccagcagcctgtctgaggaccaggtgcccggccccttcctggtgatggtgctgatccagtttggcaccatggtggtggaccgggccctgtacctgaggaagacagtgctgggcaaggtgatcttccaggtgatcctggtgtttggcatccacttctggatgttcttcatcctgcccggggtgacagagaggaagttcagccagaacctggtggcccagctgtggtactttgtgaagtgtgtgtacttcggcctgagcgcctaccagatccgctgtggctaccccaccagggtgctgggcaacttcctgaccaagagctacaactacgtgaacctcttcctgttccagggcttccggctggtgcccttcctgacagagctgcgggctgtgatggactgggtgtggacagacaccaccctgagcctgagctcctggatctgtgtggaggacatctatgcccacatcttcatcctgaagtgctggagggagagcgagaagcgctacccccagccccggggccagaagaagaagaaggtggtgaagtatggcatgggcggcatgatcatcgtgctgctgatctgcatcgtgtggttccccctgctcttcatgagcctcatcaagtctgtggccggggtcatcaaccagcccctggatgtgtctgtgaccatcaccctgggcggctaccagcccatcttcaccatgtctgcccagcagagccagctgaaggtgatggaccagcagagcttcaacaagttcatccaggccttcagccgggacacaggagccatgcagttcctggagaactatgagaaggaggacatcaccgtggccgagctggagggcaacagcaacagcctgtggaccatcagcccccccagcaagcagaagatgatccacgagctgctggaccccaacagcagcttctctgtggtgttctcctggagcatccagaggaacctgagcctgggcgccaagtcagaaattgccacagacaagctgtccttccccctgaagaacatcaccaggaagaacatcgccaagatgattgctggcaacagcacagagagcagcaagacccctgtgaccatcgagaagatctacccctactacgtgaaggcccccagcgacagcaacagcaagcccatcaagcagctgctgtctgagaacaacttcatggacatcaccatcatcctgagccgggacaacaccaccaagtacaacagcgagtggtgggtgctgaacctgactggaaaccgcatctacaaccccaacagccaggccctggagctggtggtgttcaatgacaaggtgagcccccccagcctgggcttcctggccggctacggcatcatgggcctgtatgcctctgtggtgctggtgattggcaagtttgtgcgggagttcttcagcggcatcagccacagcatcatgtttgaggagctgcccaacgtggaccgcatcctgaagctgtgcacagacatcttcctggtgcgggagactggagagctggagctggaggaggacctgtatgccaagctgatcttcctgtaccgcagccctgagaccatgatcaagtggacccgggagaagaccaactag

SEQ ID NO: 211150 - DNA, 1635 bp, Artificial Sequence
  derived and/or modified sequence
atggagaagctgcaggagcacctgatcaaggccaaggccttcaccatcaagaagaccttagagatatacgtcccaatcaagcagttcttctacaacctcatccacccagaatactccgccgttaccgatgtatacgttctgatgttccttgcagataccgtagactttattataattgttttcggcttttgggcctttggaaagcactctgcggccgccgacatcacatcatcactgagtgaggatcaggtacctggtcctttccttgttatggttttgatccaatttggcactatggttgtggatagggccctgtatctacggaaaaccgttctcggtaaagtaatctttcaggtgattctggtgttcggtattcacttttggatgttcttcatactcccaggtgtaactgagcgcaagttcagccaaaacctcgtggcacaactctggtattttgttaaatgtgtctactttggtttatccgcataccagattagatgtggatacccaacgcgcgtcttaggaaacttcctcaccaaatcatacaattacgtgaatcttttcctgttccaaggcttccgactggtgcctttcctgactgagcttcgggccgtcatggattgggtgtggaccgacactacactttccctatccagttggatctgcgttgaagacatttacgcccacatttttatactcaagtgctggagagagtccgagaagcccatctttacaatgagtgctcagcagtcgcagctgaaagtgatggatcaacagtctttcaacaaattcattcaggcttttagccgcgacactggggctatgcagtttctggaaaattacgaaaaggaggacatcaccgtggctgagctcgaaggaaacagcaactccctgtggacaatcagtcccccctctaaacagaagatgatccacgagttgctcgatcccaatagtagtttttcggtagttttctcatggagcatccagcggaatctctcactgggcgcaaagtcagaaatcgccactgataagctgagttttcctctcaagaacattactcgaaagaatatcgcaaagatgatcgcaggaaacagcacggagtcaagtaagactcccgtcaccatcgaaaaaatctacccatactatgtgaaagcgccctctgacagtaattcaaaacctatcaaacagttgctgtccgaaaataattttatggatatcacaatcatcctgtctagagataataccaccaaatacaactcggaatggtgggtgctgaatcttacaggcaatagaatctacaacccaaactcccaggctctggagctggtcgtctttaatgataaggtaagcccgcctagtctgggctttttggcagggtatggcattatgggcctgtacgcaagcgtggtgctcgtaattggaaaattcgtgcgtgagttttttagcggcattagtcactctattatgtttgaagaactgcctaacgtagaccgcatactgaaactgtgcaccgacatcttcttagtacgggagacaggagagttggagttggaagaagacctatatgcaaagcttattttcttatacagaagtcccgagaccatgatcaaatggacaagggagaagacaaactag

SEQ ID NO: 211151 - DNA, 8259 bp, Artificial Sequence
  derived and/or modified sequence
atggccagcgaggtggtgtgcggcctgatcttccggctgctgctgcccatctgcctcgccgtggcatgtgcattccggtataacgggctttcgttcgtgtacctgatctatctgttgttgatacctttgttcagtgaacccacaaaaacaactatgcaaggacacacaggccgccttctgaagagcctttgcttcattagcctatcttttctcctcctgcatattatctttcacatcacactcgtaagcctggaagcccagcacagaatcgctccaggttataactgttctacctgggagaagacgtttaggcaaattggattcgagtccttgaagggtgcagatgccgggaacggtattagggtatttgttccagatattgggatgtttattgctagcctgactatatggctgctgtgtcgcaatattgtgcagaagcctgttacagacgaagccgcccagagcaatccggagtttgaaaacgaggaactggccgaaggtgagaaaatcgactccgaggaggctcttatttacgaagaagacttcaatggcggtgacggagtggagggcgaactggaagagtccaccaagctcaagatgttccgcaggctcgcctccgtggccagcaagttaaaggagtttatcggaaatatgattacaactgcggggaaggtggtcgttacaatccttctgggcagctcggggatgatgctgccttctctcacctcttcagtgtacttctttgtgttcctgggcctatgtacctggtggtcctggtgtagaacatttgatccactcctgttctcctgcctctgcgtgttgctggcaatctttaccgccggtcatctcatcggtctctacctgtaccagttccagtttttccaagaggcagtacctccaaatgactattatgcacgcctgttcggcataaagtccgtgattcaaacagattgtagttctacgtggaagataattgtcaaccccgacttgagctggtaccaccacgccaatccaatactgttattggtgatgtactacaccctggccaccctcattcgtatctggctgcaggagccactcgtgcaggacgaaggcaccaaagaagaagacaaagctctcgcgtgctcacctatccaaattactgcagggcggcgccgctctctgtggtacgccacacattatccaaccgatgaacgaaagctactctcaatgactcaagacgattacaaacctagtgatggactcttggtcaccgtgaatggtaatcccgtggattatcacacgatccacccttcccttccgatggagaacgggccaggcaaggcagacctttatagcacacctcagtatcgatgggagccctcagatgagtcttcggaaaaaagggaggaggaggaggaggagaaggaggagtttgaagaggaaagatctagagaggaaaagagatccatcaaggtccacgccatggtctcagtcttccaatttattatgaagcagagttacatctgtgcgcttattgctatgatggcctggtctattacctaccactcttggttgacatttgttctgttgatttggagctgcactctgtggatgatcaggaatcgcaggaaatatgccatgattagttcacccttcatggtcgtgtatggaaatctgctcctgattctgcaatatatatggagttttgaactgcccgagattaagaaagtgcccggattccttgagaagaaagagcctggagagctcgccagcaaaatacttttcaccattactttttggttactcctaaggcagcatctgactgaacaaaaggctctgcaggagaaagaagcactgttgtccgaggtcaagatcgggtcccaggagaacgaggagaaggatgaagagctgcaagatatccaggtcgaaggagagcccaaggaggaggaagaagaggaagctaaggaagagaagcaggagcgtaagaaagttgaacaggaggaagcagaggaagaagacgagcaggatattatgaaagtcctggggaacctggtcgtcgctatgttcatcaagtactggatatacgtatgtggcgggatgtttttctttgtctctttcgaggggaagatagtcatgtacaagattatctacatggtgttattcctcttctgcgtagccctctaccaagtgcactatgagtggtggcgcaaaatcctaaagtatttttggatgagcgtagtaatctacaccatgctcgtgctcatctttatatacacctatcagttcgagaatttccctggactctggcagaatatgacaggactgaaaaaagaaaaactagaggatttggggttgaaacagtttactgtggcagagctgttcactcggatctttatccctacctcctttttgttagtgtgtattctacatttgcactactttcacgacaggtttctcgaactaaccgacttgaagtcaattcccagcaaagaggacaataccatttataggctggcgcatcccgaaggctccctgccggacctaaccatgatgcaccttactgcttcgctagaaaaacccgaggttaggaagcttgcagaacccggcgaagagaagctggaaggttattctgagaaggcccagaagggcgatctgggcaaggacagcgaagagtccgaagaggacggcgaagaagaggaagaatcggaggaggaggaggaaacatctgacttgcggaacaaatggcatctggtcattgaccggctgaccgtcttatttctgaagtttctcgagtactttcacaaactccaagtcttcatgtggtggatactagagctccatattatcaagattgttagctcctatataatttgggtgtccgtaaaagaagtaagcctgttcaattacgtcttcctgatcagctgggcctttgcactgccgtatgctaagctgcgtcggctggcctcctctgtctgcaccgtttggacatgcgtcattattgtgtgcaagatgctgtatcaattgcagactataaaacctgagaatttttccgtgaactgctccttaccaaatgaaaaccagaccaacattccgtttaatgagcttaataaaagcttactgtattcagcccccattgaccctaccgagtgggttgggctgcgcaaatcaagtccgttgctggtttacctgaggaataacctactgatgctggctatacttgcttttgaggtgactatctacaggcaccaggagtattacaggggtcgtaataacttgaccgcccctgtgtcaagaaccatattccacgacatcactcgcctgcacctggacgatggattgattaactgtgcaaaatactttatcaattactttttttacaagttcggcctggagacttgctttcttatgagtgttaacgtgataggtcagcggatggatttttacgctatgatacacgcctgctggctgatcgccgtcctctataggcgcaggcgcaaggcgattgctgagatatggcccaagtactgctgctttttagcatgcattatcacctttcagtacttcatctgcatcggcatcccacccgctccctgccgcgactacccgtggcgctttaagggagcctcctttaacgataatataattaagtggctctactttccagattttattgttaggcctaatcccgtctttctggtgtatgatttcatgctcctgctctgtgccagcctgcagagacaaattttcgaggacgagaataaagccgcggtgaggataatggcgggcgacaatgttgagatttgtatgaatctcgacgccgctagcttttcccaacataacccagtccccgacttcatccattgtcgctcttacctagatatgagcaaggtcatcatcttctcctatctgttctggttcgtgctcactattattttcatcacgggcacaactagaatcagtattttctgcatgggttatctagtggcttgtttctattttttacttttcggtggtgatctgctcctcaaacccattaagagcattctgcggtattgggactggctgatcgcctacaatgtgttcgtgatcaccatgaagaacattctgagcattggagcctgtggctatattggcaccctagtgcacaacagttgttggttgatccaggcctttagcctggcctgcacagtgaagggctaccagatgcctgccgcaaactccccatgtacactgcctagtggagaggccggaataatctgggactctatctgctttgcctttctactactccagagaagagtattcatgagttactatttcttgcatgtagtggctgatataaaggcaagccagatcctggcttcaaggggggctgagctgttccaggccactattgtgaaagccgtgaaagcaagaatcgaggaggagaaaaaatcaatggaccagctgaaacggcaaatggatagaataaaagcaaggcagcagaagtacaagaaaggaaaggaacgaatgttaagtttgacccaggagcccggcgaaggccaggacatgcagaaactctctgaggaagatgacgagcgcgaggcagacaagcagaaggcgaagggcaagaagaagcagtggtggcgcccctgggtcgatcacgcttccatggtacggagtggagattattatctgtttgagacggactctgaggaggaggaagaagaggagctgaagaaggaagatgaggagcctcctcgccgcagcgcttttcagttcgtttatcaggcctggataactgaccctaaaacagctcttcggcagcgccacaaggaaaaaaaacggagtgcccgagaggagcgcaaaagacggagaaagggtagcaaagagggtcctgtggagtgggaagatagggaggacgagcctattaagaaaaaaagtgatggccctgataacattattaagagaatcttcaatatcctcaaattcacctgggtgctgttcctggctacagttgactcgttcaccacttggctgaacagcatctcccgcgagcatatcgacatctctaccgtgttaaggatcgagaggtgtatgctcacaagagagatcaagaagggaaacgtccccactagagagtcaattcacatgtattaccagaatcacattatgaacttaagccgcgagtccgggttggatactatagatgagcaccccggggcggcatctggcgcgcagaccgctcaccgcatggattccctggattcacatgactccatcagctcagaacccacgcagtgtaccatgctatattcgcgtcaggggacaaccgagaccatcgaggaagtggaagccgaacaggaagaggaagctgggtctacagccccagaaccacgggaggcaaaagaatatgaagccacaggatacgacgtgggagcaatgggggccgaggaggcttccctcacccccgaggaggagctgacccagttcagcaccctcgacggcgacgtggaggcccctcccagttacagcaaggccgtgtctttcgaacacctcagtttcgggagccaggatgactctgccggcaaaaatcggatggccgttagccccgacgattcacggacagacaagttgggtagcagcatcctgccccccctcacccacgaactgactgcctctgaactgctgctaaagaagatgttccatgatgatgaactggaggaaagcgaaaagttttacgtgggacaaccgcgcttcctactgctcttctacgcaatgtataacactctggtggccaggtcagaaatggtgtgctacttcgtgattatcctaaaccacatggtgtccgcctccatgatcacactgctgctcccgatcctcatttttctctgggctatgctcagcgtgccccggccaagcagacggttttggatgatggccatcgtgtatacggaggtcgccattgtagttaagtacttcttccaatttggttttttcccttggaataagaatgtcgaggtgaacaaggataagccatatcaccccccaaatatcattggggtggaaaagaaagagggatatgtcctctatgacctgatacagctcctcgcactttttttccaccgatcaatcttgaagtgccatggactctgggatgaggatgatatgaccgagtccggtatggcaagagaggaaagcgacgacgagctcagcctaggtcacggccgcagggattcctcggactctctgaagagtatcaatctcgccgcctctgtggaaagcgtgcacgtgacatttccagaacagcagactgcagtcagacgcaagcgatctggatcgagcagcgagccatcgcagagaagctccttcagcagtaatcgcagccaaagagggtcaacatcaactcgcaacagctctcagaagggttcttccgtgttgagcattaaacagaaaggaaagagagagttatatatggagaagctgcaggaacatctgatcaaagccaaggccttcacaatcaaaaaaactttagagatctacgttccaattaagcagtttttctataatctaatacaccctgaatattccgcggtcacagacgtgtacgtcctgatgtttcttgcggacacggttgacttcatcatcattgtgtttgggttttgggcttttggaaagcactccgcagcagcagacataacatcttccctctccgaagatcaggtgccaggtccatttctcgtgatggttttgatacagttcggaacaatggtcgtcgaccgcgccctgtatctgcgaaagacagttctcggaaaggttattttccaggtgatcctcgtgtttggcatccatttctggatgttcttcatcctgccaggcgttaccgaacgaaagttcagccaaaatttagtggcacaactgtggtacttcgtcaagtgtgtttatttcggccttagcgcctaccagatccggtgtggctacccgacccgggtcttgggaaatttcctcaccaaaagctacaactacgtgaacctctttctatttcaaggattcaggttagttcccttcctgaccgagctgcgagcagttatggactgggtttggacagacaccacactgtcgctctcctcctggatctgcgtcgaggatatttacgcccatattttcattctgaagtgctggagagaatcggaaaagagatatccacagccacgcggccagaaaaaaaaaaaggtggtgaagtatggcatggggggtatgatcatcgtcctcctcatttgcattgtgtggtttccactgctattcatgagtttaatcaaaagcgtcgccggcgtgatcaaccagcccctggacgtatcggtgactattacgctcggtggataccagccgattttcacaatgtcagcccagcaaagccagctgaaagttatggaccagcagtcatttaataaatttatccaggcttttagtcgagacactggggccatgcagttcttagaaaattatgaaaaggaggacatcactgtggcagagttggaggggaactcaaatagtttgtggacgatttcccctccgtcaaaacagaaaatgatccatgaattgctggatccaaacagctccttttctgtggtttttagttggagtatccaacgcaatctcagcctgggtgctaagagtgagatagctacagacaaacttagcttcccactaaagaacattacccggaaaaacatcgcaaaaatgattgccggaaactccacagaaagctctaagacccctgtcaccatcgaaaagatctacccttattatgtgaaagccccttccgacagtaactcaaagcctataaagcagttgctttctgaaaataactttatggatattacgatcattctgtccagggataatactaccaagtataattcagaatggtgggtactgaatctgaccggaaatcgtatctataacccgaatagtcaggcccttgaactagtcgtctttaatgataaagtgtctcctccctctctgggattcctggctggctacggcattatggggctctatgcatcggtggtcctcgttatcggtaagttcgttcgcgagttcttttctggaattagccactccattatgtttgaagagctgcccaatgtggaccgaatcttgaaactgtgcaccgacatttttcttgtgcgggagacaggggagctcgaactggaagaagatctgtacgccaaattgattttcctgtaccgctcccccgagaccatgatcaagtggacaagagagaaaaccaattag

SEQ ID NO: 211152 - DNA, 1941 bp, Artificial Sequence
  derived and/or modified sequence
atgaccgagagcggcatggcccgggaggagagcgacgacgagctgtctttaggacacgggaggagggattcctcggactctttaaaaagcatcaacctggccgcctccgtggagagtgtgcacgtgacattccctgaacagcaaactgctgtacggagaaaaagatcaggctcttcatctgagccttctcagcgttcatcattttcaagcaacagatctcagagaggcagcacaagcacaagaaacagctcccagaagggcagcagtgtactttccatcaagcagaagggaaaaagagaactgtacatggagaagctgcaggagcatcttattaaggctaaggctttcactattaaaaaaacgctggaaatatacgttccgatcaaacagttcttctataacctaatccatccggagtactccgctgtgacagatgtatacgtccttatgttccttgcggacacagtcgatttcataatcatcgttttcggcttctgggccttcggcaagcactcagctgcagcagatatcacctccagcctctcggaggaccaggtgcctgggccttttctagtgatggtcctgatccagttcggaacaatggtcgtggatcgcgccctgtatttgcgcaaaacagttctcgggaaagttattttccaggtgatattggtcttcggcatccatttctggatgttctttattctgccgggagtcacagaacggaagtttagtcagaacttggttgcacagctgtggtattttgtcaagtgcgtgtactttggcttgagtgcctatcagattaggtgcggctatcccactcgcgttttgggtaacttccttactaaatcctacaactacgtgaacctttttcttttccaggggttcagactggtcccatttctgacggaacttagggctgtaatggactgggtgtggactgacacgaccctaagtctcagctcatggatctgcgtggaggacatttatgcccatatttttattctgaaatgctggagagagtccgagaaacctatttttacaatgtccgctcagcaatctcagttgaaggtgatggatcagcaatcatttaacaaatttattcaggccttctcccgcgacactggcgccatgcagtttctggagaactatgagaaggaagatattacagtcgccgagttagagggcaattccaactccctgtggaccattagccccccatctaagcagaagatgatccacgagttattagatccaaactcttcatttagcgtggtttttagctggagcattcaacgcaatctctccttgggcgctaagtctgaaatcgccacagataaattatcttttccactgaagaacatcacaagaaaaaacatcgccaagatgatcgcgggtaattcaaccgagagcagcaagaccccggtgacaatcgagaagatatacccttattatgtcaaggctccaagtgactcgaactcaaagcctattaagcagttgctttcagaaaataactttatggatattactatcatactcagccgagacaacaccactaaatacaacagcgaatggtgggtattgaacttaaccgggaacaggatctacaacccgaacagccaagctctggaactggtggtgttcaatgataaggtgtcaccaccgtctcttggctttttggctggctatggcattatgggcttgtatgcatcagtggtgctggtaatcggcaagttcgtccgagagttcttttcaggcatcagccacagcatcatgttcgaagagctgccaaacgtcgaccgcatcctcaaactatgcacggatattttcttggtgagagaaacgggggagctggagttagaggaggacttatatgccaagctgattttcctttacagatcccctgaaacaatgatcaaatggactcgcgaaaagacaaactag

SEQ ID NO: 211153 - DNA, 2130 bp, Artificial Sequence
  derived and/or modified sequence
atgaccgagagcggcatggcccgggaggagagcgacgacgagctgagcctgggccatggcaggagagattcctctgattctttgaagagtattaatcttgccgcatccgtggagagcgtgcacgtgacctttcctgaacaacagactgccgtgaggaggaagcggagcggatctagctctgagcctagccaacgtagttcatttagctcaaatagaagtcagagggggagcacctcaactaggaattcttcccagaaagggtccagtgttctgtccatcaaacagaaaggcaagcgtgagctctacatggagaagctccaggagcatttgattaaagccaaggctttcactattaagaaaaccctggagatctacgtgcctatcaaacagttcttctacaatttgattcatcccgagtattcagccgttaccgacgtctatgtgcttatgtttcttgcggacactgtggatttcataattatcgtattcggcttctgggcttttggaaaacacagtgctgccgcggatatcacatccagcctcagcgaggatcaggtgccaggccctttcctggtgatggtgctgatccaatttggcactatggtggttgaccgcgccctgtacctccgtaaaactgtgctgggaaaggtcatctttcaagtcatcctggtctttggcatacacttctggatgtttttcatcctccccggcgtgacggagcgcaagtttagtcagaacttggttgcgcagttgtggtactttgtaaagtgcgtctatttcggcctgtcggcctatcagatccgctgcgggtaccccactcgcgtgctcggtaatttcctgactaagtcgtacaattatgttaatcttttcctgttccaaggtttcaggctcgtgcccttcctaacagaacttcgcgcagttatggattgggtttggacggatactacactttcactgtcaagttggatctgcgttgaagacatatatgcccatatttttattctaaagtgttggagagaatctgagaaacgatatccccagccacgcggccagaaaaagaagaaggtggtgaaatacggaatgggggggatgataattgtgctacttatctgcatagtctggtttccactcctgttcatgtctttaatcaaatctgtggctggcgtcatcaaccagccactggacgtgagtgtgacaatcactctggggggctatcaacctatcttcaccatgtccgcccagcagtcccagctgaaggtcatggaccagcaaagcttcaataaatttatccaggctttcagtagggatacgggggctatgcagtttcttgaaaactacgaaaaggaggatattaccgtggccgaactagaaggcaactctaacagtctctggacaatctctccacctagtaagcagaagatgattcacgagctcctggatccaaatagcagtttttccgtagttttcagttggtccatccagagaaacctctccctgggcgcgaaatccgagattgctaccgacaaactctccttccccctaaagaatataacccgcaagaacatcgccaaaatgattgccggcaattctaccgagagctcaaaaactccagtcactattgaaaagatctatccttattatgtaaaggccccctctgattctaactccaagcctatcaagcagctgctgagcgagaataacttcatggacatcaccattattttgagccgggataacaccacaaagtacaattctgagtggtgggtcctgaacctcactggaaaccgcatttataaccccaattctcaggcccttgagcttgtggtgttcaatgataaggtgtccccaccttcgctaggatttctggccggctacggaattatgggcctatacgccagtgtcgtcctcgtaataggcaagtttgtgagagaattcttttctggaatcagccattcaattatgtttgaagagctgccgaatgtcgacagaattcttaaactgtgcactgacatattcctggtgcgcgagactggggagttagagttagaagaggatctgtatgccaaattaattttcctgtatcgttcccccgagacgatgatcaagtggacccgcgagaagactaattag

SEQ ID NO: 211154 - DNA, 2482 bp, Artificial Sequence
  derived and/or modified sequence
atgttaacaattaatcagttcaagttggtcatcttcctagataacctggaccgtaatcttcctagataacctggacatcaggattggtgatggggctgaggggccagtgagtgtgccatggcttatgggatgaagatgacatgactgaaagtggcatggccagggaggaatcagatgatgagctctccctcggtcatggcaggagggactcctccgattctctcaagtccatcaacctggccgcgtctgtggagtcagtgcatgtgaccttcccggagcagcagacagctgtccggaggaagcgctccggcagcagctccgagccatcccagagatccagcttttcttcaaacagatcccaaagaggcagcacaagcacccgaaacagcagtcaaaaaggaagcagtgttttgagtattaagcaaaaaggcaaaagggaactttatatggaaaagcttcaagaacatttaatcaaagcaaaagcctttaccataaagaagacgctggagatctatgtgcccatcaaacagttcttttacaacctcatccacccggagtatagcgccgtgactgacgtgtatgtactcatgttcctggctgacactgtggacttcatcatcattgtcttcggcttttgggcctttgggaaacactcagcagctgcagacatcacctcttcactgtcagaggaccaggtcccggggccgtttttggtgatggtcctcattcagtttggaaccatggtggtggaccgagccctctacctcaggaagactgtactgggaaaggtcatcttccaggtcattcttgtgttcggaattcacttctggatgttcttcatcttacctggtgtgactgagaggaaattcagccagaacctggttgcccagctttggtactttgtgaaatgtgtttacttcgggttgtctgcttaccagatccgttgtggctacccaacgcgagtcctggggaacttcctcaccaagagctacaattacgtcaacctcttcttattccaagggtttcgcctcgtgccctttttgactgagctgagggcagtgatggactgggtgtggacggacacaactttgagcctgtccagctggatctgtgtggaggacatctatgctcacatattcatcctgaagtgttggcgggagtcggagaagcctattttcacaatgagtgcccaacaaagccagttgaaagttatggaccagcagagctttaacaaatttatacaagctttttctagggacaccggtgctatgcaatttctggaaaattatgaaaaagaagacataacagtagcagaactggaaggaaactcaaattctttgtggaccatcagcccacccagtaagcagaaaatgatacacgaactcctggaccccaatagtagcttctctgttgttttttcatggagtattcagagaaacttaagtctgggtgcaaaatcggaaatagcaacagataagctttcttttcctcttaaaaatattactcgaaagaatatcgctaaaatgatagcaggcaacagcacagaaagttcaaaaacaccagtgaccatagaaaagatttatccatattatgtgaaagcacctagtgattctaactcaaaacctataaagcaacttttatctgaaaataatttcatggatattaccatcattttgtccagagacaatacaactaaatataacagtgagtggtgggttctcaacctgactggaaacagaatatacaatccgaactctcaggccctggaactggtggtcttcaatgacaaagtcagtcccccaagtctggggttcctggctggctatggtattatgggattatatgcttcagttgtccttgtgattgggaaatttgtccgtgaattcttcagtgggatttctcactccatcatgtttgaagagcttccaaatgtggatcgaattttgaagttgtgcacagatatttttttagttcgagagacaggagaactggagctagaagaagatctctatgccaaattaatattcctatatcgctcaccagagacaatgatcaaatggactagagaaaaaacaaattgaaaccttagaacacagactgcaaataatgttaacatttgaattttttttaaaagcacaatattctcataagagctaagcatttctagttcgacggaaatggtttgtttctcttctgataggtagacaaaaggagctgatatccttctgcagtaaaagctaccttgcaagttaaggcactgttgaaaatgttatttgtaactccatttctctgaaatcagggctacttgctttatgttttagtcaacagtgtctcgcattctgattgatcatgtgaaggaatcatttatgggccccgtccctaagagaaacagaagaggagtcagaaagaaagatgcctgtgttttcctctgtggggcccgtgcacttcctggagagatgctacaatgcaatatacagcgctc

SEQ ID NO: 211155 - DNA, 9712 bp, Artificial Sequence
  derived and/or modified sequence
gccccgggagcgtgccctcggggcggagagcgtcgcggcccgcgccgaggcgatgctcgggtggctgcgagctgccggcggcgagaggccatagacgggcatgggccttgcgtcccaccacccctagggaccctcgagcctcgcccctctgctccgactcgccggaccgacgcgatggcctcagaagtggtgtgcgggctcatcttcaggctgctgctgcccatctgcctggcagtagcatgtgcattccgatacaatgggctctcctttgtctaccttatctacctcttgctcattcctctgttctcagaaccaacaaaaacgacgatgcaaggacatacgggacggttattaaagtctctgtgcttcatcagtctttccttcctgttgctgcacatcattttccacatcacgttggtgagccttgaagctcaacatcgtattgcacctggctacaactgctcaacatgggaaaagacattccggcagatcggctttgaaagcttaaagggagctgatgctggcaatgggatcagagtgtttgtacctgacatcgggatgttcattgctagtctgaccatctggctcctctgtagaaacattgttcagaaacctgtgacagacgaagcagcacagagtaacccggagtttgaaaatgaagaattggctgaaggagaaaaaattgattcagaagaggcactgatctatgaagaggatttcaatggaggagatggtgttgaaggcgagttggaagaaagcacgaagttaaaaatgttccgcaggcttgcctctgtggcctctaagctcaaggagttcattggcaacatgatcaccactgctgggaaagtcgttgttaccatcttactgggctcctcgggcatgatgttgccgtctttgacatcatctgtgtatttttttgtatttttgggtctgtgcacctggtggtcctggtgccggacgttcgacccattgctgttcagctgtctctgtgttctgctggctattttcactgctggacatttgattggactttatttataccagttccaattctttcaagaggcagttccacccaatgactactatgcaaggttgtttggtatcaagtcagtaattcaaacggactgttcaagtacttggaagatcatagtgaacccggacctgtcgtggtaccaccacgccaaccctatcctcctgctggtgatgtactacactctggccactctgatccgcatctggctgcaagagccccttgtgcaggatgaggggaccaaagaagaggacaaagccctggcttgtagccccatccaaataacagcggggaggaggcggagcctgtggtacgcaacccattaccccactgatgagagaaaacttttatccatgacccaggatgactacaaaccatctgatggcctgctggtgactgtgaacggcaaccccgtggattaccacaccatccacccaagcctgcccatggagaacggccctggcaaagccgacctctactccacccctcagtaccggtgggagccctctgatgaatcctcagaaaagcgagaggaggaagaggaagagaaagaagaatttgaagaagaaaggagccgtgaggaaaaaagaagtatcaaagttcatgccatggtctccgtattccaatttattatgaaacaaagttacatctgtgccctcatagctatgatggcctggagcatcacctatcacagctggctgaccttcgtgctgctgatctggtcgtgcactctttggatgattcgcaacagaagaaaatatgccatgatcagctctcccttcatggtggtttatggaaacctattgttgatattacagtatatatggagttttgaacttcctgaaattaaaaaagttccaggatttttagaaaagaaagagccaggagaacttgcttccaaaatccttttcaccattactttttggctactgctgaggcagcacctcacagagcaaaaagctctgcaagaaaaggaagctcttttatcggaagtcaaaattggcagtcaggaaaatgaagaaaaagatgaggaacttcaagatatacaagtggaaggagagcccaaagaggaggaagaagaggaagcgaaggaagagaagcaagagagaaagaaggtagagcaagaggaagctgaagaagaagatgagcaggacatcatgaaagtcctgggcaatctggtggtggccatgttcatcaagtactggatctacgtctgcggaggcatgttcttcttcgtcagcttcgagggtaaaatcgtaatgtacaaaatcatctacatggtgctgttcctgttctgtgtggccctataccaggtgcactatgaatggtggaggaaaattctaaaatatttttggatgtcagtggttatttacactatgctggtgcttatctttatatacacatatcagtttgagaacttcccaggcctgtggcaaaatatgactggactgaaaaaagaaaagcttgaggatcttggcttaaagcagtttactgtggctgaactattcactcgcatattcatcccaacctcctttctgctggtgtgcattttacacctgcactacttccatgaccggttccttgaactcacagacctcaagtccattcccagcaaagaagacaacaccatctacagactggcccacccggaaggaagcctcccggacctcaccatgatgcatctgactgccagcctggagaagccggaggtgaggaagttggctgagcctggggaggagaagcttgagggctactctgaaaaagcccagaagggtgatcttgggaaagacagcgaggagtcagaggaggacggagaggaagaggaggaatccgaggaggaggaagaaacatcagacttaaggaacaaatggcacctggtgattgaccgcctcactgtgctcttcttaaaattcctggagtattttcacaagctgcaggtgttcatgtggtggattttggagttgcacatcatcaaaatcgtttcctcttacattatctgggtttctgtgaaagaggtgtctctgttcaactatgtatttttgatttcttgggcttttgctctgccgtacgccaagctgcgccgtctggcttcaagtgtctgcacagtctggacgtgtgtgatcatcgtctgcaaaatgttgtaccagctccaaaccattaagcctgagaacttctctgttaactgttccttgccaaatgaaaatcaaacaaacatcccctttaatgagttgaacaagtctctgctctacagcgctcctatcgatcctacagagtgggtcggcctgcggaagtcttcgcctctgctagtctacctgaggaataacctcctgatgctggctatcctggcctttgaagtcaccatttaccgccatcaggaatactatcgaggtcgaaataacctgacggcccctgtgtctagaactatctttcatgacattacaagactacatctagatgatggacttattaattgtgccaaatatttcattaattacttcttttacaagtttggtctggagacctgtttcctaatgtcagttaacgtcattggccagcgaatggatttctatgccatgatccacgcctgctggctgatcgctgtcttatatagacgcagaaggaaagccatcgcagagatctggcccaagtactgctgcttcctggcatgcatcatcaccttccagtatttcatctgcattggcatcccacctgctccttgccgagattacccgtggagattcaagggtgccagcttcaatgacaacatcataaagtggctgtacttcccagatttcattgtgcggcccaaccctgtgtttctcgtctatgacttcatgctgcttctgtgtgcctccttacaacggcagatttttgaggatgagaacaaggctgcagtgcgaatcatggcaggtgacaatgtcgagatctgcatgaaccttgatgcggcctccttcagccaacataaccctgtgccagattttattcactgcagatcttacttagacatgtccaaagtgatcatcttcagctacctcttctggtttgtgctcaccatcatcttcatcactgggaccaccaggatcagcatcttttgcatggggtacctggtggcctgtttctacttcctgctctttgggggcgatttgctgttgaaacccatcaagagcatcctgcgctactgggactggctgatcgcatacaacgtttttgtgattacgatgaaaaatatcctgtcaataggagcatgtggatacattggaacattggtgcacaatagttgttggttgatccaggctttcagcctggcctgcacagtcaaaggctatcaaatgcctgctgctaattcaccctgtacacttcccagtggggaagcaggaatcatttgggacagcatatgttttgccttcctcctgctgcaaagaagagttttcatgagttattattttctacatgttgtggctgatataaaagcttcccagattctggcatcaagaggagctgaacttttccaggccacaattgtaaaagctgtaaaggcaagaattgaggaagagaagaagtccatggaccagctgaagcgacagatggatcgcatcaaggccaggcaacagaaatataaaaagggtaaggagaggatgctgagcttgacccaggagccaggggaaggccaggacatgcaaaaactctctgaagaggatgatgaaagagaagcagacaaacagaaagccaagggcaaaaaaaagcagtggtggcggccttgggttgatcatgcttccatggtcaggagtggagattattatttgtttgaaacggatagtgaagaggaggaagaggaagaattaaagaaggaagatgaagaacctccacgaaggtcagcattccagtttgtttatcaagcctggattactgatcctaaaacagcactccgacaaagacacaaagagaaaaaaaggtctgcaagagaagaacggaaacgaaggcggaaaggatccaaggagggtcctgtggaatgggaagaccgggaggatgaaccaatcaaaaagaaatccgatggaccagataatatcatcaagaggatatttaatattttgaaatttacctgggtcctatttctggcaacagtggacagtttcactacttggcttaactccatttcaagggagcatattgatatatctacagttctgagaattgaacgatgcatgctgaccagagaaattaagaagggcaatgttccaactcgggagagcatccacatgtactatcagaaccacatcatgaacctttccagagagtcgggactggacaccattgacgagcatcccggagctgcttcaggtgcacagacagcccacaggatggatagtttagattcacatgacagtatctccagcgagcccacgcagtgtaccatgctgtactcacgccaggggaccactgagaccatcgaggaggtggaggctgagcaggaggaggaggcagggagcacggcgcctgagcccagggaggccaaggagtacgaggccactgggtacgatgtgggagccatgggtgccgaggaggccagcctcaccccagaggaagagctgacacagttctccaccttggacggggatgtggaggccccaccctcctacagcaaggctgtgagcttcgagcatctgtccttcggctcgcaggacgactctgcaggcaagaaccgtatggcagtcagcccggacgacagccgcaccgacaagctggggtccagcatcttacctcccctgacccatgagctgacggccagcgagctgctgctgaaaaagatgtttcacgacgatgagcttgaagagtcagagaaattctacgtggggcagccccgatttctgctgctcttctatgccatgtacaataccctggtggcccgctcggagatggtgtgctacttcgtgatcatcctcaaccacatggtctctgcctccatgatcacgctcctgcttcccatcctcatcttcctctgggccatgttgtccgtccccaggcccagccgccggttctggatgatggccatcgtctatactgaggtggcaattgtagtcaagtatttcttccaatttgggttctttccctggaataagaatgtggaggtgaacaaagataaaccgtatcaccccccaaacatcataggagtggaaaagaaggaaggttatgttctctatgacctcatccagctcctggctctgttctttcatcgatcaattttgaagtgccatggcttatgggatgaagatgacatgactgaaagtggcatggccagggaggaatcagatgatgagctctccctcggtcatggcaggagggactcctccgattctctcaagtccatcaacctggccgcgtctgtggagtcagtgcatgtgaccttcccggagcagcagacagctgtccggaggaagcgctccggcagcagctccgagccatcccagagatccagcttttcttcaaacagatcccaaagaggcagcacaagcacccgaaacagcagtcaaaaaggaagcagtgttttgagtattaagcaaaaaggcaaaagggaactttatatggaaaagcttcaagaacatttaatcaaagcaaaagcctttaccataaagaagacgctggagatctatgtgcccatcaaacagttcttttacaacctcatccacccggagtatagcgccgtgactgacgtgtatgtactcatgttcctggctgacactgtggacttcatcatcattgtcttcggcttttgggcctttgggaaacactcagcagctgcagacatcacctcttcactgtcagaggaccaggtcccggggccgtttttggtgatggtcctcattcagtttggaaccatggtggtggaccgagccctctacctcaggaagactgtactgggaaaggtcatcttccaggtcattcttgtgttcggaattcacttctggatgttcttcatcttacctggtgtgactgagaggaaattcagccagaacctggttgcccagctttggtactttgtgaaatgtgtttacttcgggttgtctgcttaccagatccgttgtggctacccaacgcgagtcctggggaacttcctcaccaagagctacaattacgtcaacctcttcttattccaagggtttcgcctcgtgccctttttgactgagctgagggcagtgatggactgggtgtggacggacacaactttgagcctgtccagctggatctgtgtggaggacatctatgctcacatattcatcctgaagtgttggcgggagtcggagaagagataccctcagccacggggccagaagaagaagaaagtggtgaagtatggcatgggaggaatgatcatcgtcctgctcatctgcattgtctggtttcctcttctcttcatgtctttgatcaaatctgtggctggggtcatcaaccagcccctggacgtctccgtcacaattaccctgggagggtatcagcctattttcacaatgagtgcccaacaaagccagttgaaagttatggaccagcagagctttaacaaatttatacaagctttttctagggacaccggtgctatgcaatttctggaaaattatgaaaaagaagacataacagtagcagaactggaaggaaactcaaattctttgtggaccatcagcccacccagtaagcagaaaatgatacacgaactcctggaccccaatagtagcttctctgttgttttttcatggagtattcagagaaacttaagtctgggtgcaaaatcggaaatagcaacagataagctttcttttcctcttaaaaatattactcgaaagaatatcgctaaaatgatagcaggcaacagcacagaaagttcaaaaacaccagtgaccatagaaaagatttatccatattatgtgaaagcacctagtgattctaactcaaaacctataaagcaacttttatctgaaaataatttcatggatattaccatcattttgtccagagacaatacaactaaatataacagtgagtggtgggttctcaacctgactggaaacagaatatacaatccgaactctcaggccctggaactggtggtcttcaatgacaaagtcagtcccccaagtctggggttcctggctggctatggtattatgggattatatgcttcagttgtccttgtgattgggaaatttgtccgtgaattcttcagtgggatttctcactccatcatgtttgaagagcttccaaatgtggatcgaattttgaagttgtgcacagatatttttttagttcgagagacaggagaactggagctagaagaagatctctatgccaaattaatattcctatatcgctcaccagagacaatgatcaaatggactagagaaaaaacaaattgaaaccttagaacacagactgcaaataatgttaacatttgaattttttttaaaagcacaatattctcataagagctaagcatttctagttcgacggaaatggtttgtttctcttctgataggtagacaaaaggagctgatatccttctgcagtaaaagctaccttgcaagttaaggcactgttgaaaatgttatttgtaactccatttctctgaaatcagggctacttgctttatgttttagtcaacagtgtctcgcattctgattgatcatgtgaaggaatcatttatgggccccgtccctaagagaaacagaagaggagtcagaaagaaagatgcctgtgttttcctctgtggggcccgtgcacttcctggagagatgctacaatgcaatatacagcgctccatccccactggggaagctgctgtgatgagactagatgagccttcaacacactcagaaaatgcaacagcaatagggggcagacagctcctacctgtgtttctaggagcaaaagagagggaactaattgcccgtgaagacgccagtggaaggatcagcctcattctaagcaaaaacatagtattagtgatactcttactgccttatcttaaccaaggactaataggatacctttccattaaacaccagtgacttctcaggaaaaaaaaaaaaaaggagcaaaacaaatgatgtgtacacctgctttgttatggtccaccagtgaccagcttcaatgaggggaaccattctggagggctgcggtctcctgtgcaaacagacatgaggcagaagagtaaaaagaccaacccagtgggacctagaatactttgtaactctttaataactgaggtcaggaccgctcttctgccttccccttcccttaacgtgctttttcccatttccatgatttaaggcaatggtttttccagtatgtgacattttccttcctgtttttcaggtatatcaaagagtttacatattccaattcacatttttacatctgagacgggttttttaagttcataattatgaaagaaatatgtatattgagcttggggaaataaaaatggccttttcttaaattattattattggtaatacaacctcttcattaaataacaatgtagcatgaaaaatttatgattgaaatgtagttttcattccatattaagatacagtttctgagaagaatcattgaatggactagaatatgtcaaaaattgatcctgtgtagtttgggttcagggctgacttaaaataaagcacatcctgcaaagtc

SEQ ID NO: 211156 - DNA, 3524 bp, Artificial Sequence
  derived and/or modified sequence
gggttctttccctggaataagaatgtggaggtgaacaaagataaaccgtatcaccccccaaacatcataggagtggaaaagaaggaaggttatgttctctatgacctcatccagctcctggctctgttctttcatcgatcaattttgaaggtactgcatgttaacaattaatcagttcaagttggtcatcttcctagataacctggaccgtaatcttcctagataacctggacatcaggattggtgatggggctgaggggccagtgagtgtgccatggcttatgggatgaagatgacatgactgaaagtggcatggccagggaggaatcagatgatgagctctccctcggtcatggcaggagggactcctccgattctctcaagtccatcaacctggccgcgtctgtggagtcagtgcatgtgaccttcccggagcagcagacagctgtccggaggaagcgctccggcagcagctccgagccatcccagagatccagcttttcttcaaacagatcccaaagaggcagcacaagcacccgaaacagcagtcaaaaaggaagcagtgttttgagtattaagcaaaaaggcaaaagggaactttatatggaaaagcttcaagaacatttaatcaaagcaaaagcctttaccataaagaagacgctggagatctatgtgcccatcaaacagttcttttacaacctcatccacccggagtatagcgccgtgactgacgtgtatgtactcatgttcctggctgacactgtggacttcatcatcattgtcttcggcttttgggcctttgggaaacactcagcagctgcagacatcacctcttcactgtcagaggaccaggtcccggggccgtttttggtgatggtcctcattcagtttggaaccatggtggtggaccgagccctctacctcaggaagactgtactgggaaaggtcatcttccaggtcattcttgtgttcggaattcacttctggatgttcttcatcttacctggtgtgactgagaggaaattcagccagaacctggttgcccagctttggtactttgtgaaatgtgtttacttcgggttgtctgcttaccagatccgttgtggctacccaacgcgagtcctggggaacttcctcaccaagagctacaattacgtcaacctcttcttattccaagggtttcgcctcgtgccctttttgactgagctgagggcagtgatggactgggtgtggacggacacaactttgagcctgtccagctggatctgtgtggaggacatctatgctcacatattcatcctgaagtgttggcgggagtcggagaagcctattttcacaatgagtgcccaacaaagccagttgaaagttatggaccagcagagctttaacaaatttatacaagctttttctagggacaccggtgctatgcaatttctggaaaattatgaaaaagaagacataacagtagcagaactggaaggaaactcaaattctttgtggaccatcagcccacccagtaagcagaaaatgatacacgaactcctggaccccaatagtagcttctctgttgttttttcatggagtattcagagaaacttaagtctgggtgcaaaatcggaaatagcaacagataagctttcttttcctcttaaaaatattactcgaaagaatatcgctaaaatgatagcaggcaacagcacagaaagttcaaaaacaccagtgaccatagaaaagatttatccatattatgtgaaagcacctagtgattctaactcaaaacctataaagcaacttttatctgaaaataatttcatggatattaccatcattttgtccagagacaatacaactaaatataacagtgagtggtgggttctcaacctgactggaaacagaatatacaatccgaactctcaggccctggaactggtggtcttcaatgacaaagtcagtcccccaagtctggggttcctggctggctatggtattatgggattatatgcttcagttgtccttgtgattgggaaatttgtccgtgaattcttcagtgggatttctcactccatcatgtttgaagagcttccaaatgtggatcgaattttgaagttgtgcacagatatttttttagttcgagagacaggagaactggagctagaagaagatctctatgccaaattaatattcctatatcgctcaccagagacaatgatcaaatggactagagaaaaaacaaattgaaaccttagaacacagactgcaaataatgttaacatttgaattttttttaaaagcacaatattctcataagagctaagcatttctagttcgacggaaatggtttgtttctcttctgataggtagacaaaaggagctgatatccttctgcagtaaaagctaccttgcaagttaaggcactgttgaaaatgttatttgtaactccatttctctgaaatcagggctacttgctttatgttttagtcaacagtgtctcgcattctgattgatcatgtgaaggaatcatttatgggccccgtccctaagagaaacagaagaggagtcagaaagaaagatgcctgtgttttcctctgtggggcccgtgcacttcctggagagatgctacaatgcaatatacagcgctccatccccactggggaagctgctgtgatgagactagatgagccttcaacacactcagaaaatgcaacagcaatagggggcagacagctcctacctgtgtttctaggagcaaaagagagggaactaattgcccgtgaagacgccagtggaaggatcagcctcattctaagcaaaaacatagtattagtgatactcttactgccttatcttaaccaaggactaataggatacctttccattaaacaccagtgacttctcaggaaaaaaaaaaaaaaggagcaaaacaaatgatgtgtacacctgctttgttatggtccaccagtgaccagcttcaatgaggggaaccattctggagggctgcggtctcctgtgcaaacagacatgaggcagaagagtaaaaagaccaacccagtgggacctagaatactttgtaactctttaataactgaggtcaggaccgctcttctgccttccccttcccttaacgtgctttttcccatttccatgatttaaggcaatggtttttccagtatgtgacattttccttcctgtttttcaggtatatcaaagagtttacatattccaattcacatttttacatctgagacgggttttttaagttcataattatgaaagaaatatgtatattgagcttggggaaataaaaatggccttttcttaaattattattattggtaatacaacctcttcattaaataacaatgtagcatgaaaaatttatgattgaaatgtagttttcattccatattaagatacagtttctgagaagaatcattgaatggactagaatatgtcaaaaattgatcctgtgtagtttgggttcagggctgacttaaaataaagcacatcctgcaaagtcattttaa

SEQ ID NO: 211157 - DNA, 2671 bp, Artificial Sequence
  derived and/or modified sequence
atgttaacaattaatcagttcaagttggtcatcttcctagataacctggaccgtaatcttcctagataacctggacatcaggattggtgatggggctgaggggccagtgagtgtgccatggcttatgggatgaagatgacatgactgaaagtggcatggccagggaggaatcagatgatgagctctccctcggtcatggcaggagggactcctccgattctctcaagtccatcaacctggccgcgtctgtggagtcagtgcatgtgaccttcccggagcagcagacagctgtccggaggaagcgctccggcagcagctccgagccatcccagagatccagcttttcttcaaacagatcccaaagaggcagcacaagcacccgaaacagcagtcaaaaaggaagcagtgttttgagtattaagcaaaaaggcaaaagggaactttatatggaaaagcttcaagaacatttaatcaaagcaaaagcctttaccataaagaagacgctggagatctatgtgcccatcaaacagttcttttacaacctcatccacccggagtatagcgccgtgactgacgtgtatgtactcatgttcctggctgacactgtggacttcatcatcattgtcttcggcttttgggcctttgggaaacactcagcagctgcagacatcacctcttcactgtcagaggaccaggtcccggggccgtttttggtgatggtcctcattcagtttggaaccatggtggtggaccgagccctctacctcaggaagactgtactgggaaaggtcatcttccaggtcattcttgtgttcggaattcacttctggatgttcttcatcttacctggtgtgactgagaggaaattcagccagaacctggttgcccagctttggtactttgtgaaatgtgtttacttcgggttgtctgcttaccagatccgttgtggctacccaacgcgagtcctggggaacttcctcaccaagagctacaattacgtcaacctcttcttattccaagggtttcgcctcgtgccctttttgactgagctgagggcagtgatggactgggtgtggacggacacaactttgagcctgtccagctggatctgtgtggaggacatctatgctcacatattcatcctgaagtgttggcgggagtcggagaagagataccctcagccacggggccagaagaagaagaaagtggtgaagtatggcatgggaggaatgatcatcgtcctgctcatctgcattgtctggtttcctcttctcttcatgtctttgatcaaatctgtggctggggtcatcaaccagcccctggacgtctccgtcacaattaccctgggagggtatcagcctattttcacaatgagtgcccaacaaagccagttgaaagttatggaccagcagagctttaacaaatttatacaagctttttctagggacaccggtgctatgcaatttctggaaaattatgaaaaagaagacataacagtagcagaactggaaggaaactcaaattctttgtggaccatcagcccacccagtaagcagaaaatgatacacgaactcctggaccccaatagtagcttctctgttgttttttcatggagtattcagagaaacttaagtctgggtgcaaaatcggaaatagcaacagataagctttcttttcctcttaaaaatattactcgaaagaatatcgctaaaatgatagcaggcaacagcacagaaagttcaaaaacaccagtgaccatagaaaagatttatccatattatgtgaaagcacctagtgattctaactcaaaacctataaagcaacttttatctgaaaataatttcatggatattaccatcattttgtccagagacaatacaactaaatataacagtgagtggtgggttctcaacctgactggaaacagaatatacaatccgaactctcaggccctggaactggtggtcttcaatgacaaagtcagtcccccaagtctggggttcctggctggctatggtattatgggattatatgcttcagttgtccttgtgattgggaaatttgtccgtgaattcttcagtgggatttctcactccatcatgtttgaagagcttccaaatgtggatcgaattttgaagttgtgcacagatatttttttagttcgagagacaggagaactggagctagaagaagatctctatgccaaattaatattcctatatcgctcaccagagacaatgatcaaatggactagagaaaaaacaaattgaaaccttagaacacagactgcaaataatgttaacatttgaattttttttaaaagcacaatattctcataagagctaagcatttctagttcgacggaaatggtttgtttctcttctgataggtagacaaaaggagctgatatccttctgcagtaaaagctaccttgcaagttaaggcactgttgaaaatgttatttgtaactccatttctctgaaatcagggctacttgctttatgttttagtcaacagtgtctcgcattctgattgatcatgtgaaggaatcatttatgggccccgtccctaagagaaacagaagaggagtcagaaagaaagatgcctgtgttttcctctgtggggcccgtgcacttcctggagagatgctacaatgcaatatacagcgctc

SEQ ID NO: 211158 - DNA, 1635 bp, Artificial Sequence
  derived and/or modified sequence
atggagaagttgcaggaacaccttatcaaagctaaagcattcacgatcaaaaagacattggagatctacgtcccaatcaagcagttcttctataatctgatacatccagagtatagtgccgtgactgacgtctatgtgctgatgttcctcgctgacactgtcgatttcatcattattgtcttcggcttttgggcctttggaaaacattccgcagctgctgacatcacgtcttcattgtctgaagaccaggtgcctggcccattcctggtaatggtgctgatccaattcggcacaatggtggtggacagggcactgtacctgagaaagactgtgttgggcaaggtgatattccaggttatccttgtatttgggattcacttctggatgttcttcatccttcccggagtgacagagcggaagttctcgcagaacctcgttgctcagctctggtactttgtgaaatgtgtgtattttggcctgagcgcgtaccaaatccgttgtggctatccaacacgagtccttggaaatttcttgactaaaagctacaactatgtaaatctgttcctgttccagggcttccggctggtaccgttcctgactgagctaagggccgttatggactgggtgtggaccgacacgactctgtctttatcgtcatggatatgcgtggaggatatctacgctcacatattcattctcaaatgttggcgggaatctgaaaaaccgatctttacgatgagtgcccagcagtcacagctcaaggtgatggatcaacaatcctttaataagttcatccaggctttctccagggacactggcgcaatgcagttccttgaaaattatgagaaggaggacattacagtcgccgaactcgagggtaatagcaactctctgtggaccatcagcccaccctctaaacagaagatgattcacgagcttctggaccccaacagctcgttctcagtggttttttcatggagtatacagagaaatttgtccctgggcgcaaaatcagagattgcgacggataagctttcattccctcttaaaaatatcacaagaaaaaacattgccaaaatgatagcaggaaactctacagaatcctccaaaacccccgtgactattgagaagatctatccgtattacgtcaaggcaccttctgactcgaactctaagccaataaagcagcttctatcagagaataactttatggatatcacaataatactgtccagagacaacaccactaaatataactccgagtggtgggtcctgaatctgaccggaaatagaatttacaacccaaatagccaggccctggaactggtggtgttcaatgacaaagtctctcctccttccctggggtttctagccggatatggaattatgggcctgtacgcctccgtggtgctagtcattggtaaattcgtccgcgagttcttcagtgggatctctcatagtataatgtttgaagagctgcccaacgtggatagaattctcaagttgtgcacagacatcttcttggtgagggagacaggggaactggagctggaggaggacctctacgctaagctgatctttttatataggagtccggaaactatgatcaagtggactagggaaaagaccaactag

SEQ ID NO: 211159 - DNA, 8258 bp, Artificial Sequence
  derived and/or modified sequence
atggcatcggaagtagtctgcggtttaatcttccggctgcttctgccgatctgcctggctgtggcatgtgcgttcaggtataacggattatcctttgtgtacttaatttacctcctgttaatacctctgtttagcgaacctaccaagactactatgcagggccataccggtcggctgctgaaatcactgtgttttatttcattatcctttctgctgctgcacatcatcttccacattaccctggtatctttagaagctcagcaccgcattgcacccggatataactgcagcacatgggaaaagaccttcagacagatcgggtttgagtcccttaaaggcgctgacgcaggaaacgggatacgggtgttcgtgcctgacataggaatgtttattgcatccctgactatttggcttctctgtaggaacattgtccagaagcccgttacagatgaagccgcacagtccaaccctgaatttgagaacgaagaattggctgaaggggagaagatagactccgaggaagccctcatctacgaagaggattttaatggcggagacggagtggagggcgagttggaagagagtaccaagttgaaaatgtttcgacgactagcctctgtagcgtcaaaacttaaggaattcatcggcaacatgataaccaccgccggtaaagtggtggtgactatcttattggggtcttctggaatgatgttgccctcgctcacatccagtgtgtacttcttcgtgtttttaggcttatgtacatggtggtcgtggtgcaggacgttcgatcctctgctgtttagctgtctttgcgtcctactggccatctttacggcgggtcacctcattggactgtacctgtaccagttccagttctttcaggaagcagtgcctccaaacgactactacgcccgactttttggcattaagagcgtgatccaaacagactgctcctccacttggaagatcatagtgaatccggatctcagctggtatcaccacgcaaacccgatcttgctgttggtcatgtattacactctggcaactcttattcgaatatggttacaggaacccctggtccaggatgagggcacaaaagaggaggacaaggcactcgcctgttcacccatccagattacggccggacgcagaagatcgttgtggtacgccacacattaccccaccgatgagagaaagctgttgagcatgactcaggatgattataagccaagtgatggcctcctcgtcactgtgaacggcaacccggtcgattaccacaccatccatccttccctcccgatggaaaatggcccagggaaggcggatctgtactccaccccccagtatcgctgggagccttcggacgaaagttctgagaagcgagaagaggaagaggaggaaaaggaggagttcgaagaagagcgtagtagggaagaaaagcgaagtataaaggtgcatgccatggtttctgtgttccagttcattatgaagcagagctatatctgcgccctaatcgcaatgatggcctggtccattacgtaccattcatggctgacgttcgtgttacttatctggagctgtacactgtggatgattagaaaccgcaggaagtatgccatgatctcgagcccattcatggtggtctatggtaacctcctgcttatcttacaatacatctggtctttcgaactgcctgagataaagaaggttcctgggtttttagagaaaaaagaaccaggagagttagcctcaaagatcttattcacgataacgttctggctgctcctgaggcaacatctgaccgagcagaaggcactgcaagaaaaagaggcgttgctcagtgaggttaaaatcggctcccaagaaaatgaggagaaggacgaggaattacaggatatacaggtcgagggagaaccgaaagaagaggaagaggaggaagcaaaggaggaaaaacaagagaggaaaaaggtcgaacaagaggaggccgaggaggaggacgaacaggacatcatgaaagtgttaggcaatctggtcgtcgctatgtttatcaaatactggatctatgtatgcggaggcatgttttttttcgtttctttcgagggcaaaatcgtgatgtataagataatatacatggtattgttcctattctgcgtggccttgtatcaagttcactatgagtggtggcggaaaatcttgaaatatttctggatgagcgtcgtgatttacacaatgctggtgctgatcttcatttacacgtaccaattcgagaactttccaggactctggcagaatatgacaggtcttaaaaaggaaaagctggaggatctgggattgaaacagttcacagtggcggaactttttacccgcatctttatccccacgagcttcttactggtgtgcatactgcatttgcattactttcatgacagatttctggagctcacagacctgaagtctatcccatctaaggaagacaatactatttatcgcctcgcccaccctgaggggagccttccggacctcaccatgatgcatctgaccgcatccctcgaaaagccagaggtgcgcaagctggccgagccaggggaagagaagctcgagggctacagcgaaaaggcgcagaagggagacctggggaaggattccgaggagtccgaggaggatggagaggaagaagaagaatctgaggaggaggaggaaacctctgaccttcggaacaagtggcacctcgttatcgatagactgaccgttctttttctgaagtttctagagtattttcacaagttgcaggttttcatgtggtggatcctggagcttcacatcatcaagattgtgtcctcttacatcatctgggtctccgtcaaggaggtctccctgttcaattacgtttttctgatcagctgggccttcgctcttccgtacgccaagctgcgccgacttgcatcctccgtgtgcactgtgtggacctgtgtgattatcgtgtgcaagatgttgtatcagttgcagaccattaagcctgagaacttcagcgtgaactgcagcctgccaaatgagaatcagacaaacatcccctttaacgaacttaataaaagcttactctattccgctccaatcgaccctacagaatgggtcggattgaggaagtcctcacctttgttggtttacctgcgtaataatctactaatgttggcgatcctggctttcgaagtcacaatatataggcatcaggaatattacagagggcgaaacaacctgaccgctccagtttcccgaacaatttttcacgacataacgagactccatctggacgatgggctgattaattgtgctaagtactttattaattacttcttttacaagttcggactggagacctgtttcctgatgtctgtcaacgtgattggacagaggatggacttttatgccatgatccatgcctgttggctcatagccgttttgtaccgcagaaggcggaaggcaattgctgagatatggccaaaatattgttgtttcctggcctgcattataacattccagtactttatctgcatcggaatcccccctgccccatgccgggactatccgtggagatttaaaggagcttcttttaatgacaatatcatcaagtggttgtatttccctgatttcatagtgcggccaaaccccgtgttcctggtttacgattttatgctgctgctgtgtgcttcccttcagcggcagatcttcgaagatgagaacaaggccgcagtgcgcataatggcaggggacaacgtagaaatttgtatgaatctggatgctgcttcatttagccagcataatcctgtgccagattttatccactgtcggtcatacctggacatgtctaaagtcattattttcagttatctgttctggttcgtcttgacgattattttcattactgggaccactagaatatcgatcttctgcatggggtacctggtcgcttgcttctactttctgctgtttggcggtgacctgctcctcaaaccaatcaaatctattcttcgctattgggattggctgattgcctacaatgttttcgtgattaccatgaagaatattctttccatcggcgcatgcgggtacatcggtacactggtgcacaattcttgttggctgatccaggcattcagcttggcttgtacagtaaaaggctaccagatgccagctgccaactccccgtgcactctgccaagtggcgaagcgggaatcatttgggatagtatctgttttgctttccttctgttacagagaagagtattcatgagttattacttcttgcatgtggttgcagatatcaaggcttcacagatcctcgcctcccggggagcagagcttttccaggctacaattgtgaaagctgttaaagcacggatcgaggaggagaagaaatccatggaccaattgaagcgccaaatggacagaatcaaggcccgacagcagaagtataagaagggtaaagagcgaatgctatctctgactcaggagcccggagaaggacaggatatgcagaagcttagcgaagaggatgacgagagggaagcagataaacagaaggccaagggcaagaaaaagcagtggtggaggccctgggtagaccacgcctccatggtacgcagcggggattactatctgtttgagaccgacagcgaagaggaggaggaagaggagctcaaaaaggaggacgaggaaccccctagacggagcgcctttcagttcgtctaccaagcttggattaccgatccaaagactgctctgcggcagcggcataaggaaaagaagcgatccgccagggaggaaagaaaaaggcggagaaaaggctccaaggaggggccagtggagtgggaagaccgcgaagatgagcccatcaaaaagaagagcgacgggccagacaacattataaagagaatcttcaacatcttaaagtttacttgggtgctgtttctggcaaccgtggattcgttcaccacatggctcaatagcatcagcagagagcacattgacatttctacagtactgcgcatcgagagatgtatgctgacccgggagattaagaagggcaacgtgccaacccgggaatctatacacatgtattaccagaatcacatcatgaacctttcccgcgaaagtggactggataccatcgatgaacatccaggggctgccagcggtgcacagaccgctcaccggatggactccctcgacagtcatgattcgatttcttcagaaccaacacagtgcacaatgttgtactctaggcagggcaccactgagaccatcgaggaagtcgaggcggagcaggaggaggaggcagggtcgacggccccagagcctcgcgaagccaaagagtacgaggccacaggctacgatgtgggcgctatgggcgcagaagaagcttccctcaccccggaggaggagctgacccagtttagtactctggacggagatgttgaggctcccccaagttatagcaaggccgtgtctttcgagcacctcagcttcggctctcaggatgatagtgccggtaaaaatcgaatggcggtgtctcctgacgatagtcgcacagataagttgggcagcagtatcctgccccctctgactcatgagctgaccgccagcgagttattgctgaaaaagatgttccatgacgatgagctcgaggagagcgagaagttctacgtgggccagccgaggttcctgttgctgttctacgccatgtacaatacacttgtcgctaggagtgagatggtgtgctacttcgtcataattctgaatcacatggtctccgccagcatgattacccttctcctgccaatcctcatttttttgtgggctatgctaagcgtgccccgaccgtccaggcggttttggatgatggcgatcgtctacactgaagtggccatcgtggtgaaatactttttccaatttgggtttttcccatggaataagaatgtggaagtgaacaaggacaagccttatcatccccctaatataatcggcgtggagaagaaagaaggttacgtcctttatgatctaatacaacttcttgctttatttttccacaggtccattctgaaatgtcacggcctctgggatgaagatgacatgacagaaagtggtatggcgagggaggaaagtgatgacgagctgtcactcggacacggccgaagagacagttcagacagcttgaagtcaatcaatttagcggcttccgtggagagtgtgcacgttaccttccctgaacagcagactgcagtccgaagaaagcgcagtgggtcgtcgtccgagccttcccagcggtcctcattctcttcgaatagaagtcaacggggttccacgtctacccgcaattcatctcagaagggatcctctgtcctgagcatcaagcagaaaggcaaacgggagctgtatatggagaagctgcaggagcacctgataaaggccaaagccttcactatcaagaagaccctggagatttatgtgcctattaaacagttcttctataacctgattcatccagagtatagtgcagttacggatgtctatgtactgatgtttctcgccgatacagtggacttcattatcattgtttttgggttctgggcctttggcaaacatagcgcggcagcggacatcacaagttccctgagcgaggaccaggtacccggaccatttcttgtgatggtcctcattcagtttggcacaatggtcgtggacagagccctctatctgcggaagaccgtgctggggaaggtaatctttcaggtgattctggtgttcggcatccatttttggatgttcttcatacttccaggggtaactgagcggaagttctcacaaaacctggtggcccagctgtggtatttcgttaaatgcgtgtactttggtctctccgcttaccaaatccgatgcggctatccaacccgcgtgttaggaaatttcctgacaaagagttacaactacgtgaatctttttcttttccagggcttccgactagtgcctttccttacagaactcagggctgtgatggattgggtctggacagataccactttaagtctgtctagctggatttgtgtggaggacatctatgcacatatctttatcctgaagtgctggagagaatcagagaaacggtacccccagcctagaggtcagaaaaaaaagaaggttgtgaagtacggtatgggaggcatgataatcgtcctcctgatttgtattgtctggttcccattgctgtttatgtctctcatcaagagtgtcgctggtgttatcaaccagcccctggacgtgtcagtcacaatcaccctgggaggctaccagccaatctttactatgtccgctcaacaatcgcagttgaaggttatggatcagcagtcgttcaacaagtttatccaggccttctctcgcgatactggggcaatgcaattcctggaaaactacgagaaggaagatatcacagtggccgagcttgagggaaatagcaattcactgtggaccatctccccaccttcaaagcaaaagatgattcacgagttactggatcccaacagcagtttctcagtggtttttagttggtcaatccagcggaacctttccctaggggctaagtccgagattgccactgataaactgtcttttcctctgaagaacattacacgtaaaaatatcgcaaagatgatagcgggaaactcaaccgagagcagcaaaacaccagttactatcgagaaaatttacccttactatgtcaaggccccaagcgatagcaattcaaagcctataaagcagctgttgtccgaaaacaactttatggacatcaccattatcctaagcagggataatacaacaaaatataattccgagtggtgggttttgaacctgacaggcaatcgaatctacaatcctaactctcaagcactggaacttgtagtgtttaatgacaaggtgtcacctcccagcttgggctttctagccggttacgggatcatggggctgtatgcatctgttgttctggtgatcggaaaattcgtaagagagtttttttctggaatctcacactccataatgtttgaagagctccctaatgtggataggatcttgaagctgtgcacagacatctttcttgttagagagactggggagttagaattagaagaggatctgtacgctaagctgatctttctgtaccgcagccctgaaaccatgatcaaatggacgcgcgagaagacaaacta

SEQ ID NO: 211160 - DNA, 1941 bp, Artificial Sequence
  derived and/or modified sequence
atgacagagagcgggatggcacgggaggaaagcgatgatgagctgtcacttgggcatggacgcagagactcatcagactcccttaaatcaatcaatcttgccgcaagcgtcgaatcagtgcatgtgacgttcccggaacagcagaccgcggtgaggcgaaaacggtctggaagctccagcgaaccaagccagcggagctccttctctagcaacaggagtcaacgaggctctacatccacaagaaacagcagtcagaaagggtcctctgtgttaagcatcaaacaaaagggaaagcgagaactatacatggaaaaactccaggagcatctgattaaagctaaggcttttacaattaagaagacgctggaaatatatgtgcccatcaagcagtttttctataacctgatccaccccgagtatagtgccgtgactgacgtctacgtgctcatgtttttggccgacaccgtggatttcatcatcatcgtgttcggtttctgggccttcggcaagcactcggcagccgctgacatcacatcttccctaagtgaagatcaggtaccaggacctttcctcgtcatggtgctcatccagtttgggacgatggtggttgacagggcgttatatctgagaaagaccgtgttgggaaaagttatcttccaggtaatcctcgtttttggcatccacttctggatgtttttcatcctgccaggagtcacggagcgcaagttttcccagaatctggttgcccagctgtggtatttcgtgaagtgtgtgtatttcggcctcagtgcctaccagatcagatgtggctaccccaccagagtccttgggaattttcttaccaagtcgtacaattacgtgaacctcttccttttccagggttttagactcgtgccatttctgactgagctcagggctgtgatggattgggtctggacagatacaacactaagtctgagctcatggatatgtgttgaggacatttatgcccacattttcattctgaaatgttggagggagtccgagaagccgattttcaccatgtcagcacagcagtcccagctaaaggtgatggaccaacagtcattcaataaattcattcaggccttctccagggacaccggggcaatgcaattcttagagaattacgaaaaggaggacattacagttgcagaactcgaaggaaattcaaattccctttggaccatcagcccccctagtaaacagaaaatgatccatgagctcctggatccgaattcctcatttagcgttgtgttctcttggagcatccagaggaacctctctctcggcgcaaagtcagaaatcgctaccgacaaactgtcttttcctctcaagaatatcacccggaagaacatcgctaaaatgatagctggcaatagcaccgagtcttccaaaacacccgtaactattgagaaaatctacccctactacgtgaaagccccttccgatagtaatagcaaaccgatcaagcagctgcttagcgagaataattttatggatataactatcattctctcacgggataatacaacaaaatacaactccgagtggtgggttctgaatctcaccggcaaccgcatttacaacccaaatagtcaggccctggaacttgtggtgttcaatgacaaagttagtccaccctccctgggctttctggccggttatgggatcatgggcctctacgcctctgtggtgcttgttatagggaaattcgtccgggagttcttcagcggcataagccatagtatcatgttcgaagaactccctaatgtcgatcgaattctcaaactgtgcactgatattttcttggtgcgcgagactggcgagttggagctggaggaggatctttacgccaagctgatcttcctttacagatcacccgaaaccatgattaaatggacccgcgaaaaaacaaactag

SEQ ID NO: 211161 - DNA, 2130 bp, Artificial Sequence
  derived and/or modified sequence
atgacggaaagcggtatggcacgcgaagagagcgatgatgagttatcgcttggccacggtcgcagggatagttccgattctttgaagagcatcaacctcgccgcttccgtggaatccgttcatgtcacctttcccgagcaacagactgcggtaaggaggaagaggagtgggtcaagtagcgagccgtctcaacgttcaagcttttcatccaatcgctcccagagaggatcaacttcaacccgcaattcctcacagaagggcagctcggtcttaagcattaaacaaaaagggaagcgagagttatatatggagaaactgcaggaacacctgattaaggcaaaagcctttaccattaagaagaccctggagatttatgttccaataaaacagttcttctacaatttgattcatcccgagtattcagctgtcactgacgtgtacgtgctaatgttcctcgccgatacggtggacttcattatcattgtattcggtttttgggcctttggcaaacactcagcagccgcagacattaccagttctctttcagaagatcaggtgcctgggccattccttgtcatggtcctgatccagttcgggactatggttgtagatcgcgctctttaccttaggaaaaccgtcctaggaaaggttattttccaagtcatccttgttttcggtatccacttctggatgttctttatccttcctggtgtcaccgaacgtaaatttagccaaaaccttgttgcgcaactctggtactttgtcaaatgtgtgtactttggactttccgcctatcagattagatgcggatatcctactagagtgctgggcaatttcctgacaaagtcatataactatgtaaatctgttcctttttcagggctttcgcctggttcctttccttaccgagctgagagctgtgatggactgggtgtggacagacaccacgctttctttgagcagttggatttgcgttgaggacatctacgcgcatatttttattctgaaatgctggcgggaatctgaaaagcgctatcctcagccacgagggcagaagaaaaagaaggtggtgaagtacggtatggggggaatgatcatcgtcctccttatatgcattgtctggttcccactactcttcatgtctctgatcaagtctgtcgccggagtcataaaccagcctctagatgtcagcgtgacgatcactttagggggatatcagcccatcttcacaatgtctgctcagcagtcacagctgaaggtgatggatcagcagtcattcaacaaattcatccaagcattctcaagagataccggggctatgcaattcctcgagaactatgaaaaagaggatatcacagtagccgagctggaaggtaattccaactccctctggacaatcagtccaccctctaagcaaaaaatgatccatgaactcctggatcccaatagctctttttcagtcgtgttctcatggtctattcagcggaacttgtctctgggggctaaaagcgagatcgcaacggataaattaagttttccactcaaaaacattacacggaagaacattgccaagatgatagctgggaatagcaccgagtcttcaaaaacccccgtgaccatcgaaaagatttacccatactatgtgaaagcaccctccgatagcaatagtaaacctattaaacaacttctgtcagagaacaacttcatggacatcacgatcattctctccagggacaatactacaaagtacaacagcgagtggtgggtgctgaatctcaccggcaaccgcatatacaacccaaacagtcaagccctggaacttgtggtatttaacgataaggtgagccctccatcattagggttcctcgcgggatacggcattatgggcctctacgcttccgtggtgttagtcattggaaagttcgtgcgggagtttttctccggaatctctcactccattatgtttgaggagctgcctaatgtcgatcgtattctcaaactatgtaccgatatcttcctggtgcgcgaaacgggtgagctggaactggaagaggatttatatgcgaagcttatatttctttacaggtctccggagaccatgatcaagtggaccagagagaaaacgaactag

SEQ ID NO: 211162 - DNA, 1635 bp, Artificial Sequence
  derived and/or modified sequence
atggagaagctgcaggagcacctgatcaaggccaaggccttcaccatcaagaagaccctggagatctacgtgcccatcaagcagttcttctacaacctgatccaccccgagtacagcgccgtgaccgacgtgtacgtgctgatgttcctggccgacaccgtggacttcatcatcatcgtgttcggcttctgggccttcggcaagcacagcgccgccgccgacatcaccagcagcctgagcgaggaccaggtgcccggccccttcctggtgatggtgctgatccagttcggcaccatggtggtggacagagccctgtacctgagaaagaccgtgctgggcaaggtgatcttccaggtgatcctggtgttcggcatccacttctggatgttcttcatcctgcccggcgtgaccgagagaaagttcagccagaacctggtggcccagctgtggtacttcgtgaagtgcgtgtacttcggcctgagcgcctaccagatcagatgcggctaccccaccagagtgctgggcaacttcctgaccaagagctacaactacgtgaacctgttcctgttccagggcttcagactggtgcccttcctgaccgagctgagagccgtgatggactgggtgtggaccgacaccaccctgagcctgagcagctggatctgcgtggaggacatctacgcccacatcttcatcctgaagtgctggagagagagcgagaagcccatcttcaccatgagcgcccagcagagccagctgaaggtgatggaccagcagagcttcaacaagttcatccaggccttcagcagagacaccggcgccatgcagttcctggagaactacgagaaggaggacatcaccgtggccgagctggagggcaacagcaacagcctgtggaccatcagcccccccagcaagcagaagatgatccacgagctgctggaccccaacagcagcttcagcgtggtgttcagctggagcatccagagaaacctgagcctgggcgccaagagcgagatcgccaccgacaagctgagcttccccctgaagaacatcaccagaaagaacatcgccaagatgatcgccggcaacagcaccgagagcagcaagacccccgtgaccatcgagaagatctacccctactacgtgaaggcccccagcgacagcaacagcaagcccatcaagcagctgctgagcgagaacaacttcatggacatcaccatcatcctgagcagagacaacaccaccaagtacaacagcgagtggtgggtgctgaacctgaccggcaacagaatctacaaccccaacagccaggccctggagctggtggtgttcaacgacaaggtgagcccccccagcctgggcttcctggccggctacggcatcatgggcctgtacgccagcgtggtgctggtgatcggcaagttcgtgagagagttcttcagcggcatcagccacagcatcatgttcgaggagctgcccaacgtggacagaatcctgaagctgtgcaccgacatcttcctggtgagagagaccggcgagctggagctggaggaggacctgtacgccaagctgatcttcctgtacagaagccccgagaccatgatcaagtggaccagagagaagaccaactag

SEQ ID NO: 211163 - DNA, 8259 bp, Artificial Sequence
  derived and/or modified sequence
atggccagcgaggtggtgtgcggcctgatcttcagactgctgctgcccatctgcctggccgtggcctgcgccttcagatacaacggcctgagcttcgtgtacctgatctacctgctgctgatccccctgttcagcgagcccaccaagaccaccatgcagggccacaccggcagactgctgaagagcctgtgcttcatcagcctgagcttcctgctgctgcacatcatcttccacatcaccctggtgagcctggaggcccagcacagaatcgcccccggctacaactgcagcacctgggagaagaccttcagacagatcggcttcgagagcctgaagggcgccgacgccggcaacggcatcagagtgttcgtgcccgacatcggcatgttcatcgccagcctgaccatctggctgctgtgcagaaacatcgtgcagaagcccgtgaccgacgaggccgcccagagcaaccccgagttcgagaacgaggagctggccgagggcgagaagatcgacagcgaggaggccctgatctacgaggaggacttcaacggcggcgacggcgtggagggcgagctggaggagagcaccaagctgaagatgttcagaagactggccagcgtggccagcaagctgaaggagttcatcggcaacatgatcaccaccgccggcaaggtggtggtgaccatcctgctgggcagcagcggcatgatgctgcccagcctgaccagcagcgtgtacttcttcgtgttcctgggcctgtgcacctggtggagctggtgcagaaccttcgaccccctgctgttcagctgcctgtgcgtgctgctggccatcttcaccgccggccacctgatcggcctgtacctgtaccagttccagttcttccaggaggccgtgccccccaacgactactacgccagactgttcggcatcaagagcgtgatccagaccgactgcagcagcacctggaagatcatcgtgaaccccgacctgagctggtaccaccacgccaaccccatcctgctgctggtgatgtactacaccctggccaccctgatcagaatctggctgcaggagcccctggtgcaggacgagggcaccaaggaggaggacaaggccctggcctgcagccccatccagatcaccgccggcagaagaagaagcctgtggtacgccacccactaccccaccgacgagagaaagctgctgagcatgacccaggacgactacaagcccagcgacggcctgctggtgaccgtgaacggcaaccccgtggactaccacaccatccaccccagcctgcccatggagaacggccccggcaaggccgacctgtacagcaccccccagtacagatgggagcccagcgacgagagcagcgagaagagagaggaggaggaggaggagaaggaggagttcgaggaggagagaagcagagaggagaagagaagcatcaaggtgcacgccatggtgagcgtgttccagttcatcatgaagcagagctacatctgcgccctgatcgccatgatggcctggagcatcacctaccacagctggctgaccttcgtgctgctgatctggagctgcaccctgtggatgatcagaaacagaagaaagtacgccatgatcagcagccccttcatggtggtgtacggcaacctgctgctgatcctgcagtacatctggagcttcgagctgcccgagatcaagaaggtgcccggcttcctggagaagaaggagcccggcgagctggccagcaagatcctgttcaccatcaccttctggctgctgctgagacagcacctgaccgagcagaaggccctgcaggagaaggaggccctgctgagcgaggtgaagatcggcagccaggagaacgaggagaaggacgaggagctgcaggacatccaggtggagggcgagcccaaggaggaggaggaggaggaggccaaggaggagaagcaggagagaaagaaggtggagcaggaggaggccgaggaggaggacgagcaggacatcatgaaggtgctgggcaacctggtggtggccatgttcatcaagtactggatctacgtgtgcggcggcatgttcttcttcgtgagcttcgagggcaagatcgtgatgtacaagatcatctacatggtgctgttcctgttctgcgtggccctgtaccaggtgcactacgagtggtggagaaagatcctgaagtacttctggatgagcgtggtgatctacaccatgctggtgctgatcttcatctacacctaccagttcgagaacttccccggcctgtggcagaacatgaccggcctgaagaaggagaagctggaggacctgggcctgaagcagttcaccgtggccgagctgttcaccagaatcttcatccccaccagcttcctgctggtgtgcatcctgcacctgcactacttccacgacagattcctggagctgaccgacctgaagagcatccccagcaaggaggacaacaccatctacagactggcccaccccgagggcagcctgcccgacctgaccatgatgcacctgaccgccagcctggagaagcccgaggtgagaaagctggccgagcccggcgaggagaagctggagggctacagcgagaaggcccagaagggcgacctgggcaaggacagcgaggagagcgaggaggacggcgaggaggaggaggagagcgaggaggaggaggagaccagcgacctgagaaacaagtggcacctggtgatcgacagactgaccgtgctgttcctgaagttcctggagtacttccacaagctgcaggtgttcatgtggtggatcctggagctgcacatcatcaagatcgtgagcagctacatcatctgggtgagcgtgaaggaggtgagcctgttcaactacgtgttcctgatcagctgggccttcgccctgccctacgccaagctgagaagactggccagcagcgtgtgcaccgtgtggacctgcgtgatcatcgtgtgcaagatgctgtaccagctgcagaccatcaagcccgagaacttcagcgtgaactgcagcctgcccaacgagaaccagaccaacatccccttcaacgagctgaacaagagcctgctgtacagcgcccccatcgaccccaccgagtgggtgggcctgagaaagagcagccccctgctggtgtacctgagaaacaacctgctgatgctggccatcctggccttcgaggtgaccatctacagacaccaggagtactacagaggcagaaacaacctgaccgcccccgtgagcagaaccatcttccacgacatcaccagactgcacctggacgacggcctgatcaactgcgccaagtacttcatcaactacttcttctacaagttcggcctggagacctgcttcctgatgagcgtgaacgtgatcggccagagaatggacttctacgccatgatccacgcctgctggctgatcgccgtgctgtacagaagaagaagaaaggccatcgccgagatctggcccaagtactgctgcttcctggcctgcatcatcaccttccagtacttcatctgcatcggcatcccccccgccccctgcagagactacccctggagattcaagggcgccagcttcaacgacaacatcatcaagtggctgtacttccccgacttcatcgtgagacccaaccccgtgttcctggtgtacgacttcatgctgctgctgtgcgccagcctgcagagacagatcttcgaggacgagaacaaggccgccgtgagaatcatggccggcgacaacgtggagatctgcatgaacctggacgccgccagcttcagccagcacaaccccgtgcccgacttcatccactgcagaagctacctggacatgagcaaggtgatcatcttcagctacctgttctggttcgtgctgaccatcatcttcatcaccggcaccaccagaatcagcatcttctgcatgggctacctggtggcctgcttctacttcctgctgttcggcggcgacctgctgctgaagcccatcaagagcatcctgagatactgggactggctgatcgcctacaacgtgttcgtgatcaccatgaagaacatcctgagcatcggcgcctgcggctacatcggcaccctggtgcacaacagctgctggctgatccaggccttcagcctggcctgcaccgtgaagggctaccagatgcccgccgccaacagcccctgcaccctgcccagcggcgaggccggcatcatctgggacagcatctgcttcgccttcctgctgctgcagagaagagtgttcatgagctactacttcctgcacgtggtggccgacatcaaggccagccagatcctggccagcagaggcgccgagctgttccaggccaccatcgtgaaggccgtgaaggccagaatcgaggaggagaagaagagcatggaccagctgaagagacagatggacagaatcaaggccagacagcagaagtacaagaagggcaaggagagaatgctgagcctgacccaggagcccggcgagggccaggacatgcagaagctgagcgaggaggacgacgagagagaggccgacaagcagaaggccaagggcaagaagaagcagtggtggagaccctgggtggaccacgccagcatggtgagaagcggcgactactacctgttcgagaccgacagcgaggaggaggaggaggaggagctgaagaaggaggacgaggagccccccagaagaagcgccttccagttcgtgtaccaggcctggatcaccgaccccaagaccgccctgagacagagacacaaggagaagaagagaagcgccagagaggagagaaagagaagaagaaagggcagcaaggagggccccgtggagtgggaggacagagaggacgagcccatcaagaagaagagcgacggccccgacaacatcatcaagagaatcttcaacatcctgaagttcacctgggtgctgttcctggccaccgtggacagcttcaccacctggctgaacagcatcagcagagagcacatcgacatcagcaccgtgctgagaatcgagagatgcatgctgaccagagagatcaagaagggcaacgtgcccaccagagagagcatccacatgtactaccagaaccacatcatgaacctgagcagagagagcggcctggacaccatcgacgagcaccccggcgccgccagcggcgcccagaccgcccacagaatggacagcctggacagccacgacagcatcagcagcgagcccacccagtgcaccatgctgtacagcagacagggcaccaccgagaccatcgaggaggtggaggccgagcaggaggaggaggccggcagcaccgcccccgagcccagagaggccaaggagtacgaggccaccggctacgacgtgggcgccatgggcgccgaggaggccagcctgacccccgaggaggagctgacccagttcagcaccctggacggcgacgtggaggccccccccagctacagcaaggccgtgagcttcgagcacctgagcttcggcagccaggacgacagcgccggcaagaacagaatggccgtgagccccgacgacagcagaaccgacaagctgggcagcagcatcctgccccccctgacccacgagctgaccgccagcgagctgctgctgaagaagatgttccacgacgacgagctggaggagagcgagaagttctacgtgggccagcccagattcctgctgctgttctacgccatgtacaacaccctggtggccagaagcgagatggtgtgctacttcgtgatcatcctgaaccacatggtgagcgccagcatgatcaccctgctgctgcccatcctgatcttcctgtgggccatgctgagcgtgcccagacccagcagaagattctggatgatggccatcgtgtacaccgaggtggccatcgtggtgaagtacttcttccagttcggcttcttcccctggaacaagaacgtggaggtgaacaaggacaagccctaccacccccccaacatcatcggcgtggagaagaaggagggctacgtgctgtacgacctgatccagctgctggccctgttcttccacagaagcatcctgaagtgccacggcctgtgggacgaggacgacatgaccgagagcggcatggccagagaggagagcgacgacgagctgagcctgggccacggcagaagagacagcagcgacagcctgaagagcatcaacctggccgccagcgtggagagcgtgcacgtgaccttccccgagcagcagaccgccgtgagaagaaagagaagcggcagcagcagcgagcccagccagagaagcagcttcagcagcaacagaagccagagaggcagcaccagcaccagaaacagcagccagaagggcagcagcgtgctgagcatcaagcagaagggcaagagagagctgtacatggagaagctgcaggagcacctgatcaaggccaaggccttcaccatcaagaagaccctggagatctacgtgcccatcaagcagttcttctacaacctgatccaccccgagtacagcgccgtgaccgacgtgtacgtgctgatgttcctggccgacaccgtggacttcatcatcatcgtgttcggcttctgggccttcggcaagcacagcgccgccgccgacatcaccagcagcctgagcgaggaccaggtgcccggccccttcctggtgatggtgctgatccagttcggcaccatggtggtggacagagccctgtacctgagaaagaccgtgctgggcaaggtgatcttccaggtgatcctggtgttcggcatccacttctggatgttcttcatcctgcccggcgtgaccgagagaaagttcagccagaacctggtggcccagctgtggtacttcgtgaagtgcgtgtacttcggcctgagcgcctaccagatcagatgcggctaccccaccagagtgctgggcaacttcctgaccaagagctacaactacgtgaacctgttcctgttccagggcttcagactggtgcccttcctgaccgagctgagagccgtgatggactgggtgtggaccgacaccaccctgagcctgagcagctggatctgcgtggaggacatctacgcccacatcttcatcctgaagtgctggagagagagcgagaagagatacccccagcccagaggccagaagaagaagaaggtggtgaagtacggcatgggcggcatgatcatcgtgctgctgatctgcatcgtgtggttccccctgctgttcatgagcctgatcaagagcgtggccggcgtgatcaaccagcccctggacgtgagcgtgaccatcaccctgggcggctaccagcccatcttcaccatgagcgcccagcagagccagctgaaggtgatggaccagcagagcttcaacaagttcatccaggccttcagcagagacaccggcgccatgcagttcctggagaactacgagaaggaggacatcaccgtggccgagctggagggcaacagcaacagcctgtggaccatcagcccccccagcaagcagaagatgatccacgagctgctggaccccaacagcagcttcagcgtggtgttcagctggagcatccagagaaacctgagcctgggcgccaagagcgagatcgccaccgacaagctgagcttccccctgaagaacatcaccagaaagaacatcgccaagatgatcgccggcaacagcaccgagagcagcaagacccccgtgaccatcgagaagatctacccctactacgtgaaggcccccagcgacagcaacagcaagcccatcaagcagctgctgagcgagaacaacttcatggacatcaccatcatcctgagcagagacaacaccaccaagtacaacagcgagtggtgggtgctgaacctgaccggcaacagaatctacaaccccaacagccaggccctggagctggtggtgttcaacgacaaggtgagcccccccagcctgggcttcctggccggctacggcatcatgggcctgtacgccagcgtggtgctggtgatcggcaagttcgtgagagagttcttcagcggcatcagccacagcatcatgttcgaggagctgcccaacgtggacagaatcctgaagctgtgcaccgacatcttcctggtgagagagaccggcgagctggagctggaggaggacctgtacgccaagctgatcttcctgtacagaagccccgagaccatgatcaagtggaccagagagaagaccaactag

SEQ ID NO: 211164 - DNA, 1941 bp, Artificial Sequence
  derived and/or modified sequence
atgaccgagagcggcatggccagagaggagagcgacgacgagctgagcctgggccacggcagaagagacagcagcgacagcctgaagagcatcaacctggccgccagcgtggagagcgtgcacgtgaccttccccgagcagcagaccgccgtgagaagaaagagaagcggcagcagcagcgagcccagccagagaagcagcttcagcagcaacagaagccagagaggcagcaccagcaccagaaacagcagccagaagggcagcagcgtgctgagcatcaagcagaagggcaagagagagctgtacatggagaagctgcaggagcacctgatcaaggccaaggccttcaccatcaagaagaccctggagatctacgtgcccatcaagcagttcttctacaacctgatccaccccgagtacagcgccgtgaccgacgtgtacgtgctgatgttcctggccgacaccgtggacttcatcatcatcgtgttcggcttctgggccttcggcaagcacagcgccgccgccgacatcaccagcagcctgagcgaggaccaggtgcccggccccttcctggtgatggtgctgatccagttcggcaccatggtggtggacagagccctgtacctgagaaagaccgtgctgggcaaggtgatcttccaggtgatcctggtgttcggcatccacttctggatgttcttcatcctgcccggcgtgaccgagagaaagttcagccagaacctggtggcccagctgtggtacttcgtgaagtgcgtgtacttcggcctgagcgcctaccagatcagatgcggctaccccaccagagtgctgggcaacttcctgaccaagagctacaactacgtgaacctgttcctgttccagggcttcagactggtgcccttcctgaccgagctgagagccgtgatggactgggtgtggaccgacaccaccctgagcctgagcagctggatctgcgtggaggacatctacgcccacatcttcatcctgaagtgctggagagagagcgagaagcccatcttcaccatgagcgcccagcagagccagctgaaggtgatggaccagcagagcttcaacaagttcatccaggccttcagcagagacaccggcgccatgcagttcctggagaactacgagaaggaggacatcaccgtggccgagctggagggcaacagcaacagcctgtggaccatcagcccccccagcaagcagaagatgatccacgagctgctggaccccaacagcagcttcagcgtggtgttcagctggagcatccagagaaacctgagcctgggcgccaagagcgagatcgccaccgacaagctgagcttccccctgaagaacatcaccagaaagaacatcgccaagatgatcgccggcaacagcaccgagagcagcaagacccccgtgaccatcgagaagatctacccctactacgtgaaggcccccagcgacagcaacagcaagcccatcaagcagctgctgagcgagaacaacttcatggacatcaccatcatcctgagcagagacaacaccaccaagtacaacagcgagtggtgggtgctgaacctgaccggcaacagaatctacaaccccaacagccaggccctggagctggtggtgttcaacgacaaggtgagcccccccagcctgggcttcctggccggctacggcatcatgggcctgtacgccagcgtggtgctggtgatcggcaagttcgtgagagagttcttcagcggcatcagccacagcatcatgttcgaggagctgcccaacgtggacagaatcctgaagctgtgcaccgacatcttcctggtgagagagaccggcgagctggagctggaggaggacctgtacgccaagctgatcttcctgtacagaagccccgagaccatgatcaagtggaccagagagaagaccaactag

SEQ ID NO: 211165 - DNA, 2130 bp, Artificial Sequence
  derived and/or modified sequence
atgaccgagagcggcatggccagagaggagagcgacgacgagctgagcctgggccacggcagaagagacagcagcgacagcctgaagagcatcaacctggccgccagcgtggagagcgtgcacgtgaccttccccgagcagcagaccgccgtgagaagaaagagaagcggcagcagcagcgagcccagccagagaagcagcttcagcagcaacagaagccagagaggcagcaccagcaccagaaacagcagccagaagggcagcagcgtgctgagcatcaagcagaagggcaagagagagctgtacatggagaagctgcaggagcacctgatcaaggccaaggccttcaccatcaagaagaccctggagatctacgtgcccatcaagcagttcttctacaacctgatccaccccgagtacagcgccgtgaccgacgtgtacgtgctgatgttcctggccgacaccgtggacttcatcatcatcgtgttcggcttctgggccttcggcaagcacagcgccgccgccgacatcaccagcagcctgagcgaggaccaggtgcccggccccttcctggtgatggtgctgatccagttcggcaccatggtggtggacagagccctgtacctgagaaagaccgtgctgggcaaggtgatcttccaggtgatcctggtgttcggcatccacttctggatgttcttcatcctgcccggcgtgaccgagagaaagttcagccagaacctggtggcccagctgtggtacttcgtgaagtgcgtgtacttcggcctgagcgcctaccagatcagatgcggctaccccaccagagtgctgggcaacttcctgaccaagagctacaactacgtgaacctgttcctgttccagggcttcagactggtgcccttcctgaccgagctgagagccgtgatggactgggtgtggaccgacaccaccctgagcctgagcagctggatctgcgtggaggacatctacgcccacatcttcatcctgaagtgctggagagagagcgagaagagatacccccagcccagaggccagaagaagaagaaggtggtgaagtacggcatgggcggcatgatcatcgtgctgctgatctgcatcgtgtggttccccctgctgttcatgagcctgatcaagagcgtggccggcgtgatcaaccagcccctggacgtgagcgtgaccatcaccctgggcggctaccagcccatcttcaccatgagcgcccagcagagccagctgaaggtgatggaccagcagagcttcaacaagttcatccaggccttcagcagagacaccggcgccatgcagttcctggagaactacgagaaggaggacatcaccgtggccgagctggagggcaacagcaacagcctgtggaccatcagcccccccagcaagcagaagatgatccacgagctgctggaccccaacagcagcttcagcgtggtgttcagctggagcatccagagaaacctgagcctgggcgccaagagcgagatcgccaccgacaagctgagcttccccctgaagaacatcaccagaaagaacatcgccaagatgatcgccggcaacagcaccgagagcagcaagacccccgtgaccatcgagaagatctacccctactacgtgaaggcccccagcgacagcaacagcaagcccatcaagcagctgctgagcgagaacaacttcatggacatcaccatcatcctgagcagagacaacaccaccaagtacaacagcgagtggtgggtgctgaacctgaccggcaacagaatctacaaccccaacagccaggccctggagctggtggtgttcaacgacaaggtgagcccccccagcctgggcttcctggccggctacggcatcatgggcctgtacgccagcgtggtgctggtgatcggcaagttcgtgagagagttcttcagcggcatcagccacagcatcatgttcgaggagctgcccaacgtggacagaatcctgaagctgtgcaccgacatcttcctggtgagagagaccggcgagctggagctggaggaggacctgtacgccaagctgatcttcctgtacagaagccccgagaccatgatcaagtggaccagagagaagaccaactag

SEQ ID NO: 211166 - protein, 1181 aa, Artificial Sequence
  derived and/or modified sequence
MAAVQVVGSWPSVQPREAPREAIPERGNGFRLLSARLCALRPDDSSSARTEIHLLFDQLISENYSEGSGVAPEDVSALLVQACRLVPLNQNHLVSKVSQLIHHLLNRLQVIVDEQHLDFLLAYTISAIHQCSSWTHREILQALAALVYCNGSKCQKYLPELLGNTGLLMKLSDLAQSDPEVRRAAVHCMANLCLSVPGQPYLEEPYQNVCFQAFLTILQSPKSSDMDDITFCMLLQNALKGIQSLLNGGRMKLTQTDELGALLAVLKKFMFHGLPGLNIEMPTVLYPTPLPQYDGRTPIKPQQSESSASRPTLNKKKKSKVKPKKIQQGEEEEKESSGEIEAAPVTGTGRVNLHEGNTWCPSSLGVQSLPLDGSGAAEKDGVSSSFSSSSWKRVSSSESDFSDAEGGMQSKMRSYQAKVRQGALVCFLSTIKSIEKKVLYGYWSAFIPDTPELGSPQSVSLMTLTLKDPSPKTRACALQVLSAILEGSKQFLSVAEDTSDHRRAFTPFSVMIACSIRELHRCLLLALVAESSSQTVTQIIKCLANLVSNAPYDRLKLSLLTKVWNQIKPYIRHKDVNVRVSSLTLLGAIVSTHAPLPEVQLLLQQPCSSGLGNSNSATPHLSPPDWWKKAPAGPSLEETSVSSPKGSSEPCWLIRLCISIVVLPKEDSCSGSDAGSAAGSTYEPSPMRLEALQVLTLLARGYFSMTQAYLMELGEVICKCMGEADPSIQLHGAKLLEELGTGLIQQYKPDSTAAPDQRAPVFLVVMFWTMMLNGPLPRALQNSEHPTLQASACDALSSILPEAFSNLPNDRQMLCITVLLGLNDSKNRLVKAATSRALGVYVLFPCLRQDVIFVADAANAILMSLEDKSLNVRAKAAWSLGNLTDTLIVNMETPDPSFQEEFSGLLLLKMLRSAIEASKDKDKVKSNAVRALGNLLHFLQPSHIEKPTFAEIIEESIQALISTVLTEAAMKVRWNACYAMGNVFKNPALPLGTAPWTSQAYNALTSVVTSCKNFKVRIRSAAALSVPGKREQYGSVDQYARIWNALVTALQKSEDTIDFLEFKYCVSLRTQICQALIHLLSLASASDLPCMKETLELSGNMVQSYILQFLKSGAEGDDTGAPHSPQERDQMVRMALKHMGSIQAPTGDTARRAIMGFLEEILAVCFDSSGSQGALPGLTNQ

SEQ ID NO: 211167 - protein, 916 aa, Artificial Sequence [sequence omitted]

SEQ ID NO: 211168 - DNA, 3546 bp, Artificial Sequence
  derived and/or modified sequence
atggccgccgtgcaggtggtgggcagctggcccagcgtgcagcccagagaggcccccagagaggccatccccgagagaggcaacggcttcagactgctgagcgccagactgtgcgccctgagacccgacgacagcagcagcgccagaaccgagatccacctgctgttcgaccagctgatcagcgagaactacagcgagggcagcggcgtggcccccgaggacgtgagcgccctgctggtgcaggcctgcagactggtgcccctgaaccagaaccacctggtgagcaaggtgagccagctgatccaccacctgctgaacagactgcaggtgatcgtggacgagcagcacctggacttcctgctggcctacaccatcagcgccatccaccagtgcagcagctggacccacagagagatcctgcaggccctggccgccctggtgtactgcaacggcagcaagtgccagaagtacctgcccgagctgctgggcaacaccggcctgctgatgaagctgagcgacctggcccagagcgaccccgaggtgagaagagccgccgtgcactgcatggccaacctgtgcctgagcgtgcccggccagccctacctggaggagccctaccagaacgtgtgcttccaggccttcctgaccatcctgcagagccccaagagcagcgacatggacgacatcaccttctgcatgctgctgcagaacgccctgaagggcatccagagcctgctgaacggcggcagaatgaagctgacccagaccgacgagctgggcgccctgctggccgtgctgaagaagttcatgttccacggcctgcccggcctgaacatcgagatgcccaccgtgctgtaccccacccccctgccccagtacgacggcagaacccccatcaagccccagcagagcgagagcagcgccagcagacccaccctgaacaagaagaagaagagcaaggtgaagcccaagaagatccagcagggcgaggaggaggagaaggagagcagcggcgagatcgaggccgcccccgtgaccggcaccggcagagtgaacctgcacgagggcaacacctggtgccccagcagcctgggcgtgcagagcctgcccctggacggcagcggcgccgccgagaaggacggcgtgagcagcagcttcagcagcagcagctggaagagagtgagcagcagcgagagcgacttcagcgacgccgagggcggcatgcagagcaagatgagaagctaccaggccaaggtgagacagggcgccctggtgtgcttcctgagcaccatcaagagcatcgagaagaaggtgctgtacggctactggagcgccttcatccccgacacccccgagctgggcagcccccagagcgtgagcctgatgaccctgaccctgaaggaccccagccccaagaccagagcctgcgccctgcaggtgctgagcgccatcctggagggcagcaagcagttcctgagcgtggccgaggacaccagcgaccacagaagagccttcacccccttcagcgtgatgatcgcctgcagcatcagagagctgcacagatgcctgctgctggccctggtggccgagagcagcagccagaccgtgacccagatcatcaagtgcctggccaacctggtgagcaacgccccctacgacagactgaagctgagcctgctgaccaaggtgtggaaccagatcaagccctacatcagacacaaggacgtgaacgtgagagtgagcagcctgaccctgctgggcgccatcgtgagcacccacgcccccctgcccgaggtgcagctgctgctgcagcagccctgcagcagcggcctgggcaacagcaacagcgccaccccccacctgagcccccccgactggtggaagaaggcccccgccggccccagcctggaggagaccagcgtgagcagccccaagggcagcagcgagccctgctggctgatcagactgtgcatcagcatcgtggtgctgcccaaggaggacagctgcagcggcagcgacgccggcagcgccgccggcagcacctacgagcccagccccatgagactggaggccctgcaggtgctgaccctgctggccagaggctacttcagcatgacccaggcctacctgatggagctgggcgaggtgatctgcaagtgcatgggcgaggccgaccccagcatccagctgcacggcgccaagctgctggaggagctgggcaccggcctgatccagcagtacaagcccgacagcaccgccgcccccgaccagagagcccccgtgttcctggtggtgatgttctggaccatgatgctgaacggccccctgcccagagccctgcagaacagcgagcaccccaccctgcaggccagcgcctgcgacgccctgagcagcatcctgcccgaggccttcagcaacctgcccaacgacagacagatgctgtgcatcaccgtgctgctgggcctgaacgacagcaagaacagactggtgaaggccgccaccagcagagccctgggcgtgtacgtgctgttcccctgcctgagacaggacgtgatcttcgtggccgacgccgccaacgccatcctgatgagcctggaggacaagagcctgaacgtgagagccaaggccgcctggagcctgggcaacctgaccgacaccctgatcgtgaacatggagacccccgaccccagcttccaggaggagttcagcggcctgctgctgctgaagatgctgagaagcgccatcgaggccagcaaggacaaggacaaggtgaagagcaacgccgtgagagccctgggcaacctgctgcacttcctgcagcccagccacatcgagaagcccaccttcgccgagatcatcgaggagagcatccaggccctgatcagcaccgtgctgaccgaggccgccatgaaggtgagatggaacgcctgctacgccatgggcaacgtgttcaagaaccccgccctgcccctgggcaccgccccctggaccagccaggcctacaacgccctgaccagcgtggtgaccagctgcaagaacttcaaggtgagaatcagaagcgccgccgccctgagcgtgcccggcaagagagagcagtacggcagcgtggaccagtacgccagaatctggaacgccctggtgaccgccctgcagaagagcgaggacaccatcgacttcctggagttcaagtactgcgtgagcctgagaacccagatctgccaggccctgatccacctgctgagcctggccagcgccagcgacctgccctgcatgaaggagaccctggagctgagcggcaacatggtgcagagctacatcctgcagttcctgaagagcggcgccgagggcgacgacaccggcgccccccacagcccccaggagagagaccagatggtgagaatggccctgaagcacatgggcagcatccaggcccccaccggcgacaccgccagaagagccatcatgggcttcctggaggagatcctggccgtgtgcttcgacagcagcggcagccagggcgccctgcccggcctgaccaaccagtag

SEQ ID NO: 211169 - DNA, 2751 bp, Artificial Sequence
  derived and/or modified sequence
atgagcaagtacctgcccgagctgctgggcaacaccggcctgctgatgaagctgagcgacctggcccagagcgaccccgaggtgagaagagccgccgtgcactgcatggccaacctgtgcctgagcgtgcccggccagccctacctggaggagccctaccagaacgtgtgcttccaggccttcctgaccatcctgcagagccccaagagcagcgacatggacgacatcaccttctgcatgctgctgcagaacgccctgaagggcatccagagcctgctgaacggcggcagaatgaagctgacccagaccgacgagctgggcgccctgctggccgtgctgaagaagttcatgttccacggcctgcccggcctgaacatcgagatgcccaccgtgctgtaccccacccccctgccccagtacgacggcagaacccccatcaagccccagcagagcgagagcagcgccagcagacccaccctgaacaagaagaagaagagcaaggtgaagcccaagaagatccagcagggcgaggaggaggagaaggagagcagcggcgagatcgaggccgcccccgtgaccggcaccggcagagtgaacctgcacgagggcaacacctggtgccccagcagcctgggcgtgcagagcctgcccctggacggcagcggcgccgccgagaaggacggcgtgagcagcagcttcagcagcagcagctggaagagagtgagcagcagcgagagcgacttcagcgacgccgagggcggcatgcagagcaagatgagaagctaccaggccaaggtgagacagggcgccctggtgtgcttcctgagcaccatcaagagcatcgagaagaaggtgctgtacggctactggagcgccttcatccccgacacccccgagctgggcagcccccagagcgtgagcctgatgaccctgaccctgaaggaccccagccccaagaccagagcctgcgccctgcaggtgctgagcgccatcctggagggcagcaagcagttcctgagcgtggccgaggacaccagcgaccacagaagagccttcacccccttcagcgtgatgatcgcctgcagcatcagagagctgcacagatgcctgctgctggccctggtggccgagagcagcagccagaccgtgacccagatcatcaagtgcctggccaacctggtgagcaacgccccctacgacagactgaagctgagcctgctgaccaaggtgtggaaccagatcaagccctacatcagacacaaggacgtgaacgtgagagtgagcagcctgaccctgctgggcgccatcgtgagcacccacgcccccctgcccgaggtgcagctgctgctgcagcagccctgcagcagcggcctgggcaacagcaacagcgccaccccccacctgagcccccccgactggtggaagaaggcccccgccggccccagcctggaggagaccagcgtgagcagccccaagggcagcagcgagccctgctggctgatcagactgtgcatcagcatcgtggtgctgcccaaggaggacagctgcagcggcagcgacgccggcagcgccgccggcagcacctacgagcccagccccatgagactggaggccttcagcaacctgcccaacgacagacagatgctgtgcatcaccgtgctgctgggcctgaacgacagcaagaacagactggtgaaggccgccaccagcagagccctgggcgtgtacgtgctgttcccctgcctgagacaggacgtgatcttcgtggccgacgccgccaacgccatcctgatgagcctggaggacaagagcctgaacgtgagagccaaggccgcctggagcctgggcaacctgaccgacaccctgatcgtgaacatggagacccccgaccccagcttccaggaggagttcagcggcctgctgctgctgaagatgctgagaagcgccatcgaggccagcaaggacaaggacaaggtgaagagcaacgccgtgagagccctgggcaacctgctgcacttcctgcagcccagccacatcgagaagcccaccttcgccgagatcatcgaggagagcatccaggccctgatcagcaccgtgctgaccgaggccgccatgaaggtgagatggaacgcctgctacgccatgggcaacgtgttcaagaaccccgccctgcccctgggcaccgccccctggaccagccaggcctacaacgccctgaccagcgtggtgaccagctgcaagaacttcaaggtgagaatcagaagcgccgccgccctgagcgtgcccggcaagagagagcagtacggcagcgtggaccagtacgccagaatctggaacgccctggtgaccgccctgcagaagagcgaggacaccatcgacttcctggagttcaagtactgcgtgagcctgagaacccagatctgccaggccctgatccacctgctgagcctggccagcgccagcgacctgccctgcatgaaggagaccctggagctgagcggcaacatggtgcagagctacatcctgcagttcctgaagagcggcgccgagggcgacgacaccggcgccccccacagcccccaggagagagaccagatggtgagaatggccctgaagcacatgggcagcatccaggcccccaccggcgacaccgccagaagagccatcatgggcttcctggaggagatcctggccgtgtgcttcgacagcagcggcagccagggcgccctgcccggcctgaccaaccagtag

SEQ ID NO: 211170 - DNA, 3546 bp, Artificial Sequence
  derived and/or modified sequence
atggctgcagtgcaggtggtggggagttggccctcagtccagcccagggaggcacctcgggaagcgatcccggaacgcgggaacggctttagattactgtctgctcgactgtgtgctctgaggcctgatgattccagtagtgccagaacggaaatacacttactgtttgatcaattgatttccgaaaattactccgaagggtccggcgtggctcccgaagacgttagcgctttacttgtgcaggcctgcaggctggtcccattgaatcagaaccatcttgtgagcaaagtgtcccagctgatccaccatctgttaaatagactgcaagtgattgtcgatgaacaacacctggattttctgttggcttacactatttctgctattcaccagtgctcttcatggacccatcgggagattctgcaggctttagctgccctcgtctactgcaacggatccaaatgccagaaatatctccctgagttgctggggaataccggactgctgatgaagctcagcgatctggcccagagtgaccctgaagtgcggcgggcagcggttcattgtatggccaacttatgtctgagcgtccctggtcagccgtatctggaagagccctatcagaacgtctgctttcaggccttccttacaattttgcagagtccaaagagcagtgacatggatgatattaccttctgtatgctgcttcaaaacgccctgaaaggcatccagagcttattgaacgggggaagaatgaagttgactcagacagatgaattaggtgccctgctcgccgtcctcaagaaatttatgttccacggccttcccggcctgaatattgaaatgcccactgttttgtatcccactcctctccctcaatacgatggaaggacacctattaagccccagcagtcagagtcgtctgccagcaggcctactctgaacaaaaaaaagaagtccaaagtaaagccaaagaaaattcagcagggcgaggaagaggagaaagagtctagcggtgaaatcgaagcagctcctgtcaccggaacgggccgggtcaatctgcatgagggcaatacctggtgcccaagtagcttgggtgttcagagcctacctctagacggctccggtgcggctgaaaaagatggggtgagcagcagcttttcatcctcaagttggaaacgagtgagctcgtctgagtctgactttagcgacgcagagggagggatgcagtctaagatgaggtcatatcaggctaaggtgcggcagggtgcccttgtttgctttctgtccaccattaagagcatcgaaaaaaaagttctgtacggctactggtccgcatttattcctgatactcccgagttagggtcacctcagtccgtttcactgatgactctgacactgaaggacccttcccctaaaaccagagcttgcgcgctccaggtactgtccgccatattggagggcagtaagcagtttttaagtgtggcagaagatactagtgaccatcggagggcctttactcccttctctgtgatgatagcttgcagtatcagagaactgcatcggtgtctgctccttgctttggtggccgagtccagctctcagaccgttactcagattattaaatgcctggccaacctggtttcaaatgccccctacgatagactcaagttgtctctgctgactaaggtgtggaatcagatcaagccatacatccgacataaagacgttaatgtgcgagtgtctagcctgacactgttgggtgcaatcgtcagcacacacgcacctctcccggaagtgcagctcctgttacagcagccatgcagcagtggcttgggcaacagtaatagtgcgacgcctcacctgtcaccccccgactggtggaagaaggcaccagctggaccgtcactggaagagacttcagtatcttccccaaaaggtagttccgagccatgttggctgattcgcctgtgcatttctattgtcgtcctgcccaaggaggattcatgtagtggctcagacgccggcagcgccgccggaagtacgtacgagccgtcaccaatgcgcctagaggccctgcaggtactaacgctgctggcacgggggtatttttccatgacccaagcttacctgatggaacttggggaagtcatctgcaaatgtatgggtgaagccgatccgtctattcagctgcatggagctaagcttctggaagagctgggaactggattaatccaacaatacaagcctgacagtaccgcagccccagatcagcgcgcccctgtcttcctggtggtgatgttctggacaatgatgctcaatggccctctccccagagctcttcaaaacagcgaacatccaacactccaagcttctgcgtgcgacgcgctgtcatctatcctcccggaagcgtttagtaaccttcctaacgaccggcagatgctttgtattactgtgttactcgggctgaacgacagtaaaaatcggcttgtcaaagcagctacgtcccgggccctgggcgtgtacgtgctattcccttgcctcaggcaagatgtgattttcgtggccgacgctgcaaatgccatcctgatgtccctggaggacaaatctctcaacgtacgcgcgaaggcggcttggagtcttggcaaccttacagacaccctcatagtaaacatggagactccagatcccagttttcaggaggaattttctgggctgcttttactgaagatgctgagatccgccattgaagcttccaaggataaggacaaggtgaaatccaacgcggtacgggctctgggtaacctgctgcactttcttcaaccttcacatatcgagaagcccactttcgcagagatcatcgaagagtctattcaggcattgatttcaacggttctcacagaagcagcgatgaaagtgagatggaatgcctgctacgctatgggaaatgtattcaaaaatcctgctctgccgctgggaactgccccttggacttcacaagcatacaatgcactcacctcagtggtgaccagttgcaaaaactttaaagtaagaatcagaagtgcagctgcactgagtgtgcccggaaagagggaacaatatggcagtgtggatcagtacgcgcgtatttggaacgccctagtaactgctttgcaaaagagcgaggacaccatcgatttcctcgagttcaaatactgtgttagcctacgcactcagatttgccaggcactcattcatttactgagtttggcttctgcatccgatctgccgtgcatgaaagagacacttgagctgagtgggaacatggtgcagtcgtacatcctgcagttcctgaaaagcggtgctgaaggggatgatactggcgccccgcattccccacaggaacgggaccagatggtgcgaatggccctgaaacacatgggttctattcaggctccaaccggggatacggcccggcgtgcaattatggggttcttggaggaaattttagcagtgtgctttgactcttcgggaagtcagggggccctccctgggctgaccaaccagtag

SEQ ID NO: 211171 - DNA, 2751 bp, Artificial Sequence
  derived and/or modified sequence
atgtcgaaatacctaccagaactgctaggaaacacgggcctgttgatgaagctgtcagacttggcacagagcgacccagaggtcaggagggctgctgtgcattgcatggcaaatctttgtttgagcgtgcctggacagccctatctagaggagccctaccagaacgtgtgtttccaggcattcctcacaatcctgcagtcaccgaaatcctccgatatggacgatattacattttgcatgttgttgcagaacgctcttaaagggatacagtctcttctgaacgggggtaggatgaaattaactcagacagacgaactgggagcccttctggcagtactcaaaaaatttatgtttcacggcctaccgggcctgaatatagagatgcccacagtgctgtacccaacaccgctgccacaatatgacggcaggactcccatcaagccacagcaatccgagtccagtgcttctcgaccaaccctgaacaagaagaaaaagtccaaagtgaagcctaagaaaattcaacagggcgaagaagaggagaaagagtcctctggcgagatcgaggcggctcccgtcaccggcacgggccgtgtgaatctgcatgagggcaacacgtggtgtccctcctccctgggggtgcagagcttacctttagatggctcgggcgcggcagaaaaagacggggtctccagctctttttctagctcatcttggaagcgggtgtcaagctctgagtcggacttctccgacgctgaggggggaatgcaatcaaagatgaggtcctatcaggcgaaggtcaggcagggcgcactggtttgtttcctgtcgacaatcaaatccatcgaaaaaaaggtcctgtatggctactggtcggcgttcatcccagatacgccggaactgggatcacctcagagcgtctctctgatgaccctaactctgaaagatccttctccaaagacacgggcttgcgcccttcaggtgcttagcgccattctggaggggagcaagcagttcctcagtgtcgcggaagacacttccgaccaccgccgggcctttactcccttcagcgtgatgatcgcatgtagcatacgggagctccacaggtgtctcctgcttgcgctggttgccgaaagctcctctcaaactgtcacccagatcatcaagtgcctggcgaacctggtctccaatgctccatacgacagattgaaactttccttgctaaccaaggtttggaatcagatcaagccttacattagacacaaggatgtgaatgttagagtctctagccttactctcctgggcgccattgtgtcgacacatgccccattgcctgaggtgcaactgctgctccaacaaccttgctcttcaggcctgggcaactccaatagtgccactcctcatttgtctccccccgattggtggaaaaaagcacccgctgggcctagtctcgaggagactagtgtgtccagccccaagggctcgagtgaaccttgctggttgatccgattgtgcattagcatcgttgtgctccctaaggaggacagctgctccggatctgatgccgggtctgcggccggatctacctatgaacccagccccatgagactcgaggcattcagcaacttacccaacgacagacagatgctgtgcataactgtcttgctcggtctgaacgattctaaaaataggctggtaaaggccgctacctccagagccttaggtgtttacgttctctttccgtgtcttaggcaggatgttatattcgtcgccgatgcagcaaacgccattttgatgagtctggaggacaaaagtctgaatgttagggctaaggcagcctggtcactggggaatcttacagacacacttatagtcaacatggagactcccgacccatcgttccaggaggaatttagcggtctgctgctcctgaagatgctcaggtcagcgatcgaggcctctaaagacaaagacaaagttaagtccaatgccgtgcgggcactgggaaacctcctacacttcctgcaaccctcacacattgagaagccaacgtttgctgagattatcgaggaatccattcaagcactgatctctacagtcctcaccgaagctgctatgaaggtgagatggaatgcgtgctatgccatggggaatgtcttcaagaatccagctttaccgttaggtaccgcgccctggacttcccaggcttacaatgctttgacatccgttgtcacctcatgtaaaaactttaaggtgcgcattcggagcgcagccgctctgtccgtacccggtaaacgggaacagtatggcagtgttgaccagtacgcaaggatttggaacgcactagtgaccgccctccagaagtcggaggacaccattgatttcctggaatttaagtattgtgtgagtctcagaactcaaatatgtcaagcccttattcacctgcttagtctggcatctgcatcggatctaccctgtatgaaagaaaccctggagttatctggcaacatggtgcaaagctacatccttcagtttcttaaaagtggcgcagagggcgacgacaccggcgcccctcactccccgcaggaaagagatcagatggtgcgcatggccctcaagcatatggggtcaatccaagcacctactggtgacacagccagaagagccatcatggggtttttggaggagatcttggcggtctgctttgatagtagcgggagtcaaggagctctgcctggacttaccaatcagtag

SEQ ID NO: 211172 - DNA, 3546 bp, Artificial Sequence
  derived and/or modified sequence
atggctgctgtgcaggtggtgggctcctggcccagcgtgcagccccgggaggccccccgggaggccatccctgagagaggaaatggcttccggctgctgagcgcccggctgtgtgccctgcggccagatgacagcagcagcgccaggacagagatccacctgctgtttgaccagctgatcagcgagaactacagcgagggcagcggcgtggccccagaagatgtgtctgccctgctggtgcaggcctgccgcctggtgcccctgaaccagaaccacctggtgtccaaggtgtcccagctgatccaccacctgctgaaccggctgcaggtgattgtggatgagcagcacctggacttcctgctggcctacaccatcagcgccatccaccagtgcagctcctggacccaccgggagatcctgcaggccctggccgccctggtgtactgcaatggcagcaagtgccagaagtacctgcctgagctgctgggcaacacaggcctgctgatgaagctgagtgacctggcccagagcgaccctgaggtgcggcgggctgctgtgcactgcatggccaacctgtgcctgtctgtgcccggccagccctacctggaggagccctaccagaatgtgtgcttccaggccttcctgaccatcctgcagagccccaagagcagtgacatggatgacatcaccttctgcatgctgctgcagaatgccctgaagggcatccagagcctgctgaatggaggccgcatgaagctgacccagacagatgagctgggcgccctgctggccgtgctgaagaagttcatgttccacggcctgcccggcctgaacatcgagatgcccaccgtgctgtaccccacccccctgccccagtatgatggccgcacccccatcaagccccagcagagcgagagcagcgccagccggcccaccctgaacaagaagaagaagagcaaggtgaagcccaagaagatccagcagggcgaggaggaggagaaggagagcagtggagaaattgaggccgcccctgtgacaggcaccggccgggtgaacctgcacgagggcaacacctggtgccccagcagcctgggcgtgcagagcctgcccctggatggcagcggggctgctgagaaggatggagtgagcagcagcttcagcagcagctcctggaagagggtgagcagcagcgagagtgacttcagtgatgctgagggcggcatgcagagcaagatgaggagctaccaggccaaggtgcggcagggcgccctggtgtgcttcctgagcaccatcaagagcattgagaagaaggtgctgtatggctactggagcgccttcatcccagacaccccagagctgggcagcccccagagcgtgtccctgatgaccctgaccctgaaggaccccagccccaagacccgggcctgtgccctgcaggtgctgagcgccatcctggagggcagcaagcagttcctgtctgtggccgaggacaccagtgaccaccggcgggccttcacccccttctctgtgatgattgcctgcagcatccgggagctgcaccgctgcctgctgctggccctggtggccgagagcagcagccagacagtgacccagatcatcaagtgcctggccaacctggtgtccaatgccccctatgaccggctgaagctgagcctgctgaccaaggtgtggaaccagatcaagccctacatccgccacaaggatgtgaatgtgcgggtgagcagcctgaccctgctgggcgccatcgtgtccacccacgcccccctgcctgaggtgcagctgctgctgcagcagccctgcagcagcggcctgggcaacagcaacagcgccaccccccacctgagccccccagactggtggaagaaggccccagctggccccagcctggaggagacctctgtgagcagccccaagggcagcagcgagccctgctggctgatccggctgtgcatcagcatcgtggtgctgcccaaggaggacagctgcagcggcagtgatgctggcagcgctgctggcagcacctatgagcccagccccatgaggctggaggccctgcaggtgctgaccctgctggcccggggctacttctccatgacccaggcctacctgatggagctgggggaggtgatctgcaagtgcatgggagaggccgaccccagcatccagctgcatggagccaagctgctggaggagctgggcaccggcctcatccagcagtacaagccagacagcacagctgccccagaccagagggcccctgtgttcctggtggtgatgttctggaccatgatgctgaatggccccctgccccgggccctgcagaacagcgagcaccccaccctgcaggccagcgcctgtgatgccctgagcagcatcctgcctgaggccttcagcaacctgcccaatgaccggcagatgctgtgcatcaccgtgctgctgggcctgaatgacagcaagaaccggctggtgaaggccgccaccagccgggccctgggcgtgtatgtgctcttcccctgcctgcggcaggacgtcatctttgtggctgatgctgccaatgccatcctgatgagcctggaggacaagagcctgaatgtgcgggccaaggccgcctggagcctgggcaacctgacagacaccctcatcgtgaacatggagaccccagaccccagcttccaggaggagttcagcggcctgctgctgctgaagatgctgcggagcgccatcgaggccagcaaggacaaggacaaggtgaagagcaatgctgtgcgggccctgggcaacctgctgcacttcctgcagcccagccacatcgagaagcccacctttgctgagatcatcgaggagagcatccaggccctgatcagcacagtgctgacagaggccgccatgaaggtgcgctggaatgcctgctacgccatgggaaatgtgttcaagaacccagccctgcccctgggcacagccccctggaccagccaggcctacaatgccctgacctctgtggtgaccagctgcaagaacttcaaggtgcgcatccgctctgctgctgccctgtctgtgcctgggaagcgggagcagtatggctctgtggaccagtatgcccgcatctggaatgccctggtgacagccctgcagaagtctgaggacaccatcgacttcctggagttcaagtactgtgtgtccctgcggacccagatctgccaggccctgatccacctgctgagcctggccagcgccagtgacctgccctgcatgaaggagaccctggagctgagcggcaacatggtgcagagctacatcctgcagttcctgaagagcggggctgaaggagatgacacaggagccccccacagcccccaggagcgggaccagatggtgaggatggccctgaagcacatgggcagcatccaggcccccaccggggacacagcccggcgggccatcatgggcttcctggaggagatcctggccgtgtgctttgacagcagcggcagccagggcgccctgcccggcctgaccaaccagtag

SEQ ID NO: 211173 - DNA, 2751 bp, Artificial Sequence
  derived and/or modified sequence
atgagcaagtacctgcctgagctgctgggcaacacaggcctgctgatgaagctgagtgacctggcccagagcgaccctgaggtgagaagagctgctgtgcactgcatggccaacctgtgcctgtctgtgcccggccagccctacctggaggagccctaccagaatgtgtgcttccaggccttcctgaccatcctgcagagccccaagagcagtgacatggatgacatcaccttctgcatgctgctgcagaatgccctgaagggcatccagagcctgctgaatggaggccgcatgaagctgacccagacagatgagctgggcgccctgctggccgtgctgaagaagttcatgtttcatggcctgcccggcctgaacatcgagatgcccaccgtgctgtaccccacccccctgccccagtatgatggccgcacccccatcaagccccagcagagcgagagcagcgccagccggcccaccctgaacaagaagaagaagagcaaggtgaagcccaagaagatccagcagggcgaggaggaggagaaggagagcagcggggagattgaagctgcccctgtgactggaacaggccgggtgaacctgcacgagggcaacacctggtgccccagcagcctgggcgtgcagagcctgcccctggatggcagcggggctgctgagaaggatggagtgagcagcagcttcagcagcagctcctggaagagggtgagcagcagcgagagtgacttcagtgatgctgagggcggcatgcagagcaagatgaggagctaccaggccaaggtgcggcagggcgccctggtgtgcttcctgagcaccatcaagagcattgagaagaaggtgctgtatggctactggagcgccttcatcccagacaccccagagctgggcagcccccagagcgtgtccctgatgaccctgaccctgaaggaccccagccccaagacccgggcctgtgccctgcaggtgctgagcgccatcctggagggcagcaagcagttcctgtctgtggccgaggacaccagtgaccacagaagagccttcacccccttctctgtgatgattgcctgcagcatccgggagctgcaccgctgcctgctgctggccctggtggccgagagcagcagccagacagtgacccagatcatcaagtgcctggccaacctggtgtccaatgccccctatgaccggctgaagctgagcctgctgaccaaggtgtggaaccagatcaagccctacatccgccacaaggatgtgaatgtgcgggtgagcagcctgaccctgctgggcgccatcgtgtccacccacgcccccctgcctgaggtgcagctgctgctgcagcagccctgcagcagcggcctgggcaacagcaacagcgccaccccccacctgagccccccagactggtggaagaaggccccagctggccccagcctggaggagacctctgtgagcagccccaagggcagcagcgagccctgctggctgatccggctgtgcatcagcatcgtggtgctgcccaaggaggacagctgcagcggcagtgatgctggcagcgctgctggcagcacctatgagcccagccccatgaggctggaggccttcagcaacctgcccaatgaccggcagatgctgtgcatcaccgtgctgctgggcctgaatgacagcaagaaccggctggtgaaggccgccaccagccgggccctgggcgtgtatgtgctcttcccctgcctgcggcaggatgtgatctttgtggctgatgctgccaatgccatcctgatgagcctggaggacaagagcctgaatgtgcgggccaaggccgcctggagcctgggcaacctgacagacaccctgattgtgaacatggagaccccagaccccagcttccaggaggagttcagcggcctgctgctgctgaagatgctgcggagcgccatcgaggccagcaaggacaaggacaaggtgaagagcaatgctgtgcgggccctgggcaacctgctgcacttcctgcagcccagccacatcgagaagcccacctttgctgagatcatcgaggagagcatccaggccctgatcagcacagtgctgacagaagctgccatgaaggtgcgctggaatgcctgctacgccatgggaaatgtgttcaagaacccagccctgcccctgggcacagccccctggaccagccaggcctacaatgccctgacctctgtggtgaccagctgcaagaacttcaaggtgcgcatccgctctgctgctgccctgtctgtgcctgggaagcgggagcagtatggctctgtggaccagtatgcccgcatctggaatgccctggtgacagccctgcagaagtctgaggacaccatcgacttcctggagttcaagtactgtgtgtccctgcggacccagatctgccaggccctgatccacctgctgagcctggccagcgccagtgacctgccctgcatgaaggagaccctggagctgagcggcaacatggtgcagagctacatcctgcagttcctgaagtctggagcagaaggagatgacaccggggccccccacagcccccaggagcgggaccagatggtgaggatggccctgaagcacatgggcagcatccaggcccccactggagacacagcccggcgggccatcatgggcttcctggaggagatcctggccgtgtgctttgacagcagcggcagccagggcgccctgcccggcctgaccaaccagtag

SEQ ID NO: 211174 - DNA, 3925 bp, Artificial Sequence
  derived and/or modified sequence
ccccgcccgtagaaaagatggctgctgtgcaagttgtcggttcgtggccttccgtgcagccgcgggaggcaccgcgggaagcaatccctgagcgaggcaatgggtttcgcctcttgtctgccaggctctgcgccctgcgcccggatgacagcagctccgcccgcaccgagatccacctgctcttcgatcagctcatctccgagaactacagcgagggcagtggcgtggccccggaggacgttagtgctcttcttgtccaggcttgccgactggtacctcttaatcagaatcatcttgtcagcaaagtgagccagcttatccaccatttacttaacagattacaggtaattgttgatgaacagcacttggatttcctgttggcatatactatttcggctattcatcagtgtagttcctggacacacagggaaattcttcaagccctggcagctctggtgtactgcaatggctccaaatgtcaaaagtacctcccagagctgctaggcaacaccggactcttaatgaagttgagtgacttggctcagtctgatcctgaagtcaggagagctgcagtacattgtatggcaaacttatgtctcagtgtgccaggacagccgtatttggaggagccctaccaaaatgtctgtttccaagcttttctgactattttacagtctccaaaatcatctgatatggatgatatcacattttgcatgttattgcaaaatgcattaaaaggtatacagtcacttctaaatggtgggagaatgaaactaacacagactgatgaacttggagcacttttagctgtgctaaagaaattcatgtttcacggactccctggactaaacatagagatgcccacggtgttatacccaactccgcttcctcagtatgatgggcgaacacctatcaaaccacagcaatcagaatccagtgcttctcgaccaactttgaataaaaagaaaaaatccaaagtaaaaccaaagaaaatccagcaaggagaggaggaggaaaaggaatccagtggtgaaatagaggcagccccagtcactggcacaggcagagtgaacctgcatgaagggaacacttggtgtccctcctccctgggtgtccagagtttgcctttagatggaagtggagctgcagaaaaagatggagtctcctcatccttcagttcttccagttggaaaagggtcagcagtagtgagtcagacttttctgatgctgaaggaggcatgcagagtaaaatgaggtcttaccaagctaaagttcgccaaggagccttagtttgttttctttctactataaaatcgatagaaaaaaaagttctttatggctactggtcagcttttattcctgatacgcctgaacttggcagcccacagtcagtgtccttgatgactcttacattgaaagacccttctccaaagacacgtgcctgtgctctgcaagttttatctgccatcttggaaggctcaaagcagtttctttctgttgctgaagataccagtgaccacagaagggcttttacccccttctccgtaatgatcgcttgcagcattagagagttgcacagatgtcttttgttagctttggtggcggagtcatcctcacagaccgttactcagataattaagtgccttgcaaatttagtatcaaatgcaccttatgatcgtctaaaactcagcctgctgaccaaagtctggaaccagataaagccttatattcgccacaaagatgttaatgttcgtgtgtcaagtctcacactcttgggagctatagtgtccacccacgcacctttacctgaagtccaactacttctgcaacagccatgttcttctggactcggtaatagcaattcagcaacccctcacctcagccctcctgattggtggaagaaagcccctgcaggaccctctctggaagaaacgtcagttagctcacctaaggggtcttcagagccctgctggctcattcgactctgcatttccattgtcgtactgcccaaggaggattcctgttcaggtagcgatgctggctctgcagcaggaagcacctacgaaccatcccccatgcgactggaggccttacaggtattgactcttctggcaaggggctacttttcaatgactcaagcctacttgatggagcttggagaggtgatttgcaagtgcatgggggaagcagatccatccattcagcttcatggagcaaagcttctggaagaactgggcacaggcttaatacagcagtataaaccagactccactgcagcacctgatcagagagcaccagtcttcttggtggtgatgttctggactatgatgctgaacggtcctttacccagagccctgcagaattcagaacacccaactctccaggcgagcgcctgtgatgccctgtcttccatcttgccagaggccttcagcaatctgccgaatgacaggcagatgctgtgcatcacagtgctgctcgggctgaatgacagcaagaatcgcttagtgaaagctgcaacttcacgggccctgggagtctatgtgctttttccctgtctcagacaggatgtcatatttgttgcagacgcagcaaatgcaatattgatgtcacttgaagacaagtctctgaatgttcgagccaaagcagcctggtccctgggcaacctgacagacactctgattgtcaacatggaaacaccagacccaagtttccaggaagagttctctggtctcctgctcttgaaaatgttacgatcagctatagaagcatccaaggataaagacaaggtaaaaagcaatgcagtccgggcccttggaaatttgcttcattttctgcaaccctctcatatagaaaaacccacatttgcagaaatcattgaggagtctatccaggccctaatttctactgttctaacagaagctgccatgaaagtccgatggaatgcttgttatgcaatgggaaatgtatttaaaaatcctgcccttcctttagggacagccccatggacctcccaggcctacaatgccctgacatcggtcgtgacatcatgcaagaacttcaaagtgcgcatcagatctgcagctgccctttccgtcccggggaagagagagcagtacgggtctgttgaccagtatgctcggatctggaatgcattggtcaccgctttacagaagagtgaagacaccatagactttttggaattcaagtactgtgtcagcctacggacccaaatctgccaggcactgattcacctcttgagcttggccagtgcctcggacctcccttgtatgaaagaaacccttgaactgagtgggaatatggtccagtcctatattctacagtttttaaaatcaggagcagagggagatgacactggagcaccccacagcccacaggaaagagaccagatggtcagaatggcccttaaacacatgggcagcatccaggcaccaactggagacacagccagaagggccatcatgggctttttagaagagatcctggccgtttgttttgactcatctggatcacaaggggcactcccagggttaacaaatcagtgaagatcccaccatactttctagatgtcgaaggcggcagtaggaagacctgagcttgagcataagatctgtgggatttcatcttaggggcagaaacaatccgttcactatttatttagaatgacttagcagccatttaaattttcacagagggctcaaccacctttggagtgactccatagcactggccatggtcagggttgttggaacatctgacctgtgcatccaggagccgaggagtcaggttgtaatacaggccaagcagacgggctttgagggcatttagtctcagaaaaaaaaaatgtagaaggatttcggaattagaattttgtgtattgtatctgtagttttgtaataaactaacg

SEQ ID NO: 211175 - DNA, 3287 bp, Artificial Sequence
  derived and/or modified sequence
agaaaagatggctgctgtgcaagttgtcggttcgtggccttccgtgcagccgcgggaggcaccgcgggaagcaatccctgagcgaggcaatgggtttcgcctcttgtctgccaggctctgcgccctgcgcccggatgacagcagctccgcccgcaccgagatccacctgctcttcgatcagctcatctccgagaactacagcgagggcagtggcgtggccccggaggacgttagtgctcttcttgtccaggcttgccgactggtacctcttaatcagaatcatcttgtcagcaaagtgagccagcttatccaccatttacttaacagattacaggtaattgttgatgaacagcacttggatttcctgttggcatatactatttcggctattcatcagtgtagttcctggacacacagggaaattcttcaagccctggcagctctggtgtactgcaatggctccaaatgtcaaagtacctcccagagctgctaggcaacaccggactcttaatgaagttgagtgacttggctcagtctgatcctgaagtcaggagagctgcagtacattgtatggcaaacttatgtctcagtgtgccaggacagccgtatttggaggagccctaccaaaatgtctgtttccaagcttttctgactattttacagtctccaaaatcatctgatatggatgatatcacattttgcatgttattgcaaaatgcattaaaaggtatacagtcacttctaaatggtgggagaatgaaactaacacagactgatgaacttggagcacttttagctgtgctaaagaaattcatgtttcacggactccctggactaaacatagagatgcccacggtgttatacccaactccgcttcctcagtatgatgggcgaacacctatcaaaccacagcaatcagaatccagtgcttctcgaccaactttgaataaaaagaaaaaatccaaagtaaaaccaaagaaaatccagcaaggagaggaggaggaaaaggaatccagtggtgaaatagaggcagccccagtcactggcacaggcagagtgaacctgcatgaagggaacacttggtgtccctcctccctgggtgtccagagtttgcctttagatggaagtggagctgcagaaaaagatggagtctcctcatccttcagttcttccagttggaaaagggtcagcagtagtgagtcagacttttctgatgctgaaggaggcatgcagagtaaaatgaggtcttaccaagctaaagttcgccaaggagccttagtttgttttctttctactataaaatcgatagaaaaaaaagttctttatggctactggtcagcttttattcctgatacgcctgaacttggcagcccacagtcagtgtccttgatgactcttacattgaaagacccttctccaaagacacgtgcctgtgctctgcaagttttatctgccatcttggaaggctcaaagcagtttctttctgttgctgaagataccagtgaccacagaagggcttttacccccttctccgtaatgatcgcttgcagcattagagagttgcacagatgtcttttgttagctttggtggcggagtcatcctcacagaccgttactcagataattaagtgccttgcaaatttagtatcaaatgcaccttatgatcgtctaaaactcagcctgctgaccaaagtctggaaccagataaagccttatattcgccacaaagatgttaatgttcgtgtgtcaagtctcacactcttgggagctatagtgtccacccacgcacctttacctgaagtccaactacttctgcaacagccatgttcttctggactcggtaatagcaattcagcaacccctcacctcagccctcctgattggtggaagaaagcccctgcaggaccctctctggaagaaacgtcagttagctcacctaaggggtcttcagagccctgctggctcattcgactctgcatttccattgtcgtactgcccaaggaggattcctgttcaggtagcgatgctggctctgcagcaggaagcacctacgaaccatcccccatgcgactggaggccttcagcaatctgccgaatgacaggcagatgctgtgcatcacagtgctgctcgggctgaatgacagcaagaatcgcttagtgaaagctgcaacttcacgggccctgggagtctatgtgctttttccctgtctcagacaggatgtcatatttgttgcagacgcagcaaatgcaatattgatgtcacttgaagacaagtctctgaatgttcgagccaaagcagcctggtccctgggcaacctgacagacactctgattgtcaacatggaaacaccagacccaagtttccaggaagagttctctggtctcctgctcttgaaaatgttacgatcagctatagaagcatccaaggataaagacaaggtaaaaagcaatgcagtccgggcccttggaaatttgcttcattttctgcaaccctctcatatagaaaaacccacatttgcagaaatcattgaggagtctatccaggccctaatttctactgttctaacagaagctgccatgaaagtccgatggaatgcttgttatgcaatgggaaatgtatttaaaaatcctgcccttcctttagggacagccccatggacctcccaggcctacaatgccctgacatcggtcgtgacatcatgcaagaacttcaaagtgcgcatcagatctgcagctgccctttccgtcccggggaagagagagcagtacgggtctgttgaccagtatgctcggatctggaatgcattggtcaccgctttacagaagagtgaagacaccatagactttttggaattcaagtactgtgtcagcctacggacccaaatctgccaggcactgattcacctcttgagcttggccagtgcctcggacctcccttgtatgaaagaaacccttgaactgagtgggaatatggtccagtcctatattctacagtttttaaaatcaggagcagagggagatgacactggagcaccccacagcccacaggaaagagaccagatggtcagaatggcccttaaacacatgggcagcatccaggcaccaactggagacacagccagaagggccatcatgggctttttagaagagatcctggccgtttgttttgactcatctggatcacaaggggcactcccagggttaacaaatcagtgaagatcccaccatactttctagatgtcgaaggcggcagtaggaagacctgagcttgagcataagatctgtgg

SEQ ID NO: 211176 - DNA, 3546 bp, Artificial Sequence
  derived and/or modified sequence
atggccgccgtgcaggtggtgggcagctggcccagcgtgcagcccagagaagcgccaagggaggccatacctgaaagaggcaacggcttccgactgttatccgcgaggctgtgcgcgcttcggcccgacgacagctcaagcgcacgtacagagatccacctcttgttcgatcaacttatttcagaaaattatagtgagggaagtggcgtcgctcccgaggacgtctccgctttattagttcaagcctgtaggcttgtccccctcaatcaaaatcacctggttagcaaggtgtctcagttaatccatcacctgctgaatcggctccaggtgatcgtggatgagcaacacttggactttctcttagcctacacgatcagcgctatacaccagtgctcctcgtggacgcaccgtgaaattttacaagctcttgccgctctggtgtactgcaacggctcaaagtgccagaagtatctcccagagctcctggggaataccggcttactaatgaagctaagtgaccttgcccagagcgatccagaagtgcgccgggcagccgtgcactgcatggccaacctctgcttatccgtgcccggccagccctatttagaggaaccatatcagaacgtgtgttttcaggctttcctgacaattcttcaatctcccaaatcatccgacatggatgacatcaccttctgtatgctattgcaaaacgccctgaaagggattcaaagcctgcttaatgggggacgtatgaagcttactcagacagacgaattgggggctctcctggcagtcctaaagaaattcatgtttcatggcttgccggggctgaacattgagatgcctacggtgctctacccaacaccactgccccagtacgacggccgcactccaatcaagccccagcaatcagaatccagcgcaagtagaccaaccctcaacaaaaagaagaagtctaaagtgaaacctaaaaaaatccagcaaggcgaagaggaggaaaaggaaagtagcggcgagattgaggccgctccagtgaccggaactgggcgtgtaaatctgcacgaagggaacacatggtgtccctcctcccttggcgtgcagtcactaccccttgatggtagcggcgcagccgaaaaagacggcgtctcctcatcttttagtagctccagttggaaacgagtgagctccagtgaaagcgacttttccgatgctgagggcggcatgcagagcaaaatgaggagctatcaggcgaaggtccggcagggggctttggtctgtttcctaagcacgatcaaatccatcgagaaaaaagtgctgtatggttactggtccgcttttattcctgacaccccagaactgggttctccacaaagcgtatcccttatgacactgacactgaaggacccttctccaaagactcgcgcttgtgcccttcaggtcctctctgctatcttggaggggtccaaacagttcctctcagtggctgaggacacctcagaccaccgcagagcgttcaccccgttttctgtcatgatagcttgctcaattcgagagttgcatcggtgcttgctactagcgttagtcgcggagtcctcttcccagactgtgactcagatcattaagtgcctggcgaacctggtgtccaatgcaccctacgatcgcttgaagctgagcctcctgaccaaggtgtggaaccagatcaagccctacatcaggcacaaggacgtcaacgtgcgcgtgtccagcctgacactcctaggcgcaatcgtctctactcatgcacccctccctgaggtccagctgcttttgcagcagccatgcagctcaggattgggcaattcaaacagtgccactcctcacctgtccccaccggactggtggaaaaaagcccccgctggaccttcgctagaggagacctcagtgagttccccgaagggctccagcgaaccatgctggctgatcaggctttgtatatccattgtggtgctgccaaaagaagactcatgttcagggagtgatgccggctccgccgcaggctcaacctacgaacccagccccatgagactggaggctctacaggtactgaccctcctggccagagggtacttttcaatgacccaggcatacctgatggaattgggcgaagtgatctgtaaatgtatgggcgaagccgacccctctatccaactgcacggagcgaagctgctggaggagttagggaccggcctgatccagcagtacaagccagactccacggcagctcctgaccagcgagccccggtgtttttagtggtgatgttctggacaatgatgttgaacggccctctgccgcgtgccctgcaaaacagtgagcaccccaccttacaagcatccgcctgcgatgccctttctagtatactgccagaggctttttccaacctgcctaatgatagacagatgttatgtatcacagtactgctgggcctaaacgactccaaaaaccgactggtcaaggccgccacttcacgggccctgggcgtgtatgttctgttcccttgcctgaggcaggacgtcattttcgttgcggatgcagcaaatgccatcctgatgtccctggaagataagagccttaacgtccgtgctaaggcagcctggagcttgggtaacctgaccgatactctgatcgtgaacatggagacccccgatcccagcttccaggaggaattcagtggcctgctgctccttaagatgctccggtctgcaattgaagcctccaaagacaaagataaagtcaagagtaatgcggtccgcgcgctcggcaacctgctgcatttcttgcagcctagccatatagagaagccgactttcgccgagatcattgaagagagcatacaagccctcattagtaccgtgctgacagaagccgctatgaaggttaggtggaacgcctgttacgccatgggtaacgttttcaaaaacccggccctgccgctcggcactgctccatggaccagtcaggcctacaatgctcttacttccgtcgtgacaagttgcaaaaactttaaagtgagaatccgaagcgcagcggccttatcggtgccaggtaagagggaacaatacggctctgttgatcagtacgcgcggatttggaatgcactagtgacagccctgcagaagagtgaggacaccatcgacttcctggagttcaagtactgtgtgagcttgcgtacccagatctgccaggctctcatccacctgctgtctctggcgtcagccagtgatctaccatgtatgaaggagacactggagctctccgggaatatggtgcagtcatacatcctgcagtttctgaaaagcggggccgaaggcgacgacactggcgctccccacagtcctcaggagcgagatcaaatggtgaggatggcactgaagcatatgggcagcattcaggcgcctactggagacacggctcgccgggccattatgggctttttggaggaaattctggccgtatgtttcgacagctctgggagtcagggggcgctccccggactgactaaccagtag

SEQ ID NO: 211177 - DNA, 2751 bp, Artificial Sequence
  derived and/or modified sequence
atgagcaagtacctgcccgagctgctgggcaacaccggcctgctgatgaagctgagtgatcttgcccagagtgacccagaagtacgtcgggcagcagtgcattgcatggcaaacctctgccttagcgtgcccggccagccctatctcgaggagccttaccagaacgtgtgttttcaagcgttcctgaccattctccagtcacccaaatcctctgacatggacgatatcactttttgtatgttgcttcagaatgcacttaaaggaatccaatccctcctgaatggaggtaggatgaaactcacccagactgatgaactaggggccctgctcgccgtgttaaagaaattcatgttccatggattgcccggtttgaacatcgaaatgcctacagttctctatcccactcccctgccgcagtacgatggaaggacaccgatcaagccccagcaaagcgagagctcagcgagccggcccaccttaaataagaaaaagaaaagcaaagtaaagcccaaaaaaatccaacaaggggaggaagaagaaaaggagtcaagtggtgaaatcgaggccgccccggtcactggcactggaagagtgaatctccacgaaggcaacacctggtgtcctagcagcttaggcgtgcagagcctgccgttggacgggtccggtgccgccgaaaaagacggcgtgagctccagtttctcttcatcaagttggaagcgcgtgtcttcatctgagtctgacttttccgacgcagaaggcggcatgcagagtaagatgcgctcttaccaggccaaagtcaggcagggagccttggtgtgttttctatctaccattaagagtatcgagaaaaaagtgctgtatggctattggagcgcctttatcccagatacacctgaactgggttccccgcagtctgtgtcattgatgaccctgacactgaaggatccttcgccaaagacgcgcgcctgcgcattacaagtgctgtctgctatcttggaaggatcgaagcagtttttgagtgtggctgaagacacctctgaccatcggcgcgccttcaccccctttagcgttatgattgcatgttctatccgggaactgcatcgctgcctgctgctcgcgctggtggctgagtcctcttcacaaacagtcacacaaatcatcaagtgtctcgcaaacctggtaagtaatgctccttatgaccgactgaaactgagcctgctgactaaggtctggaaccaaatcaaaccctacattaggcataaggacgtaaatgtgagggtctcttccttaacgctattaggcgcaattgtctctacccatgctcctctccctgaagtgcaattacttctgcagcaaccatgttcttctggcctaggtaattccaactctgcgactccacatctgagtccacctgattggtggaaaaaagcacccgccggcccaagtttggaggaaacttcagttagctcacccaagggcagcagcgaaccatgttggttgattcgattgtgcattagcattgtggtgctgccaaaggaggatagttgcagcgggagcgacgctggctcagccgcgggctcgacttatgaaccgtccccaatgcggttggaggcattttcgaatcttcccaacgaccggcagatgttgtgtatcaccgtgttgctcggcttaaacgattctaaaaacagactggttaaggccgccacttcaagagctctgggagtatatgtcttattcccttgcctgaggcaggatgttatcttcgttgccgacgctgccaatgcaatattgatgagcctggaagataagagcctcaacgtccgagcgaaagccgcctggagcttgggcaacctgaccgatacgctgatcgttaatatggaaacacccgacccaagttttcaagaagaattttcagggcttctgctcttaaagatgctgcggtcagccatagaggcttcgaaagacaaggataaagtcaagtcgaacgcggtgcgcgccctcggaaacctgctccatttcctacagccaagccacatcgaaaaacccaccttcgccgaaatcatcgaagaaagcatacaagccctgatcagcaccgtcctgactgaggccgctatgaaggttagatggaatgcctgttatgctatgggcaacgtgtttaagaatccagccctgccattgggaaccgccccctggacaagtcaggcttataatgctttgacctctgtggtcaccagttgtaagaatttcaaggtacgcatcagatcagcagctgctttatcagtgccaggtaaacgcgaacagtacggtagcgttgaccaatacgctcgtatttggaacgcattagtgacggccttacagaagtctgaagacacaattgattttctcgagttcaagtactgcgtgtcacttaggacccaaatctgtcaggccctcatccatctgctttcccttgctagcgcttcggatctgccctgtatgaaagagaccctggaactgagtggaaacatggtccagtcctacatcctgcagttcctgaaaagtggggctgagggcgatgacactggtgccccccactccccacaagaaagagaccaaatggtccgcatggctctgaaacacatgggtagcatccaagcacccaccggagatacagctaggcgcgctatcatgggtttcctggaggaaatcctggccgtgtgcttcgactcctctggctcacagggagccttgcctgggttgacaaaccagtag

SEQ ID NO: 211178 - DNA, 3546 bp, Artificial Sequence
  derived and/or modified sequence
atggccgctgtgcaagtcgtgggcagctggcctagtgtccagcctcgggaggctcctcgggaagcaataccggagcggggtaatgggttcaggctcctgtccgccaggctgtgcgctctaagacctgacgattcgagttctgccagaaccgaaatacatcttttattcgaccagcttatcagtgaaaattactccgagggatccggcgttgccccagaggacgtgtcggcccttctggtccaagcctgcagactggttccacttaatcagaatcacttggtttctaaagtgtctcagctgatccaccacttgctgaacagactgcaggttatcgtggacgaacaacacctggactttctgctcgcttacacaatcagcgccattcaccagtgcagtagttggacgcatcgggagattctgcaggcgctggccgctctggtgtactgcaacggcagtaagtgccaaaaatacctcccggagctccttggaaacactggcctgcttatgaagctctcagacctcgcacagtcagatcccgaagtgaggcgcgcagcagtgcactgtatggccaacctctgtctttccgtgcccggacagccatacttggaggagccttaccagaatgtctgctttcaggcattcctcactatcctgcagagcccgaagtccagcgatatggacgatatcaccttctgcatgttgctgcagaacgctttgaagggcatccagtcactccttaacggaggcaggatgaagcttacacagaccgatgaattaggcgctctgctcgccgtgctcaaaaagtttatgttccatgggctgcctggactcaacatcgagatgcctacagttctgtatcccactccgctcccacagtatgatggtcggactcccattaagccccaacagtctgaatcaagtgcatcacgtccgacactgaacaaaaaaaagaaaagcaaggtcaagccaaaaaaaatccaacagggcgaggaggaagagaaggaatcgtcaggggaaattgaggccgcacctgtgacaggtacagggagggttaatttgcacgaggggaacacctggtgtccaagcagcctcggcgtgcaatcgcttccactggacggatctggtgctgccgaaaaggacggcgtgagtagcagcttcagcagctcatcttggaagagagtgagcagctcggaatccgactttagcgacgcggaagggggaatgcagagtaagatgcggagttaccaagccaaggttcgccagggagcactggtttgctttctgagcaccatcaaatccatcgaaaagaaagtgctgtacggttactggtctgcatttattccagatacgcctgaactgggctccccacagagcgtgagtctgatgacactcacgctgaaggatccctcgccgaaaacaagggcctgcgcactgcaggtgctgagcgcaatcctggaggggagtaagcagttcctgtctgtggcagaagatacatcagatcaccggcgagcctttacacctttcagtgtgatgatagcatgctccattcgagagcttcaccggtgcctgcttctggccctggtagccgaatcgagttctcagactgtgactcagataattaaatgcttggccaacctggttagcaacgcaccatacgatagactgaagttatcattgctgaccaaagtgtggaaccaaatcaagccctacatccggcataaagacgtgaacgtgcgagtgagctccctaaccttactgggtgctattgtgagtacacatgctccattacctgaagtgcaactcttgctgcagcagccatgttcgtctggtctaggcaacagcaactcagctacaccgcacctgtccccccctgactggtggaaaaaggctccagccggacccagtttggaagagacgagcgtaagtagcccaaaaggcagttccgagccctgctggctcattcgtctgtgcatcagtattgtggtcctccctaaagaggactcttgctcagggtcagacgcaggaagcgccgcaggctccacctacgaaccaagccctatgaggctcgaagcactgcaggttttgacactcctggccagaggctactttagtatgacacaggcttatttgatggagcttggggaagtgatttgtaaatgcatgggagaagcggacccaagcattcagctccatggggcaaaacttttggaagaactgggcacaggactgatacagcaatataaacctgattccacagctgctccagaccaaagggctcccgtctttctggtggtcatgttctggaccatgatgctgaatggacccctgcctagggctctgcaaaactccgagcaccccactctccaggcatcagcctgcgacgctctgagctctattcttcctgaggcgtttagcaacctcccaaacgataggcagatgctgtgcatcactgtcctgctgggtctgaatgactctaaaaacagattagtgaaagcagccacaagtcgagccctaggcgtgtacgtccttttcccttgtttgcgccaggacgttatctttgttgctgacgcagcgaacgctatattgatgtcacttgaggacaaatctcttaacgtcagagctaaggcggcttggagcctgggaaacctaaccgacaccctgattgtgaacatggaaacgcctgatccctcttttcaggaggagtttagtggcctactcctgttgaagatgctacggtctgcaattgaagctagcaaagataaggacaaggtgaagtctaatgcggtgagagccctcggaaacctgctccactttctgcagccttctcatatcgaaaaacccactttcgctgagattatagaggagtccatacaagcgttgatctccactgtactcaccgaggccgctatgaaggtgcggtggaatgcctgttacgctatgggaaatgtgttcaagaatcccgcactgcccctggggaccgcaccctggacatcacaggcttacaacgccctgacaagcgtggttacctcatgcaaaaactttaaggtacggataaggtccgccgcagctctgagcgtacctggcaaaagagaacagtacggatcagtggaccagtatgctaggatctggaatgcactggtcactgctctgcaaaagagtgaagataccatcgacttcctcgagttcaaatactgcgtcagcctcaggacacagatctgccaggcactgatccaccttttgtccctcgcctccgcgagtgacttgccatgcatgaaagagactctcgaattgagcggcaacatggtacaatcttatattctgcagttcctgaagtcaggggcagagggtgatgataccggggcaccgcatagtccccaggaaagagaccagatggttcggatggccctaaagcacatggggagtattcaggctcccactggcgatacagccaggcgggctatcatgggttttctagaggagatactggccgtctgcttcgacagcagcgggtcacagggcgctctgccaggactgacaaaccagtag

SEQ ID NO: 211179 - DNA, 2751 bp, Artificial Sequence
  derived and/or modified sequence
atgtccaagtatctcccagagctcttaggcaataccggcttactcatgaagctgagcgacctggcacagagcgatcccgaagtgaggagggctgcagtgcattgcatggccaatctttgcctttcagttccaggacagccttacttagaagaaccttaccaaaatgtatgctttcaggcttttttgaccattcttcaatcaccaaagagctccgatatggacgacattacgttctgtatgctgctgcagaacgctctgaagggcatacaaagcctgctgaatgggggaaggatgaagctgactcagaccgacgagctgggggctctccttgctgtcttgaagaaattcatgttccatggcctgccaggactaaatatagagatgccaactgtcctgtaccccacaccgttgcctcaatatgatggtagaaccccgatcaaaccacaacaatctgagtcctccgcctcccgcccaaccctgaataagaagaagaaatcaaaggttaagcctaagaaaattcagcaaggagaagaagaagaaaaagagtcctccggcgagattgaagcagcacctgttacaggcactggacgggtcaatttgcacgaggggaatacctggtgtcccagctctcttggcgtgcagtcacttcctctcgatggatcaggcgctgcagaaaaagacggagtaagttcaagttttagttccagcagttggaaacgggtctcttcctctgaaagtgatttcagcgacgctgaaggtggcatgcagtctaaaatgagaagctatcaagccaaagtaaggcagggtgcgctggtatgctttcttagcactatcaaaagcatcgaaaagaaagtactctatggttattggtctgccttcattccagatacccctgagctgggcagcccacagagcgtgtctctaatgacactgacacttaaagatccctcaccaaaaacgcgggcatgcgcgctgcaggtactgtccgcaatcctagaaggctcaaaacagttccttagtgtcgctgaggacacttctgaccatcgccgtgcgttcacccctttctcggttatgatagcctgctcaatccgagaactgcaccggtgtctcttactagctctagttgccgaatcgagttcacaaacagtcacacagatcattaaatgcctcgccaatctcgtgagcaatgccccatacgaccggttgaaactttctttgctgaccaaagtgtggaatcagattaagccctatatccgccacaaagacgtgaatgtccgggtcagtagtcttacactccttggggctattgtctccacgcacgccccactcccagaggttcagttgctcctccaacagccatgcagcagcggtttggggaattcgaacagtgcaaccccccatctctcaccccctgactggtggaagaaggcacccgcaggtcctagcctggaagaaacatctgtttcgagccccaagggttcaagtgaaccttgctggcttatcagactctgcatctctatcgtggtgctgccgaaggaagattcctgcagcgggtcagatgctggttcagccgcaggtagcacctacgagcccagccctatgcgactggaggccttcagcaacctacctaatgaccggcagatgctgtgcatcaccgtgttgctcggcctaaatgacagcaaaaaccgtcttgtaaaggcagccacttcaagggcccttggtgtttatgtgctatttccctgcttgagacaggacgtgattttcgtggccgacgctgccaatgccatccttatgtcattagaagacaagtcccttaatgtgagggctaaggctgcctggtctcttggcaatctaactgacacgctgatcgtgaacatggagacaccagaccctagttttcaggaggaatttagcggtctccttttattgaaaatgttaagaagtgctatagaagcctcaaaagataaggacaaggtaaaaagtaacgcggttcgggcactggggaaccttcttcactttctccaaccatctcacatcgaaaaacctaccttcgccgagatcatcgaggaatcaattcaggcccttataagcacagtgctgaccgaggcagccatgaaagtgaggtggaacgcatgctacgccatggggaacgtgtttaagaaccccgctctgcctctcggcacggccccatggacctcacaggcctacaacgcactaacaagtgtcgttacaagttgtaaaaatttcaaggtgagaattaggagcgcggctgcactttccgtgccgggaaaacgggaacagtacgggagcgttgaccagtacgcacggatctggaacgcactggtgacggccctgcagaaatccgaagatactatagattttcttgagtttaaatattgcgtctctttgagaactcaaatctgtcaggcattgatacatttgctctcactggcctcagccagcgacctgccttgcatgaaggaaactctggaattgagcggcaacatggtgcagtcatatatattacagttcctcaagtcaggcgcagagggggacgacactggtgctccgcactcgcctcaggagagagatcagatggtaaggatggctttgaagcacatgggttccatccaagctcctacgggggataccgcacggagagcaatcatgggtttcttggaggaaatcctagctgtgtgtttcgatagcagtggaagtcaaggcgcactgccaggattaactaaccaatag

SEQ ID NO: 211180 - protein, 340 aa, Artificial Sequence
  derived and/or modified sequence
MLTQLKAKSEGKLAKQICKVVLDHFEKQYSKELGDAWNTVREILTSPSCWQYAVLLNRFNYPFELEKDLHLKGYHTLSQGSLPNYPKSVKCYLSRTPGRIPSERHQIGNLKKYYLLNAASLLPVLALELRDGEKVLDLCAAPGGKSIALLQCACPGYLHCNEYDSLRLRWLRQTLESFIPQPLINVIKVSELDGRKMGDAQPEMFDKVLVDAPCSNDRSWLFSSDSQKASCRISQRRNLPLLQIELLRSAIKALRPGGILVYSTCTLSKAENQDVISEILNSHGNIMPMDIKGIARTCSHDFTFAPTGQECGLLVIPDKGKAWGPMYVAKLKKSWSTGKW

SEQ ID NO: 211181 - DNA, 1023 bp, Artificial Sequence
  derived and/or modified sequence
atgctgacccagctgaaggccaagagcgagggcaagctggccaagcagatctgcaaggtggtgctggaccacttcgagaagcagtacagcaaggagctgggcgacgcctggaacaccgtgagagagatcctgaccagccccagctgctggcagtacgccgtgctgctgaacagattcaactaccccttcgagctggagaaggacctgcacctgaagggctaccacaccctgagccagggcagcctgcccaactaccccaagagcgtgaagtgctacctgagcagaacccccggcagaatccccagcgagagacaccagatcggcaacctgaagaagtactacctgctgaacgccgccagcctgctgcccgtgctggccctggagctgagagacggcgagaaggtgctggacctgtgcgccgcccccggcggcaagagcatcgccctgctgcagtgcgcctgccccggctacctgcactgcaacgagtacgacagcctgagactgagatggctgagacagaccctggagagcttcatcccccagcccctgatcaacgtgatcaaggtgagcgagctggacggcagaaagatgggcgacgcccagcccgagatgttcgacaaggtgctggtggacgccccctgcagcaacgacagaagctggctgttcagcagcgacagccagaaggccagctgcagaatcagccagagaagaaacctgcccctgctgcagatcgagctgctgagaagcgccatcaaggccctgagacccggcggcatcctggtgtacagcacctgcaccctgagcaaggccgagaaccaggacgtgatcagcgagatcctgaacagccacggcaacatcatgcccatggacatcaagggcatcgccagaacctgcagccacgacttcaccttcgcccccaccggccaggagtgcggcctgctggtgatccccgacaagggcaaggcctggggccccatgtacgtggccaagctgaagaagagctggagcaccggcaagtggtag

SEQ ID NO: 211182 - DNA, 1023 bp, Artificial Sequence
  derived and/or modified sequence
atgctcactcaactgaaagccaagtccgagggaaaactggctaaacagatctgtaaagtggtactggaccatttcgagaaacagtattcaaaggaactcggggatgcgtggaacacggttagggaaatcctgacatccccttcctgctggcaatatgccgttctgctaaatcggtttaactacccctttgagctcgaaaaagaccttcatctgaaagggtaccacacactgtcccagggctctctccctaactatcccaaaagcgtgaaatgctatctttcacgaacccctggccgcatcccatccgaaagacaccaaattggaaacttgaagaaatattatctgctgaatgccgcatccttgttgcccgtcctggccttagagcttcgcgacggggaaaaggtcctggacctctgcgccgctcctgggggcaagtcaatagcactactacagtgcgcttgccctggataccttcactgtaacgagtatgattccctaagattaaggtggctccgacagactctcgaaagcttcatcccgcaacctcttattaatgtgatcaaagtcagcgaactggacggcaggaaaatgggggacgctcagcccgaaatgtttgataaggtgctggtggacgcaccgtgcagcaatgatcggtcttggctattttcctcagactctcagaaagcctcttgtcgaatctcccagaggagaaatctcccactgttacagattgagctactccgctcagccatcaaggcacttagacccgggggaatcttggtgtactccacttgtacccttagcaaagccgaaaaccaggatgtcatctccgagatcctgaattcacacggaaacatcatgccaatggatattaaaggcatcgctagaacatgttcccacgactttacgttcgcacctacggggcaagagtgcggacttctcgtcatccctgacaagggcaaggcttgggggccaatgtacgttgccaaactgaagaagagctggagcacagggaagtggtag

SEQ ID NO: 211183 - DNA, 1023 bp, Artificial Sequence
  derived and/or modified sequence
atgctgacccagctgaaggccaagtctgagggcaagctggccaagcagatctgcaaggtggtgctggaccactttgagaagcagtacagcaaggagctgggagatgcctggaacacagtgcgggagatcctgaccagccccagctgctggcagtatgctgtgctgctgaaccgcttcaactacccctttgagctggagaaggacctgcacctgaagggctaccacaccctgagccagggcagcctgcccaactaccccaagtctgtgaagtgctacctgagcaggaccccaggccgcatccccagcgagcggcaccagatcggcaacctgaagaagtactacctgctgaatgctgccagcctgctgcctgtgctggccctggagctgagagatggagagaaggtgctggacctgtgtgccgcccctgggggcaagagcatcgccctgctgcagtgtgcctgccccggctacctgcactgcaatgaatatgacagcctgcggctgcgctggctgcggcagaccctggagagcttcatcccccagcccctcatcaacgtcatcaaggtgtctgagctggatggcaggaagatgggagatgcccagcctgagatgtttgacaaggtgctggtggatgccccctgcagcaatgaccgctcctggctgttcagcagtgacagccagaaggccagctgccgcatcagccagaggaggaacctgcccctgctgcagatcgagctgctgcggagcgccatcaaggccctgcggcctgggggcatcctggtgtacagcacctgcaccctgagcaaggccgagaaccaggacgtcatcagcgagatcctgaacagccacggcaacatcatgcccatggacatcaagggcatcgcccggacctgcagccatgacttcacctttgcccccaccggccaggagtgtggcctgctggtgatcccagacaagggcaaggcctggggccccatgtatgtggccaagctgaagaagtcctggagcacaggcaagtggtag

SEQ ID NO: 211184 - DNA, 1023 bp, Artificial Sequence
  derived and/or modified sequence
atgctgacccagctgaaggccaagagcgagggcaagctggccaagcaaatttgcaaggtggtgctggatcacttcgaaaagcagtactcaaaagaactgggggacgcctggaacacggttagggaaatcttaaccagcccatcctgctggcaatacgcagtgctgttgaaccggttcaattaccctttcgagctggaaaaggaccttcacctgaaagggtatcacactctgtctcagggaagtttgcctaattatcctaagtcagtgaagtgttatctttccaggacacccggaagaattccttccgaacgccaccagatcggcaacctaaaaaaatactacctgttgaatgctgcatcccttctgcccgtgctggcactcgagctgagagacggcgagaaagtgctggatctctgtgccgccccgggagggaagagtatcgcactcctgcagtgcgcatgtcccggctatctgcactgcaatgaatacgactcactgagactgcgatggcttaggcaaactctagagagctttattcctcagcctctgatcaatgtgatcaaggtttctgaactagacggcagaaagatgggcgatgctcagccagagatgttcgacaaagtcctggtggatgcaccctgtagtaatgacagatcttggctgttctcttccgattcccagaaagccagttgccgcattagccagagacggaacttacccctgcttcagattgagctcttgcgttctgccattaaggccctgcgccctggaggcatcctcgtgtatagtacttgtacattgagcaaggctgaaaatcaggacgttatctctgaaatcctcaattcacacggcaacataatgccgatggacatcaagggcattgctcgcacatgttctcacgactttaccttcgcccctacaggccaggagtgcggcttgttagtgatcccggataagggtaaggcatggggacccatgtacgtcgccaagctaaaaaagtcgtggtcaacgggcaaatggtag

SEQ ID NO: 211185 - DNA, 3289 bp, Artificial Sequence
  derived and/or modified sequence
tgcgcacgaaatctcccgcgggagctaagcctcttcgacaagaattctatagcgcgagcaaatcagtatctcgcgagaaattgaagaggaaacgtgagaatgaaagtggatgcccgcgaatcccggaagtcagactgtttttttcagttccctggaggctttttgatactgattcgcgtacacctgttgtttgaaagctctcagcgggacaatgctgacccagctgaaagcaaaatcagaggggaagcttgcaaaacagatttgcaaagttgtgttggatcattttgaaaaacagtattccaaagaactcggagatgcctggaatacagtaagggagatactaacatctccatcatgctggcaatatgctgtcctgcttaaccgattcaattatccttttgaactggaaaaggatttacatttgaagggctatcacacactctctcagggatctttacccaactatcctaaatcagtgaagtgttaccttagcagaactccgggccgaatcccttcagaaagacaccaaattggaaacctgaaaaaatattatctcctaaatgctgcttctcttctcccagtgttggctctggaattaagggatggggagaaggttctggatctctgtgctgctcctggagggaaatcaatagctctgctgcagtgtgcttgtccaggttatcttcattgtaatgaatatgatagtctgagattgaggtggctaaggcagacgttggaatctttcatcccacagcctttgataaatgtaattaaagtgtctgaattggatggcagaaaaatgggagatgcccagcctgaaatgtttgacaaggtgttagtggatgctccgtgttcaaatgatcgaagctggttgttttcttctgactctcagaaggcatcctgtaggataagtcaaaggaggaatttgcctcttctacagatagagctgttaaggtctgcaattaaggccttacgtcctggagggatacttgtatactctacatgcacgctttccaaggcagaaaatcaagatgtgatcagtgaaattttaaactcccacggtaacatcatgcctatggacattaaaggaatagcaaggacttgctcccacgacttcacatttgctcccactggccaggaatgtgggctcttagtgattccagataagggcaaagcctggggcccaatgtatgtagccaaattgaagaaatcatggagcacaggaaaatggtgacatgaatttgtaaactgtgtttatgtgttattatatttatatttctgaactcagtacatgttaatatttaaataattatgcagtaactttctctgggtctgtttggaatcctatttagttaatactttagcatcttagaatctaggcttgagaattgttcaggtgtatttttttcctagaaatatatctgtaacaatgatttaaggtggtgcagatggtgtttgttctatattataaatctgctgtctttgcttggcattttatagttaaattaattagaatatgtggttttatgcataacgtgtttagttctgtattctttctatgatagtgctttgaaccttcaaaaattcacattttccagcgctccgaccattttcccgcttatcaaatgtacaaatttgttcaaggtttttttttccccccaacttttgtaactgattgtctcagaactgattggtattctgagactaactttttaagcagcactatttctagttctggcaaaatagtttttttatttgcaatgttgttttctgttaaagactatattatgtttactgcaaaggtcagtgactctactgacaccagctttatttcccccactttttttgcattcacaaatacaaattgaaagggtaaattatattgaaaggcctttagaacagcagattcacatgcacatgtttgactttcgacattcagcttatagaattatggagtctatccagcaggctataaagcaagtacttgagacaaaaccggaatgattaataactgcaatcactgaactatatttggagagttttgttacataattgcagtcataatgagcactacagaatctgattatcttacattcacaatctggaggggctttttatttcactttgttataaaatgttctctgagaatatgatgccacatattaatgcacaagagggagatgcctaatgagagtggactgtgtgattaccagaacccagtgccatttactaagtggctctccatgtttacataaatcctgggaatactgtatacatttcttcttatgtacttagggttttagcttcagtcagcatcacactttttctccagaaattacttcacttagagtacaaacatatttttccaactattaagaaaaattatgcagcacatctcaaaaaatagcatctctttggaaaatagcctttaaaaaaaaacaactttatctgattatagaaatacaaaattctgctaaagctgaatacttttgaattgttcattatgttctgtgcctttaaactagagactatttgcttattaatattttttgttttgcaagcatatgtaacccggtttatatcatcaggaagtcttaggaagaatttttttttctgtaccttcagtctgttaatcatttgttttcctttatgtccaattgatatgtttaaagtaaagctaaagtccaggcacggtggcttatgcctgtaatcccagcactttgtcaggccgaggcagggggcatctcctgaggtcagaagttcgagactagcctgcccaacatggtaaaaccccgactctactaaaaatgcaaaaaaattagacaggcatggtggctggcaccagcaatcccagctacttaggaggctgaggcaggagaatcacttgaacccaggaggcagaggttgcagttagccaagatctcgccattgcactccagcctgggcgacaagagtgaaaccccgtagcaaaaaaataataataatagtaattaaataaaaataaagtaacgctagaactgttggaccaaatcaagtatatgggtaaatacagaagaataatgatggtggaaaagatgttttcttttttaagttatcattattagtttgttttttttatcttcagacactataggttttaaaaataggtttcttttatgtaggttaatcacagagtaaatctgcacactgtactttgttaaatgtcggtattttcccagtataatgcgatgaagcttaatctgaatacttggtatgctattgaatttactttcctatgattactgaaaaa

SEQ ID NO: 211186 - DNA, 1023 bp, Artificial Sequence
  derived and/or modified sequence
atgctaacccagctgaaggctaaaagcgagggaaaactggccaagcagatttgtaaagtagttttggaccactttgaaaagcagtatagcaaagagttgggcgacgcctggaacactgtgcgcgaaattttgacttctccatcttgctggcagtacgctgtgctgctcaatcgctttaactatcccttcgagctggaaaaggacctacacctgaaaggttaccacactctatcacagggaagcctccccaattatcccaagtctgtgaagtgctatctgtctcgaacaccgggtagaattccctcagagcgccaccagatcggcaacctgaaaaagtattacctgcttaatgccgcttcactgctgcctgtccttgcccttgagctgcgcgacggcgaaaaggttttggatctgtgcgctgcacctgggggaaagtctatagcgctcctgcagtgtgcctgccccggttacctgcactgcaatgaatacgactccctgcggctgaggtggttgagacaaactctcgagtctttcatcccccagccactaatcaacgtgattaaggtcagcgagcttgacgggcgtaagatgggagatgcacaaccggaaatgtttgacaaggtgctggttgatgctccgtgttctaacgacagatcatggctgttttccagtgattcccagaaggctagttgtcgcatttcccagaggaggaacctgcctctgttgcagatagaactgctgcgatcagctatcaaagccctccgcccaggcggaatcctagtttattcgacgtgcaccctgtcaaaggctgaaaatcaggatgtaatcagcgagatcttaaattcacatggaaatatcatgcccatggatatcaagggcatcgctcgaacttgttcacatgattttacttttgctcctactggacaggagtgtggactgcttgtgatccccgacaagggtaaggcttggggcccaatgtacgtagcgaagctgaaaaaaagttggagcacaggaaaatggtag

SEQ ID NO: 211187 - protein, 239 aa, Artificial Sequence
  derived and/or modified sequence
MPLGHIMRLDLEKIALEYIVPCLHEVGFCYLDNFLGEVVGDCVLERVKQLHCTGALRDGQLAGPRAGVSKRHLRGDQITWIGGNEEGCEAISFLLSLIDRLVLYCGSRLGKYYVKERSKAMVACYPGNGTGYVRHVDNPNGDGRCITCIYYLNKNWDAKLHGGILRIFPEGKSFIADVEPIFDRLLFFWSDRRNPHEVQPSYATRYAMTVWYFDAEERAEAKKKFRNLTRKTESALTED

SEQ ID NO: 211188 - DNA, 720 bp, Artificial Sequence
  derived and/or modified sequence
atgcccttgggacacataatgaggctggacttggagaagatcgctctcgagtatattgtgccctgcctgcacgaggtgggattctgttacttggacaacttcctgggcgaggtggtaggggattgtgtgctggagcgtgttaagcaactccactgtactggagcactgagggatggtcagctggccggaccgcgcgcaggtgtgtctaagcggcacctgcgcggagatcagatcacatggattggcggcaacgaggaggggtgcgaagccataagcttcctgctgtcccttatcgaccggctcgtgctgtattgcggcagcaggctgggaaaatactacgtgaaagagcggtctaaggctatggtggcctgctaccccggcaatgggactgggtatgtacgccatgtggacaaccccaacggtgatggacgctgtattacatgtatctattatttgaacaaaaactgggacgcgaaattgcacgggggaatcctgcgtatattcccggaagggaagtccttcatcgcggatgtagagcctatcttcgaccgactcttgtttttttggtccgacaggagaaaccctcatgaagttcagcccagttacgcgacaagatacgctatgacagtatggtactttgacgcagaggaacgggcggaggccaaaaagaagtttcgtaatctgacacggaagactgagagtgcgctgaccgaggactag

SEQ ID NO: 211189 - DNA, 720 bp, Artificial Sequence
  derived and/or modified sequence
atgcccctgggccacataatgcgtcttgacctggaaaagatcgctttggaatacatcgttccgtgtctgcatgaggtgggattttgttacctggataacttcctgggcgaagtggtcggcgactgtgttcttgagcgggtgaaacagctgcactgcaccggcgcactgagggatgggcaactggctggcccaagagcaggcgtgtcgaagagacacctgcggggtgaccagatcacttggatcgggggaaacgaagagggttgtgaggctatatcctttctgctttcactgatcgaccgcctggtgctttattgcggtagtcgacttggaaaatactacgtgaaagagagaagcaaagccatggttgcctgttaccccgggaacggaactggatatgtccgtcatgttgataatcccaatggcgacggaaggtgcatcacctgcatttactatctcaataagaactgggatgcaaaactccacgggggcatcctgaggatcttcccggaggggaaaagtttcattgcagacgttgagcccatattcgaccgcctgcttttcttttggtcagaccggaggaatccccacgaagtgcagccctcttatgctacgagatatgctatgaccgtgtggtacttcgacgccgaggagagggcagaggctaaaaagaaattccgaaatctcaccaggaaaacggagtccgcactcaccgaagattag

SEQ ID NO: 211190 - DNA, 720 bp, Artificial Sequence
  derived and/or modified sequence
atgcccctgggccacatcatgaggctggacctggagaagatcgccctggagtacatcgtgccctgcctgcacgaggtgggcttctgctacctggacaacttcctgggggaggtggtgggggactgtgtgctggagcgggtgaagcagctgcactgcacaggagccctgagagatggccagctggccggcccccgggccggcgtgtccaagaggcacctgcggggggaccagatcacctggattggaggaaatgaggagggctgtgaggccatctccttcctgctgagcctgattgaccggctggtgctgtactgcggcagccggctgggcaagtactacgtgaaggagaggagcaaggccatggtggcctgctacccaggaaatggcaccggctacgtgagacatgtggacaaccccaatggagatggccgctgcatcacctgcatctactacctgaacaagaactgggatgccaagctgcatggaggcatcctgcgcatcttccctgagggcaagagcttcatcgcagatgtggagcccatctttgaccggctgctcttcttctggagcgacagaagaaacccccatgaggtgcagcccagctatgccaccaggtatgccatgacagtgtggtactttgatgctgaggagagagctgaggccaagaagaagttcaggaacctgaccaggaagacagagagcgccctgacagaggactag

SEQ ID NO: 211191 - DNA, 720 bp, Artificial Sequence
  derived and/or modified sequence
atgcccctgggccacatcatgcggctggacctggagaagatcgccctcgagtacatcgttccgtgcctgcacgaagtgggattctgctacctggacaacttcctgggcgaagtggtcggggactgcgtacttgaacgcgtaaagcagctacactgtaccggtgccttgagggatgggcagctagctggcccaagggccggagtgagcaaaagacatctccgaggcgaccagataacctggatcggcggaaacgaagaagggtgcgaagcgatatcatttctgctctctcttatcgataggctggtgctttactgcggttctcggctcgggaagtactacgtcaaggagaggtcaaaggcaatggttgcctgttaccctggcaatgggacgggctatgtgcgtcacgtagataatccgaacggcgacggaaggtgtatcacctgtatatactatcttaacaaaaattgggatgccaagctccatggcggaattttacggatcttccctgagggcaagtccttcattgccgacgttgagcctatattcgatcggcttctgtttttctggtctgatagaaggaatccgcatgaagtccaaccgagctacgcaacccgctacgcaatgacagtttggtacttcgacgccgaagagcgagctgaagcaaaaaaaaaatttcgaaacttgaccagaaaaaccgagtccgccttgactgaggattag

SEQ ID NO: 211192 - DNA, 720 bp, Artificial Sequence
  derived and/or modified sequence
atgcccctgggccacatcatgcggctggacctggagaagatcgccctcgagtacatcgtgccctgcctacacgaggtgggattttgttacctggacaacttcctgggcgaagttgtcggcgattgtgtgttggagcgcgtgaaacagcttcactgtacaggcgcattaagagacgggcagctggctggacctcgggcaggggtatccaagcgccatctgcgcggcgaccagattacctggatcgggggaaacgaggagggatgcgaggccatctcctttttactgtcactaattgacagactcgtcctttactgcgggtcccgcctaggtaagtactatgtgaaagaacgctccaaagccatggttgcctgctatcctggcaacggcacggggtacgttagacacgtggataaccccaatggggacggccgctgtatcacttgcatttattacttgaacaagaattgggacgccaagctacacggtggtatcctccggatctttcccgaaggaaagagcttcatcgcagacgtggaacccatctttgataggcttctgttcttctggtccgaccggcggaacccgcatgaagtgcagccaagctatgctaccaggtatgctatgaccgtgtggtatttcgatgctgaggagcgcgccgaagctaagaaaaagttccgcaacctgactaggaaaactgagagcgccttgacagaggactag

SEQ ID NO: 211193 - DNA, 720 bp, Artificial Sequence
  derived and/or modified sequence
atgcctcttggacacattatgaggttagacctggagaagatcgcacttgaatacattgtcccctgcctgcacgaagtgggcttctgctacctggacaattttctgggcgaagtcgtgggtgactgtgtgttagaacgagttaaacagctacactgcaccggcgcactcagagacggtcagctcgctggccctcgcgctggagtctccaagagacatctgcgcggagatcagatcacctggatcggaggcaacgaagagggctgcgaggcaattagcttcttgctcagtcttattgacagattagtgctctattgcggttcccgattagggaaatactacgttaaggagagatctaaggcaatggtcgcatgctacccagggaacggaacagggtacgtgcggcacgtggataaccccaacggcgatggacgttgcatcacatgtatctactacctgaataaaaactgggacgccaaactgcatggtggcattctcagaattttccccgaggggaaatcgttcatcgccgatgtggaaccaattttcgacaggctattatttttctggagtgaccgcagaaacccacatgaggtgcaaccctcctatgcaacccggtatgcaatgaccgtttggtattttgacgccgaggaacgggctgaagcaaagaagaaatttagaaacctgactaggaaaaccgaatctgctctgaccgaagactag

SEQ ID NO: 211194 - DNA, 720 bp, Artificial Sequence
  derived and/or modified sequence
atgccactgggacacataatgagacttgacctcgagaaaatagccctggagtacattgtgccatgtctgcacgaggtggggttctgttacctagacaacttcttaggcgaagtcgtcggtgattgtgtgctggagcgggtcaagcagctacactgcacaggtgcccttagagatggccagttggccggtccacgagctggcgtaagcaagagacacctgcggggagatcagatcacttggatcggcggaaatgaggaagggtgcgaagctatctcatttctcctgtctcttatcgaccgtctggttctgtactgcggatcccggctggggaaatactacgtaaaggaacgatccaaggccatggtagcctgttaccccggtaacggcactgggtatgtgaggcacgtggacaacccaaacggtgatggcaggtgcataacctgtatctactacctcaataagaactgggacgcaaagctgcacgggggtatcctgcgcattttccctgagggaaagtctttcattgccgatgttgagcccatatttgacagactcctctttttttggtccgaccgtcggaaccctcatgaggtccagcctagttacgcaacgaggtatgctatgaccgtatggtattttgatgcagaggaaagagcggaagccaagaaaaaatttcggaacctcacgcgtaagacagagtccgccctaaccgaagattag

SEQ ID NO: 211195 - DNA, 720 bp, Artificial Sequence
  derived and/or modified sequence
atgcccctgggccacatcatgagactggacctggagaagatcgccctggagtacatcgtgccctgcctgcacgaggtgggcttctgctacctggacaacttcctgggcgaggtggtgggcgactgcgtgctggagagagtgaagcagctgcactgcaccggcgccctgagagacggccagctggccggccccagagccggcgtgagcaagagacacctgagaggcgaccagatcacctggatcggcggcaacgaggagggctgcgaggccatcagcttcctgctgagcctgatcgacagactggtgctgtactgcggcagcagactgggcaagtactacgtgaaggagagaagcaaggccatggtggcctgctaccccggcaacggcaccggctacgtgagacacgtggacaaccccaacggcgacggcagatgcatcacctgcatctactacctgaacaagaactgggacgccaagctgcacggcggcatcctgagaatcttccccgagggcaagagcttcatcgccgacgtggagcccatcttcgacagactgctgttcttctggagcgacagaagaaacccccacgaggtgcagcccagctacgccaccagatacgccatgaccgtgtggtacttcgacgccgaggagagagccgaggccaagaagaagttcagaaacctgaccagaaagaccgagagcgccctgaccgaggactag

SEQ ID NO: 211196 - DNA, 2709 bp, Artificial Sequence
  derived and/or modified sequence
ccggagtctggccgcagtcgcggcagtggtggcttcccatccccaaaaggcgccctccgactccttgcgccgcactgctcgccgggccagtccggaaacgggtcgtggagctccgcaccactcccgctggttcccgaaggcagatcccttctcccgagagttgcgagaaactttcccttgtccccgacgctgcagcggctcgggtaccgtggcagccgcaggtttctgaaccccgggccacgctccccgcgcctcggcttcgcgctcgtgtagatcgttccctctctggttgcacgctggggatcccggacctcgattctgcgggcgagatgcccctgggacacatcatgaggctggacctggagaaaattgccctggagtacatcgtgccctgtctgcacgaggtgggcttctgctacctggacaacttcctgggcgaggtggtgggcgactgcgtcctggagcgcgtcaagcagctgcactgcaccggggccctgcgggacggccagctggcggggccgcgcgccggcgtctccaagcgacacctgcggggcgaccagatcacgtggatcgggggcaacgaggagggctgcgaggccatcagcttcctcctgtccctcatcgacaggctggtcctctactgcgggagccggctgggcaaatactacgtcaaggagaggtctaaggcaatggtggcttgctatccgggaaatggaacaggttatgttcgccacgtggacaaccccaacggtgatggtcgctgcatcacctgcatctactatctgaacaagaattgggatgccaagctacatggtgggatcctgcggatatttccagaggggaaatcattcatagcagatgtggagcccatttttgacagactcctgttcttctggtcagatcgtaggaacccacacgaagtgcagccctcttacgcaaccagatatgctatgactgtctggtactttgatgctgaagaaagggcagaagccaaaaagaaattcaggaatttaactaggaaaactgaatctgccctcactgaagactgaccgtgctctgaaatctgctggccttgttcattttagtaacggttcctgaattctcttaaattctttgagatccaaagatggcctcttcagtgacaacaatctccctgctacttcttgcatccttcacatccctgtcttgtgtgtggtacttcatgttttcttgccaagactgtgttgatcttcagatactctctttgccagatgaagttacttgctaactccagaaattcctgcagacatcctactcggccagcggtttacctgatagattcggtaatactatcaagagaagagcctaggagcacagcgagggaatgaaccttacttgcactttatgtatacttcctgatttgaaaggaggaggtttgaaaagaaaaaaatggaggtggtagatgccacagagaggcatcacggaagccttaacagcaggaaacagagaaatttgtgtcatctgaacaatttccagatgttcttaatccagggctgttggggtttctggagaattatcacaacctaatgacattaatacctctagaaagggctgctgtcatagtgaacaatttataagtgtcccatggggcagacactccttttttcccagtcctgcaacctggattttctgcctcagccccattttgctgaaaataatgactttctgaataaagatggcaacacaattttttctccattttcagttcttacctgggaacctaattccccagaagctaaaaaactagacattagttgttttggttgctttgttggaatggaatttaaatttaaatgaaaggaaaaatatatccctggtagttttgtgttaaccactgataactgtggaaagagctaggtctactgatatacaataaacatgtgtgcatcttgaacaatttgagaggggaggtggagttggaaatgtgggtgttcctgttttttttttttttttttttttagttttcctttttaatgagctcaccctttaacacaaaaaaagcaaggtgatgtattttaaaaaaggaagtggaaataaaaaaatctcaaagctatttgagttctcgtctgtccctagcagtctttcttcagctcacttggctctctagatccactgtggttggcagtatgaccagaatcatggaatttgctagaactgtggaagcttctactcctgcagtaagcacagatcgcactgcctcaataacttggtattgagcacgtattttgcaaaagctacttttcctagttttcagtattactttcatgttttaaaaatccctttaatttcttgcttgaaaatcccatgaacattaaagagccagaaatattttcctttgttatgtacggatatatatatatatagtcttccaagatagaagtttactttttcctcttctggttttggaaaatttccagataagacatgtcaccattaattctcaacgactgctctattttgttgtacggtaatagttatcaccttctaaattactatgtaatttattcacttattatgtttattgtcttgtatcctttctctggagtgtaagcacaatgaagacaggaattttgtatatttttaaccaatgcaacatactctcagcacctaaaatagtgccgggaacatagtaagggctcagtaaatacttgttgaataaactcagtctcc

SEQ ID NO: 211197 - DNA, 1917 bp, Artificial Sequence
  derived and/or modified sequence
gagtctggccgcagtcgcggcagtggtggcttcccatccccaaaaggcgccctccgactccttgcgccgcactgctcgccgggccagtccggaaacgggtcgtggagctccgcaccactcccgctggttcccgaaggcagatcccttctcccgagatgcccctgggacacatcatgaggctggacctggagaaaattgccctggagtacatcgtgccctgtctgcacgaggtgggcttctgctacctggacaacttcctgggcgaggtggtgggcgactgcgtcctggagcgcgtcaagcagctgcactgcaccggggccctgcgggacggccagctggcggggccgcgcgccggcgtctccaagcgacacctgcggggcgaccagatcacgtggatcgggggcaacgaggagggctgcgaggccatcagcttcctcctgtccctcatcgacaggctggtcctctactgcgggagccggctgggcaaatactacgtcaaggagaggtctaaggcaatggtggcttgctatccgggaaatggaacaggttatgttcgccacgtggacaaccccaacggtgatggtcgctgcatcacctgcatctactatctgaacaagaattgggatgccaagctacatggtgggatcctgcggatatttccagaggggaaatcattcatagcagatgtggagcccatttttgacagactcctgttcttctggtcagatcgtaggaacccacacgaagtgcagccctcttacgcaaccagatatgctatgactgtctggtactttgatgctgaagaaagggcagaagccaaaaagaaattcaggaatttaactaggaaaactgaatctgccctcactgaagactgaccgtgctctgaaatctgctggccttgttcattttagtaacggttcctgaattctcttaaattctttgagatccaaagatggcctcttcagtgacaacaatctccctgctacttcttgcatccttcacatccctgtcttgtgtgtggtacttcatgttttcttgccaagactgtgttgatcttcagatactctctttgccagatgaagttacttgctaactccagaaattcctgcagacatcctactcggccagcggtttacctgatagattcggtaatactatcaagagaagagcctaggagcacagcgagggaatgaaccttacttgcactttatgtatacttcctgatttgaaaggaggaggtttgaaaagaaaaaaatggaggtggtagatgccacagagaggcatcacggaagccttaacagcaggaaacagagaaatttgtgtcatctgaacaatttccagatgttcttaatccagggctgttggggtttctggagaattatcacaacctaatgacattaatacctctagaaagggctgctgtcatagtgaacaatttataagtgtcccatggggcagacactccttttttcccagtcctgcaacctggattttctgcctcagccccattttgctgaaaataatgactttctgaataaagatggcaacacaattttttctccattttcagttcttacctgggaacctaattccccagaagctaaaaaactagacattagttgttttggttgctttgttggaatggaatttaaatttaaatgaaaggaaaaatatatccctggtagttttgtgttaaccactgataactgtggaaagagctaggtctactgatatacaataaacatgtgtgcatcttgaacaatttgagaggggaggtggagttggaaatgtgggtgttcctgttttttttttttttttttttttagttttcctttttaatgagctcaccctttaacacaaaaaaagcaaggtgatgtattttaaaaaaggaagtggaaataaaaaaatctcaaagct

SEQ ID NO: 211198 - protein, 190 aa, Artificial Sequence
  derived and/or modified sequence
MTASASSFSSSQGVQQPSIYSFSQITRSLFLSNGVAANDKLLLSSNRITAIVNASVEVVNVFFEGIQYIKVPVTDARDSRLYDFFDPIADLIHTIDMRQGRTLLHCMAGVSRSASLCLAYLMKYHSMSLLDAHTWTKSRRPIIRPNNGFWEQLINYEFKLFNNNTVRMINSPVGNIPDIYEKDLRMMISM

SEQ ID NO: 211199 - protein, 189 aa, Artificial Sequence
  derived and/or modified sequence
MTASASSFSSSQGVQQPSIYSFSQITRSLFLSNGVAANDKLLLSSNRITAIVNASVEGQRILRGIQYIKVPVTDARDSRLYDFFDPIADLIHTIDMRQGRTLLHCMAGVSRSASLCLAYLMKYHSMSLLDAHTWTKSRRPIIRPNNGFWEQLINYEFKLFNNNTVRMINSPVGNIPDIYEKDLRMMISM

SEQ ID NO: 211200 - DNA, 573 bp, Artificial Sequence
  derived and/or modified sequence
atgaccgccagcgccagcagcttcagcagcagccagggcgtgcagcagcccagcatctacagcttcagccagatcaccagaagcctgttcctgagcaacggcgtggccgccaacgacaagctgctgctgagcagcaacagaatcaccgccatcgtgaacgccagcgtggaggtggtgaacgtgttcttcgagggcatccagtacatcaaggtgcccgtgaccgacgccagagacagcagactgtacgacttcttcgaccccatcgccgacctgatccacaccatcgacatgagacagggcagaaccctgctgcactgcatggccggcgtgagcagaagcgccagcctgtgcctggcctacctgatgaagtaccacagcatgagcctgctggacgcccacacctggaccaagagcagaagacccatcatcagacccaacaacggcttctgggagcagctgatcaactacgagttcaagctgttcaacaacaacaccgtgagaatgatcaacagccccgtgggcaacatccccgacatctacgagaaggacctgagaatgatgatcagcatgtag

SEQ ID NO: 211201 - DNA, 882 bp, Artificial Sequence
  derived and/or modified sequence
ggtggccgatagctggtcctctttctccaacacctagcctgagacttggcggcgcggctgctatcctgaactagcttggtaagtgttgtgtcccgaaccagcgtagagagacctcggaccagccgccttgatgacagcatccgcgtcctccttttcatcatctcagggtgtccagcagccctccatctacagcttctcccaaataaccagaagcttgtttctcagcaatggtgtggccgccaacgacaaactccttctgtccagcaatcgcatcaccgccattgtcaatgcctcggtggaagtggtcaacgtattcttcgagggcattcagtacataaaggtgcctgttaccgatgctcgtgactcgcgtctctacgacttttttgaccccattgctgatcttatccacaccatcgatatgaggcagggccgtacgctgctgcactgcatggctggagtgagccgttccgcctcactgtgccttgcgtacctcatgaaataccactccatgtcgctgctggacgcccatacatggaccaagtcgcgccgccccatcatccggcccaacaacggcttttgggaacagctcatcaattacgaattcaagctgtttaataacaacaccgtgcgcatgatcaactcgccggtaggtaacatccctgacatctatgagaaggacctacgtatgatgatatcaatgtaagccatcccggccagcccctgacatctgccatcgatcttgcaccaagactgaacttgaacactgacattttgttagtaaagaaaaccggatggtgccttgttaaagggcaagaaaaaagggagggggttggagttttgaacgtagtaagccttaccttaatagaattaaattcatgaaac

SEQ ID NO: 211202 - DNA, 570 bp, Artificial Sequence
  derived and/or modified sequence
atgaccgccagcgccagcagcttcagcagcagccagggcgtgcagcagcccagcatctacagcttcagccagatcaccagaagcctgttcctgagcaacggcgtggccgccaacgacaagctgctgctgagcagcaacagaatcaccgccatcgtgaacgccagcgtggagggccagagaatcctgagaggcatccagtacatcaaggtgcccgtgaccgacgccagagacagcagactgtacgacttcttcgaccccatcgccgacctgatccacaccatcgacatgagacagggcagaaccctgctgcactgcatggccggcgtgagcagaagcgccagcctgtgcctggcctacctgatgaagtaccacagcatgagcctgctggacgcccacacctggaccaagagcagaagacccatcatcagacccaacaacggcttctgggagcagctgatcaactacgagttcaagctgttcaacaacaacaccgtgagaatgatcaacagccccgtgggcaacatccccgacatctacgagaaggacctgagaatgatgatcagcatgtag

SEQ ID NO: 211203 - DNA, 573 bp, Artificial Sequence
  derived and/or modified sequence
atgaccgcctccgccagcagcttctcttccagtcagggcgtgcagcaaccgtccatctactccttttcacaaataactagatctctgttcctgtccaacggcgtagccgcgaacgataaactcctgctctcatctaatcgaattacagccattgtcaatgcaagtgtggaggtagtcaacgtcttcttcgagggtatccagtacattaaagttccagtgaccgacgctagagatagccgattgtatgacttctttgaccccattgcggacctgattcataccatagacatgaggcagggacggactctccttcactgcatggccggtgtcagcagaagcgcaagcctgtgcttagcctatttgatgaagtatcactcaatgtctttgctggacgctcatacttggactaaaagcaggaggcctatcattaggccgaataacggattctgggaacagctgatcaattatgagttcaagctctttaataataataccgtcaggatgattaacagtcccgtcggcaatataccagatatatatgaaaaggacctgcgcatgatgatatcaatgtag

SEQ ID NO: 211204 - DNA, 570 bp, Artificial Sequence
  derived and/or modified sequence
atgactgcatccgctagttctttttcaagtagccagggggtgcagcaaccaagtatctactccttttcccaaatcaccagaagcctttttctgtccaacggtgttgctgccaatgacaagctccttttgtcctctaacaggattaccgccatcgttaatgcctccgtggaaggtcagaggattctcagggggatacagtacatcaaggtaccagttaccgacgcaagagattctcggctgtatgacttctttgacccaattgcggatctcatccacacaattgatatgagacaaggtcgcacattactacactgcatggccggagtttcccgctccgctagcctgtgtctcgcttaccttatgaagtaccactccatgtcactgctggacgcccatacatggaccaaaagcagaagacccatcatccgccctaacaacggattttgggagcagctgattaactacgaattcaagctgtttaacaacaacactgtgagaatgataaattcacctgtgggtaatatccccgacatttacgaaaaggatctgagaatgatgatcagcatgtag

SEQ ID NO: 211205 - DNA, 573 bp, Artificial Sequence
  derived and/or modified sequence
atgacagccagcgccagcagcttcagcagcagccagggcgtgcagcagcccagcatctacagcttcagccagatcaccaggagcctcttcctgagcaatggagtggccgccaatgacaagctgctgctgagcagcaaccgcatcacagccatcgtgaatgcctctgtggaggtggtgaatgtgttctttgagggcatccagtacatcaaggtgcctgtgacagatgcccgggacagccggctgtatgacttctttgaccccatcgctgacctgatccacaccatcgacatgaggcagggccgcaccctgctgcactgcatggccggcgtgagccgcagcgccagcctgtgcctggcctacctgatgaagtaccacagcatgagcctgctggatgcccacacctggaccaagagcagaagacccatcatccggcccaacaacggcttctgggagcagctgatcaactatgagttcaagctgttcaacaacaacacagtgaggatgatcaacagccctgtgggcaacatcccagacatctatgagaaggacctgaggatgatgatctccatgtag

SEQ ID NO: 211206 - DNA, 570 bp, Artificial Sequence
  derived and/or modified sequence
atgacagccagcgccagcagcttcagcagcagccagggcgtgcagcagcccagcatctacagcttcagccagatcaccaggagcctcttcctgagcaatggagtggccgccaatgacaagctgctgctgagcagcaaccgcatcacagccatcgtgaatgcctctgtggagggccagaggatcctgcggggcatccagtacatcaaggtgcctgtgacagatgcccgggacagccggctgtatgacttctttgaccccatcgctgacctgatccacaccatcgacatgaggcagggccgcaccctgctgcactgcatggccggcgtgagccgcagcgccagcctgtgcctggcctacctgatgaagtaccacagcatgagcctgctggatgcccacacctggaccaagagccggcggcccatcatccggcccaacaacggcttctgggagcagctgatcaactatgagttcaagctgttcaacaacaacacagtgaggatgatcaacagccctgtgggcaacatcccagacatctatgagaaggacctgaggatgatgatctccatgtag

SEQ ID NO: 211207 - DNA, 573 bp, Artificial Sequence
  derived and/or modified sequence
atgaccgccagcgccagcagcttcagcagcagccagggcgtgcagcaaccctccatatacagcttcagccagatcactcggtccctgttcctgtccaatggggtcgctgccaatgacaaactcctgcttagcagtaatcgtatcactgctatcgtcaacgcctctgtcgaagttgtcaacgtatttttcgaggggatccagtacattaaggtccccgtgactgatgcacgagactctcgcctgtatgacttcttcgaccccatcgcagaccttatccatacaatcgacatgcgacaaggaaggaccctgttgcactgtatggcaggagtgtccagatcagcttccttgtgtcttgcttatctgatgaaatatcacagcatgtctttactggacgcccacacttggactaagtccagacgacctatcatccgccccaataatggcttttgggagcaactcataaattatgaattcaaattatttaacaataacacagtccggatgattaatagtcctgtgggaaacattcccgacatatatgagaaagacctgcggatgatgataagcatgtag

SEQ ID NO: 211208 - DNA, 570 bp, Artificial Sequence
  derived and/or modified sequence
atgaccgccagcgccagcagcttcagcagcagccagggcgtgcagcagccttccatctatagcttctcccagatcacaaggagcctgtttcttagcaatggcgtggccgccaatgacaagcttcttttatcgagtaatcgcataacagccatcgttaatgccagcgtggaaggtcagagaattctgagaggcatccagtacattaaagtccctgttaccgatgcaagggattcacgcctctacgacttctttgaccctattgcagatctcatccacaccattgacatgcggcagggtcgcactctcctgcattgtatggctggggtgtctaggtctgccagtctgtgtcttgcctacctgatgaagtaccactccatgagtctgttagatgcccacacatggaccaagtcacggagacccataattaggcccaataacggattttgggagcagctgatcaattacgaattcaagcttttcaataacaatacggtgcggatgattaactctcctgttggcaatattcccgatatttatgagaaagacctgaggatgatgatcagcatgtag

SEQ ID NO: 211209 - DNA, 573 bp, Artificial Sequence
  derived and/or modified sequence
atgaccgcctctgcctctagcttctccagcagtcagggagtccaacagccgagcatttattccttctcacagataacccgcagtcttttcctctcaaacggtgtcgcggctaacgacaaactgctcctatcttcgaatcgcatcaccgctattgttaatgcatctgttgaagtggtcaatgtcttcttcgaggggatacaatacattaaagtgcctgttacagatgctcgggactcaaggctctacgatttcttcgaccccatcgccgatctgattcacactattgatatgaggcagggccgaaccctgttgcactgtatggccggagtcagtcgatctgccagcctgtgcctcgcatacttgatgaaatatcacagtatgtccctcttggatgcccacacttggaccaaatctcggagaccaatcatcaggcccaacaacggattttgggagcagctcatcaattacgagttcaagcttttcaacaacaacaccgtccgaatgatcaatagcccagtcggcaacatccctgatatttatgagaaggatctcaggatgatgataagcatgtag

SEQ ID NO: 211210 - DNA, 570 bp, Artificial Sequence
  derived and/or modified sequence
atgactgcttccgcatcttcattcagcagtagccaaggagtgcagcagcccagcatttacagcttcagccagatcacccgcagtttattcctttcaaacggagtagcagcaaacgacaaactcctcctatcctccaatagaattactgctatcgtgaacgccagcgtggaagggcagaggattctgcggggtatacagtatattaaggtcccagtgaccgatgcaagggattcacgcctatacgatttctttgatcccattgccgatctcatccacaccatcgatatgcgccaggggagaacgttgctgcactgtatggctggcgtaagccgtagcgcatcgctgtgtttggcttatctgatgaagtaccacagtatgtccctgctggacgcccacacatggacaaagagcaggagaccaatcatcagaccaaataatggattttgggagcagctgatcaactacgaatttaagctcttcaacaacaatacggtgcggatgattaactcaccagttggcaacattcctgatatctacgagaaggatctcagaatgatgatttctatgtag

SEQ ID NO: 211211 - DNA, 878 bp, Artificial Sequence
  derived and/or modified sequence
gtggccgatagctggtcctctttctccaacacctagcctgagacttggcggcgcggctgctatcctgaactagcttggtaagtgttgtgtcccgaaccagcgtagagagacctcggaccagccgccttgatgacagcatccgcgtcctccttttcatcatctcagggtgtccagcagccctccatctacagcttctcccaaataaccagaagcttgtttctcagcaatggtgtggccgccaacgacaaactccttctgtccagcaatcgcatcaccgccattgtcaatgcctcggtggaaggtcaacgtattcttcgagggattcagtacataaaggtgcctgttaccgatgctcgtgactcgcgtctctacgacttttttgaccccattgctgatcttatccacaccatcgatatgaggcagggccgtacgctgctgcactgcatggctggagtgagccgttccgcctcactgtgccttgcgtacctcatgaaataccactccatgtcgctgctggacgcccatacatggaccaagtcgcgccgccccatcatccggcccaacaacggcttttgggaacagctcatcaattacgaattcaagctgtttaataacaacaccgtgcgcatgatcaactcgccggtaggtaacatccctgacatctatgagaaggacctacgtatgatgatatcaatgtaagccatcccggccagcccctgacatctgccatcgatcttgcaccaagactgaacttgaacactgacattttgttagtaaagaaaaccggatggtgccttgttaaagggcaagaaaaaagggagggggttggagttttgaacgtagtaagccttaccttaatagaattaaattcatgaaac

SEQ ID NO: 211212 - protein, 708 aa, Artificial Sequence
  derived and/or modified sequence
MATSTSTEAKSASWWNYFFLYDGSKVKEEGDPTRAGICYFYPSQTLLDQQELLCGQIAGVVRCVSDISDSPPTLVRLRKLKFAIKVDGDYLWVLGCAVELPDVSCKRFLDQLVGFFNFYNGPVSLAYENCSQEELSTEWDTFIEQILKNTSDLHKIFNSLWNLDQTKVEPLLLLKAARILQTCQRSPHILAGCILYKGLIVSTQLPPSLTAKVLLHRTAPQEQRLPTGEDAPQEHGAALPPNVQIIPVFVTKEEAISLHEFPVEQMTRSLASPAGLQDGSAQHHPKGGSTSALKENATGHVESMAWTTPDPTSPDEACPDGRKENGCLSGHDLESIRPAGLHNSARGEVLGLSSSLGKELVFLQEELDLSEIHIPEAQEVEMASGHFAFLHVPVPDGRAPYCKASLSASSSLEPTPPEDTAISSLRPPSAPEMLTQHGAQEQLEDHPGHSSQAPIPRADPLPRRTRRPLLLPRLDPGQRGNKLPTGEQGLDEDVDGVCESHAAPGLECSSGSANCQGAGPSADGISSRLTPAESCMGLVRMNLYTHCVKGLVLSLLAEEPLLGDSAAIEEVYHSSLASLNGLEVHLKETLPRDEAASTSSTYNFTHYDRIQSLLMANLPQVATPQDRRFLQAVSLMHSEFAQLPALYEMTVRNASTAVYACCNPIQETYFQQLAPAARSSGFPNPQDGAFSLSGKAKQKLLKHGVNLL

SEQ ID NO: 211213 - DNA, 2127 bp, Artificial Sequence
  derived and/or modified sequence
atggccaccagtacctccacagaggccaagtcggctagttggtggaactatttttttctttacgacggatccaaggtcaaagaggagggcgacccaacgcgagcaggaatttgttatttctatcctagccaaacactgctcgatcagcaagaactgctgtgcggtcagatcgcgggcgtggtgcgttgcgtgtccgatatctccgactcacccccaaccctggtgcgcctacgtaaattgaaattcgccataaaggtggacggagactatctgtgggtgctgggatgcgcggtcgagctcccagatgtctcgtgcaaacgttttctggatcagttggtgggcttcttcaatttctacaacggaccagtctcactcgcttacgagaattgttcacaggaggagctgtctacggaatgggacacatttatcgagcagatcctgaagaacacctccgacctgcacaaaattttcaactccctatggaacctcgatcagactaaggtcgaaccccttttactgcttaaggcggcgaggatcctgcaaacttgccagaggtcaccccacatcctggcaggctgtatactttacaagggtttgattgtatccacccagctgccacctagtctgactgccaaggtccttctgcaccgcacggctccacaggagcagcgactcccaaccggagaagacgccccccaagagcatggcgccgcactgccacctaatgttcagattattcccgtttttgtgactaaggaggaagccatcagcttacatgagttccctgtcgagcagatgaccaggagcctggcatcaccagccgggctccaggatggatccgcccagcaccacccaaaaggaggctctacctcagcacttaaggaaaatgccacaggccatgttgaatctatggcatggaccacccccgacccgacctctccagatgaagcttgccctgacggccggaaggagaacggatgtttgtctggccacgacctggagtctatccgaccagcaggcctgcacaacagtgcacgaggagaggtactggggctctcctctagcctcggcaaagagttggtcttcctgcaggaggagttggacctgtcagaaatacacatacccgaggcacaggaggtcgaaatggcctccggccatttcgctttcctgcacgtccccgttcctgatggaagggccccttattgcaaggcatctctgagcgcttcatcttcccttgagcctaccccgcctgaggacactgcgatatctagccttcgaccgccctcggcacctgaaatgctgactcagcacggtgcccaggaacagttagaagatcatccaggtcactccagccaggccccaatcccccgggctgaccctctgcctagacggacgcggcggccattgctgttacccaggctcgacccggggcaacgaggaaataaattgcccacaggtgaacaggggctggatgaagacgtggacggagtttgtgaaagccatgcagccccagggttggaatgttccagtggctcagccaattgtcagggcgctggtccctctgctgatgggatcagttctaggctcacgcccgccgagagctgcatgggtctggtgagaatgaacctgtacacgcactgtgtgaagggcttggttctcagcctgctagccgaggagccgctgctcggcgattcggcagcgatcgaagaagtatatcatagctctcttgcgagtctcaacggactcgaggtgcacctcaaggagacactcccacgagacgaggccgcctccacttcttctacctataattttacacactatgatcggatccaatctctgcttatggcaaacctgcctcaggtggcgactcctcaagaccgacgcttcttacaggctgtgagccttatgcactcagagttcgcacaactgcctgccctttatgagatgactgttcggaatgcaagcacagcagtgtatgcctgttgcaaccccatccaagaaacttattttcagcagctggcccccgcagcccgttcgtccggtttccccaacccacaggatggcgcctttagcctttctggcaaagcaaagcagaaacttctgaaacacggagttaacttactctag

SEQ ID NO: 211214 - DNA, 2127 bp, Artificial Sequence
  derived and/or modified sequence
atggcaacaagtacttctaccgaggccaaaagtgcctcttggtggaactatttcttcctttacgatggtagcaaagtgaaggaggaaggagaccccaccagggcgggcatatgttacttttatccatctcagactctgctagaccaacaggaactgctgtgtggccaaatagccggcgtagtgcgatgcgtaagtgacattagtgattctcccccgactttggtgagactgaggaagctgaagttcgcaatcaaggtcgacggtgattacctttgggtcctcggctgtgctgtcgaactgcctgacgtttcctgtaaaaggtttttagaccagcttgtaggcttcttcaacttttataacgggccagttagcctcgcctacgaaaactgctcccaagaggagctatccacagaatgggacacttttattgaacaaattttaaagaacactagtgatctccacaaaattttcaactcgctatggaacctggatcagacgaaagtggaacctttactgctgctgaaggcagctcgcatccttcagacgtgccaacgctcgccgcacatcctggctgggtgtatcttgtataaggggcttatcgtgagcacacagcttccaccatccctgaccgccaaagtgctgctgcacaggaccgctcctcaggaacaacgccttcccaccggcgaagatgctccacaagagcacggcgctgcactgccgcctaatgtacagattattccagtcttcgttacaaaggaggaggccatttctctacatgagtttccggtggagcagatgactcggtcactggcgtccccagccggcctccaagatggcagcgcacagcatcatcccaagggcgggtccacttcagcccttaaggagaacgccacaggccatgtcgagtccatggcatggactaccccggatccgacaagtcccgacgaagcttgtccagacggccgcaaggaaaacggatgccttagtggccacgacctggaaagtatccgtcccgcgggactgcacaactccgccagaggagaggttttgggcctgagttcctctctgggcaaagagctggtgtttctgcaggaagaactggatctcagcgagatacacatcccggaggcacaggaagttgaaatggcttctggacatttcgcgttcctccatgtacctgtaccggacgggcgcgctccctattgcaaggcgtccctcagcgcctctagtagtctggaacccacacctcccgaggatacagccatctcaagtttgaggccaccctccgcacccgaaatgctgacccaacacggcgcccaagaacagctcgaggaccatccagggcatagctcacaggcaccaattccccgagccgacccactgccccgacgaaccaggaggccgctcctgctgcctaggctggacccaggccagcgcgggaataagttgcctactggagaacaagggcttgacgaagacgtagatggggtgtgcgaaagtcacgccgcccccggattagaatgtagctccggatcagccaattgtcagggagcaggaccttccgccgacggtatctcctctagactcacacccgctgagtcatgtatgggcctggttcggatgaacctgtacacccactgcgtgaaggggctcgttctgagcctcttagctgaggagcccttgttaggggattcggcagccatcgaggaggtgtaccatagctcattagcttccctgaatggcctagaggttcatctgaaagagaccctgcctagagatgaggccgcctctacatccagcacttataacttcactcattacgatcggattcagagcctgttgatggcaaacttgccccaagtcgcaaccccccaggatcgcagatttctccaggctgtgagtctgatgcactcagaattcgctcaactgcctgccctgtacgagatgacggttaggaatgcctctaccgccgtctacgcctgttgtaatcccattcaagagacctattttcagcagcttgcccctgcggcacggtcctctggttttccgaacccacaagatggcgccttttccctctccggtaaggctaaacaaaaactccttaagcatggggtcaacttgctttag

SEQ ID NO: 211215 - DNA, 3786 bp, Artificial Sequence
  derived and/or modified sequence
gtgacctaaggcctctctgccgcgcgcgcagagccaaggcactgatgtttgaactggaaacttcaaaacgtttaataagagtcttcaggatgggtttgaactagacaagctagaaatttctttagaacaccagctctagcatgcatctcccacttttggctttcctggagaggagcttgaagaggtggttctgcagacagccacagtgatacttaggaaaccagaggaatggatttgacttttctgctaggattctctgttatagtttctccctgagttgtaagaggcatggaaatatacatgaaactgaagaacctgcaaggaagggaagtggaactttccatgctgagtgaaaactaaccaagtggcagttgtgactgaaaacactgaaacctaccacgtccagattcactggattgggggatagaggaacggtcacagctagggagaaagaagtgataccggaaaagaaaacctaaatgaagagaatgaggatgactgcacagtagatggccacctctacctccacagaggcaaagtcagcctcgtggtggaattatttttttctttatgatggttccaaggtaaaggaagaaggcgatccaacaagagctggcatttgttacttttatccttcccagaccctgctagaccaacaggagttgctttgtggacagattgctggagttgtccgctgtgtttctgacatttctgactctcctcctactcttgttcgtctgagaaaactgaagtttgccataaaagttgatggagattacctttgggtgctgggctgtgctgtggagctccctgatgtcagctgcaagcggtttctggatcagctagttggattctttaatttttacaatggacctgtttccctagcttatgagaactgttctcaggaagaactgagcacggagtgggacaccttcatcgagcaaattctgaaaaacaccagtgatctgcataagattttcaattccctctggaacttggaccaaactaaagtggagcccctgttgttgctgaaggcagcccgcattctgcagacctgccagcgctcgcctcacattctcgctggctgcatcctctataaaggactgattgtcagcacccaactcccgccctccctcaccgccaaggtcctgcttcaccgaacagcacctcaggagcagagactccctacgggagaggatgccccgcaggaacatggagcggcattgcccccgaatgtccagattatccctgtttttgtgaccaaagaggaagccattagtctccacgagttcccggtggaacagatgacaaggtctctagcatctccagcaggactccaggatggttcagcccagcaccatccaaagggtgggagcacatctgccctgaaagaaaacgccactggccatgtggaatccatggcctggaccaccccagatcccacatcccctgacgaagcttgtccagatggcaggaaggagaacggatgcttgtctggccatgatctggagagcatcaggcccgcaggactgcacaactctgccaggggtgaggttcttggcctcagctcctccctggggaaggaactagtctttctccaagaagaactcgacttgtctgaaatccacattccagaggctcaggaagtggaaatggcctcaggtcattttgccttcctacatgtgcctgttccagatggcagggctccttactgcaaggcatctctcagcgcctccagcagcctggaacccacgcctcctgaggacacagccatcagcagcttgcgccctccctctgctcctgagatgctgacccagcatggagcccaagagcagctcgaagaccatcctggccatagcagccaagcccccattcccagagcagaccctctccccagaaggacccgcaggcccttgttattgcctcgcttagatccaggacagagaggaaacaagcttcccacgggggaacaaggcctggatgaggatgttgatggggtctgtgaaagccacgcagcccctggtctggaatgcagttcaggctcagcaaactgtcagggtgctggcccctctgcagatggaatcagctccaggctgacaccagcagagtcctgcatggggctcgtgaggatgaatctctacactcactgcgtcaaagggctggtgctgtccctgctggctgaggagccgctgctgggagacagcgcagccatagaggaagtgtaccacagcagcctggcttcactgaatgggctggaagtccacctgaaagagacgctgcccagggatgaggcagcctccacgagcagcacctacaacttcacacattacgaccgcattcagagcttgctgatggcaaacctgccgcaggtggccaccccgcaggatcgccgcttcctccaggccgtcagcctgatgcatagcgaatttgcccagctgcccgcgctttatgaaatgactgtcagaaatgcctccacggctgtgtacgcctgttgcaaccccatccaggagacatatttccagcagctggcacctgcagcacggagctccggcttcccaaaccctcaggatggcgccttcagcctctccggcaaagcaaagcagaagctgctgaagcacggggtgaacttgctctgaactgcacccaggaggtgactgggaaggagaaaaccagcaaaggaagctctgccttttataattgaaaaggcccctctattttatttttcttgaaaacattcccttttttaggaaccaaatgatatttgagtttttgttattccttttgcagattgggatgtgttttgggggcaggggttagttcttcaggtcggcagacccagagcacttgataaagaactgtatttaatcggtagtgttggggccgggacgggcttggctccctctctgccatactgagcctgaggtatttcatatctcctgctgttccatcccagcttgaattggtgccacaagcttccaagttggcattttttctagaacctgatcgtccactagcccagagtgtgtgtgttcaacccccacaccaggtggtggtaggcggtgtgactgcacagcgaggtgccggatctgtgagcaggccgactccactcccacgccgcaggtaggtttctccagtgcgctcttgctgggaggtccggatcgttcctgcagggaagcggcagcacacggagaccacttggttgaattctgttggaactctactcaaatctaggggcgtcttctttggacccacaatgggggcaagccttaataatatggaagggagtttgggctttagagatccctttataaaagctctgggggctgagccctgagaattcagtgacaacaggaccaacctgcgctgcctttgactacaagtgggccgtgcagctggttcctctcgagcgagtgtccctaaataggagtttacaagatgtctgggggtaaaagcactgtgcttttcagtggtggctgcgtgaaagggagcgacactcagctgtgtgttcctgggcttgtgtggtacttagaacctcagttctattacgttatagtcagacatttttttgacagtatgagacagactgcaggatgaaaatatttgtcaaaatcttaactgaatgtttactggaagtacttgagattccatttgagagttgtattgttaataatttcatgtcagtgaactgatatctgatgtttatgatatggtgtctttttcttgaaacaagcttccaagggctagaaataaaatagccaaaaaatgctggagttctgagtaattaaa

SEQ ID NO: 211216 - DNA, 4497 bp, Artificial Sequence
  derived and/or modified sequence
ggtaggcggggcggcgcgtgacctaaggcctctctgccgcgcgcgcaggtacggggcagaagtcgcaggtacccagctgctgcccacatttctggtccagagtcccgaaccccgagcactgggatgcctggctactccgagccaaggcactgatgtttgaactggaaacttcaaaacgtttaataagagtcttcaggatgggtttgaactagacaagctagaaatttctttagaacaccagctctagcatgcatctcccacttttggctttcctggagaggagcttgaagaggtggttctgcagacagccacagtgatacttaggaaaccagaggaatggatttgacttttctgctaggattctctgttatagtttctccctgagttgtaagaggcatggaaatatacatgaaactgaagaacctgcaaggaagggaagtggaactttccatgctgagtgaaaactaaccaagtggcagttgtgactgaaaacactgaaacctaccacgtccagattcactggattgggggatagaggaacggtcacagctagggagaaagaagtgataccggaaaagaaaacctaaatgaagagaatgaggatgactgcacagtagatggccacctctacctccacagaggcaaagtcagcctcgtggtggaattatttttttctttatgatggttccaaggtaaaggaagaaggcgatccaacaagagctggcatttgttacttttatccttcccagaccctgctagaccaacaggagttgctttgtggacagattgctggagttgtccgctgtgtttctgacatttctgactctcctcctactcttgttcgtctgagaaaactgaagtttgccataaaagttgatggagattacctttgggtgctgggctgtgctgtggagctccctgatgtcagctgcaagcggtttctggatcagctagttggattctttaatttttacaatggacctgtttccctagcttatgagaactgttctcaggaagaactgagcacggagtgggacaccttcatcgagcaaattctgaaaaacaccagtgatctgcataagattttcaattccctctggaacttggaccaaactaaagtggagcccctgttgttgctgaaggcagcccgcattctgcagacctgccagcgctcgcctcacattctcgctggctgcatcctctataaaggactgattgtcagcacccaactcccgccctccctcaccgccaaggtcctgcttcaccgaacagcacctcaggagcagagactccctacgggagaggatgccccgcaggaacatggagcggcattgcccccgaatgtccagattatccctgtttttgtgaccaaagaggaagccattagtctccacgagttcccggtggaacagatgacaaggtctctagcatctccagcaggactccaggatggttcagcccagcaccatccaaagggtgggagcacatctgccctgaaagaaaacgccactggccatgtggaatccatggcctggaccaccccagatcccacatcccctgacgaagcttgtccagatggcaggaaggagaacggatgcttgtctggccatgatctggagagcatcaggcccgcaggactgcacaactctgccaggggtgaggttcttggcctcagctcctccctggggaaggaactagtctttctccaagaagaactcgacttgtctgaaatccacattccagaggctcaggaagtggaaatggcctcaggtcattttgccttcctacatgtgcctgttccagatggcagggctccttactgcaaggcatctctcagcgcctccagcagcctggaacccacgcctcctgaggacacagccatcagcagcttgcgccctccctctgctcctgagatgctgacccagcatggagcccaagagcagctcgaagaccatcctggccatagcagccaagcccccattcccagagcagaccctctccccagaaggacccgcaggcccttgttattgcctcgcttagatccaggacagagaggaaacaagcttcccacgggggaacaaggcctggatgaggatgttgatggggtctgtgaaagccacgcagcccctggtctggaatgcagttcaggctcagcaaactgtcagggtgctggcccctctgcagatggaatcagctccaggctgacaccagcagagtcctgcatggggctcgtgaggatgaatctctacactcactgcgtcaaagggctggtgctgtccctgctggctgaggagccgctgctgggagacagcgcagccatagaggaagtgtaccacagcagcctggcttcactgaatgggctggaagtccacctgaaagagacgctgcccagggatgaggcagcctccacgagcagcacctacaacttcacacattacgaccgcattcagagcttgctgatggcaaacctgccgcaggtggccaccccgcaggatcgccgcttcctccaggccgtcagcctgatgcatagcgaatttgcccagctgcccgcgctttatgaaatgactgtcagaaatgcctccacggctgtgtacgcctgttgcaaccccatccaggagacatatttccagcagctggcacctgcagcacggagctccggcttcccaaaccctcaggatggcgccttcagcctctccggcaaagcaaagcagaagctgctgaagcacggggtgaacttgctctgaactgcacccaggaggtgactgggaaggagaaaaccagcaaaggaagctctgccttttataattgaaaaggcccctctattttatttttcttgaaaacattcccttttttaggaaccaaatgatatttgagtttttgttattccttttgcagattgggatgtgttttgggggcaggggttagttcttcaggtcggcagacccagagcacttgataaagaactgtatttaatcggtagtgttggggccgggacgggcttggctccctctctgccatactgagcctgaggtatttcatatctcctgctgttccatcccagcttgaattggtgccacaagcttccaagttggcattttttctagaacctgatcgtccactagcccagagtgtgtgtgttcaacccccacaccaggtggtggtaggcggtgtgactgcacagcgaggtgccggatctgtgagcaggccgactccactcccacgccgcaggtaggtttctccagtgcgctcttgctgggaggtccggatcgttcctgcagggaagcggcagcacacggagaccacttggttgaattctgttggaactctactcaaatctaggggcgtcttctttggacccacaatgggggcaagccttaataatatggaagggagtttgggctttagagatccctttataaaagctctgggggctgagccctgagaattcagtgacaacaggaccaacctgcgctgcctttgactacaagtgggccgtgcagctggttcctctcgagcgagtgtccctaaataggagtttacaagatgtctgggggtaaaagcactgtgcttttcagtggtggctgcgtgaaagggagcgacactcagctgtgtgttcctgggcttgtgtggtacttagaacctcagttctattacgttatagtcagacatttttttgacagtatgagacagactgcaggatgaaaatatttgtcaaaatcttaactgaatgtttactggaagtacttgagattccatttgagagttgtattgttaataatttcatgtcagtgaactgatatctgatgtttatgatatggtgtctttttcttgaaacaagcttccaagggctagaaataaaatagccaaaaaatgctggagttctgagtaattaaatggcagcatttttttgtgacaaaggtaagggttaagacagtgtgtgtgtgtgtgtgtgtgtgtgtgtgtgtgtgtgtgcgcgcgcgcgcgcgcgcgtaacgtgggcgcatccctcttttccttccctgggttcagtgtggctgggtaaggaccgtctgtttgtagggctgccaggctgcagcctgctgctccagggagcaccagctgcagctgatccaatacaccaagcctgtgtctccctcttctatcacctctctccaggatctctgctgtctcttggatcccatctgcctagatggaagaggatcctatccgaagctaggataaatgttgtcttactcctctgctatgttctcccagaaaaaattgattacaagttctctgctgtggttgctgcagctccaggaagtccccgcaatgtctcacgttgtctttgaccagtggtccccagtaccaggccagcgaagacaactttataatgtcatttgtgttgtgaaaattcttccactgacccaaaatggaaccgtacaaagcctatccgtgtatatggaaaagtctcatgcacctggattaactcagaaaaagtaaagtcctgaaacttca

SEQ ID NO: 211217 - DNA, 2127 bp, Artificial Sequence
  derived and/or modified sequence
atggccaccagcaccagcacagaggccaagagcgcctcctggtggaactacttcttcctgtatgatggcagcaaggtgaaggaggagggggaccccaccagggctggcatctgctacttctaccccagccagaccctgctggaccagcaggagctgctgtgtggccagattgctggggtggtgcgctgtgtgtctgacatcagtgacagcccccccaccctggtgcggctgaggaagctgaagtttgccatcaaggtggatggagactacctgtgggtgctgggctgtgctgtggagctgcctgatgtgtcctgcaagcgcttcctggaccagctggtgggcttcttcaacttctacaacggccctgtgtccctggcctatgagaactgcagccaggaggagctgagcacagagtgggacaccttcatcgagcagatcctgaagaacaccagtgacctgcacaagatcttcaacagcctgtggaacctggaccagaccaaggtggagcccctgctgctgctgaaggccgcccgcatcctgcagacctgccagaggagcccccacatcctggccggctgcatcctgtacaagggcctcatcgtgtccacccagctgccccccagcctgacagccaaggtgctgctgcacaggacagccccccaggagcagaggctgcccactggagaagatgccccccaggagcacggggccgccctgccccccaacgtgcagatcatccctgtgtttgtgaccaaggaggaggccatcagcctgcacgagttccctgtggagcagatgaccaggagcctggccagccctgctggcctgcaggacggcagcgcccagcaccaccccaagggcggcagcaccagcgccctgaaggaaaatgccaccggccacgtggagagcatggcctggaccaccccagaccccaccagcccagatgaggcctgcccagatggcaggaaagaaaatggctgcctgagcggccatgacctggagagcatccggcctgctggcctgcacaacagcgcccggggggaggtgctgggcctgagcagcagcctgggcaaggagctggtgttcctgcaggaggagctggacctgtctgagatccacatccctgaggcccaggaggtggagatggccagcggccactttgccttcctgcacgtgcctgtgcctgatggccgggccccctactgcaaggccagcctgagcgccagcagcagcctggagcccaccccacctgaggacacagccatcagcagcctgcggcccccatctgcccctgagatgctgacccagcacggggcccaggagcagctggaggaccaccctggccacagcagccaggcccccatccccagggctgaccccctgcccaggaggacccggcggcccctgctgctgccccggctggaccccggccagaggggcaacaagctgcccactggagagcagggcctggatgaagatgtggatggagtgtgtgagagccacgccgcccctggcctggagtgcagcagcggcagcgccaactgccagggcgccggccccagcgcagatggcatcagcagccggctgaccccagctgagagctgcatgggcctggtgaggatgaacctgtacacccactgtgtgaagggcctggtgctgagcctgctggccgaggagcccctgctgggggacagcgctgccatcgaggaggtgtaccacagcagcctggccagcctgaatggcctggaggtgcacctgaaggagaccctgcccagagatgaagctgccagcaccagcagcacctacaacttcacccactatgaccgcatccagagcctgctgatggccaacctgccccaggtggccaccccccaggaccggcgcttcctgcaggccgtgtccctgatgcacagcgagtttgcccagctgcctgccctgtatgagatgacagtgagaaatgccagcacagctgtgtatgcctgctgcaaccccatccaggagacctacttccagcagctggccccagctgcccggagcagcggcttccccaacccccaggatggagccttcagcctgagcggcaaggccaagcagaagctgctgaagcatggagtgaacctgctgtag

SEQ ID NO: 211218 - DNA, 2127 bp, Artificial Sequence
  derived and/or modified sequence
atggccaccagcaccagcaccgaggccaagagcgccagctggtggaattacttttttctgtatgatgggtcaaaggtgaaggaggaaggcgacccaactagagccggtatttgttatttctacccatcccagacgctgttagaccagcaggaactgctctgcggccagatcgcaggagtcgtaagatgcgtgtcagatatttccgacagccctccgacattggtccgcctgcgtaaactgaaattcgccatcaaggtggacggcgattacctttgggtgctcggctgcgccgtcgaactccctgacgtctcatgtaagcggttccttgaccagctggtgggcttctttaatttttacaacggaccggtgtccctggcctacgagaactgttcacaagaggagttgtccaccgagtgggataccttcatagagcagattctgaaaaacacctccgacctgcacaaaatatttaacagcttgtggaaccttgatcagacaaaagtagagccattactgttactcaaagcggctaggattctccaaacatgtcaaaggtcaccgcatatcctggctgggtgcatcctatacaaaggacttatcgtgtcaactcagttaccgcctagtctcacagcaaaggttctgttacaccgcaccgccccccaggaacagcgcctaccgacaggcgaagacgcccctcaagaacatggggccgccctcccccctaacgtacagattatccctgtttttgttacaaaggaggaagcgattagcctccacgagtttccagtagagcagatgacacggtccttggccagccctgcaggacttcaggacggaagcgctcagcatcaccctaagggagggagcacaagcgctttgaaagaaaacgctaccggacatgttgagtcgatggcttggactacacccgatcccactagccccgacgaagcatgtcccgatggcagaaaagagaatgggtgcctttctggccacgacctcgagtccatccggcccgccggcctgcataatagcgctaggggtgaggtactgggtctgagtagctctttagggaaggagctcgtattcctccaagaagagctcgacttatcagagatacacatccctgaggctcaggaagtggaaatggccagtggccacttcgccttcctgcatgtgcccgtccccgacggcagagctccttactgcaaggcctcactgtcagcttccagttcactggaacctactccacctgaagacactgcaatctcatctctcaggcccccatcagcacctgaaatgctgacccagcacggggctcaggagcagctggaagatcaccctggacacagcagccaggcccctatccccagagcagaccccctgccccgccggactagacgcccattactgttgccaaggttagaccccggtcagaggggaaataagctccctacgggtgagcaaggtttggacgaagatgtagacggagtttgtgaatcgcacgccgcaccaggactcgagtgtagcagtggctcagccaattgccaaggagcgggaccctcagcggacggtatttcaagtcgcttgacaccagcggaaagttgtatgggtctggtgcggatgaacctatacacccactgcgtcaaagggctcgttctcagccttcttgcagaggagcctctcctgggggacagcgcggcaattgaagaagtctatcactcctcgttagcctctcttaatggattggaagttcatttaaaagagaccctgcctagggacgaggccgctagcactagcagcacctataattttacccactacgatcggattcaatctctgctgatggccaatcttcctcaggtggcaaccccccaggatagacggttcctccaggccgttagcttgatgcactctgaatttgcccagctgcctgcgctttacgagatgactgtaagaaatgcttccactgccgtgtacgcatgctgtaacccgatacaggagacttatttccagcagctggctcctgcagccagatcaagcggctttccaaatccccaggatggcgcatttagcttgtcaggcaaagccaaacagaaacttttgaaacatggggtcaacctgctctag

SEQ ID NO: 211219 - DNA, 2127 bp, Artificial Sequence
  derived and/or modified sequence
atggccaccagcaccagcaccgaggccaagagcgccagctggtggaattatttttttttatacgacgggtctaaagtgaaagaagagggtgatcccacgcgcgctgggatctgctatttttacccttctcagaccctgttggaccaacaggagcttctgtgtggacaaatcgctggagtcgtccggtgcgtctccgacatcagtgactccccccccacacttgtaaggttgagaaaactgaaattcgctatcaaggtggacggggattacctctgggtactaggatgtgctgtggagctccctgacgtatcatgtaaacggttcctcgatcaactggtggggtttttcaacttctataacggtcccgtttctctcgcatacgaaaattgctcacaggaggaactgagcaccgagtgggatacattcatagaacagatcctcaagaatacttccgacctccacaagatctttaattctttgtggaatctagaccagactaaagtggaaccactcttactcctaaaggctgctcgaatcctacagacttgccagaggtctcctcatattttggccgggtgtattctctacaagggcctcatcgtctccacccaacttcccccttccctaaccgcaaaggtgttgctccatcgcactgcacctcaagagcaaagattacctacaggagaggacgccccacaggagcacggtgctgccctgccacccaatgtgcaaattatcccagtgtttgtgactaaagaggaggcgatcagtcttcacgagtttcccgtggagcaaatgacaagatctctagccagtccagccggacttcaggacggaagtgcgcaacatcacccaaaaggagggtctacgtcagcattgaaggagaacgcgaccggtcacgtagagtccatggcgtggacaacgccggatcccaccagtcccgatgaggcctgtccggatggaaggaaggaaaatggctgtctgtccgggcacgatcttgagtcaattcgtcccgccggcctgcacaacagtgctcgcggagaagttctgggactgagcagctcgcttggcaaggaactggtgttccttcaggaagagttagatctgtcagaaattcacattccggaagcacaagaagtcgagatggcatccggtcactttgcttttctgcacgtgccggtgcccgacgggagagccccttactgcaaggcctccttgagcgcgagctcaagtcttgagccaactccccccgaggacacagccatctcttccctcaggccgcccagtgccccggagatgctaacacagcatggagctcaggagcagctggaggatcacccaggacactccagccaggcacctatccctcgcgctgatccattgccaaggcgcactcgcagaccccttctcctgcctagactcgatccgggacaaagagggaacaagctccctactggagagcaggggctggatgaagacgttgacggagtgtgtgaatcccatgccgcgcctggtctcgagtgttcatcaggaagcgcaaattgtcagggagcaggaccaagcgccgacggcatatcctcccgcctgacgccagccgagagttgtatgggtctcgttagaatgaatttgtatacccactgcgtcaagggtcttgtgctctctctcctggctgaagagcctctcctcggggattctgccgcaatagaggaagtatatcactctagcttggccagtttgaacgggctagaagttcatctgaaagagactctgccccgggacgaggccgcaagcaccagcagtacctacaacttcacacattacgataggattcaatccctcttgatggctaatcttccacaagtcgccacaccccaggatagaagatttctgcaggctgtatccctgatgcattccgagttcgcccagttgcccgccctatacgaaatgacggttcgcaatgctagcacggcagtgtacgcatgctgcaatcctattcaggaaacctatttccagcagttagctccagcagcacgcagcagtggattccctaacccacaagatggagcatttagtctgagcggaaaagcgaaacagaaactcctgaagcacggagtgaatttgttatag

SEQ ID NO: 211220 - DNA, 2127 bp, Artificial Sequence
  derived and/or modified sequence
atggccacttctacctccactgaagccaagtcagccagctggtggaattacttctttctatatgatggatctaaagtcaaagaagagggggaccccacccgcgctggcatttgctacttttatcctagccagaccttgctggaccagcaagagctgctgtgtgggcaaatagctggagtggtcagatgtgtgtcagatatttctgactcccccccaaccctggtgagactgagaaagcttaagttcgcaatcaaggtggatggtgattacctgtgggtccttggctgtgccgttgagctgcccgatgtgtcgtgtaagcgtttcctggatcaattggtcggcttttttaatttctataacgggccagtgagcctggcctatgagaattgttcccaggaggagctcagcaccgaatgggatactttcatcgaacagattttgaaaaacacctccgaccttcacaagatatttaactctctgtggaacttggatcagaccaaggttgagccgcttctgttactcaaagctgccagaatactgcagacctgtcaacgatcccctcacatcttagcaggatgcatcctctataaaggactcatcgtgagtacccaacttccaccttccttgacagcgaaggtcctgctgcatagaaccgctccccaggagcagcggctcccaacaggcgaagatgctccacaggagcacggcgctgctctgccacctaatgtgcagattatcccagtattcgtcacaaaagaggaagctatttctctgcatgaatttcccgtagaacagatgaccagaagcctggcgtctccagcaggactgcaggatgggagcgctcagcaccaccccaaaggtggcagcacaagcgccctaaaggaaaatgccacagggcatgttgaaagcatggcttggactacgccagacccaacgtctcccgacgaggcttgccctgatggcagaaaggaaaatggctgtctctccggtcatgacctggagtctattaggcctgccggtttgcacaattccgcacgtggcgaagtgcttgggctgagtagctcccttggaaaagagctcgtctttttgcaggaggagcttgatctcagtgagatccatatcccagaagcccaagaagttgagatggcctcagggcacttcgcgtttctacacgtacctgttcccgatggccgagcgccatattgcaaagcatctcttagtgcctcctcgtctctcgagccgactccaccagaggacacagcaatcagttctctgaggccccctagcgctcctgaaatgttgacacagcacggcgcacaggagcaattggaggaccacccagggcatagctcacaggccccaataccccgtgccgaccccttgcctcgcaggaccagacggcctcttctgctgccaaggcttgatcccggtcaacggggaaacaaactgccaacaggggaacagggtctcgacgaggacgtggatggtgtgtgtgaatcccacgctgctccaggactcgaatgctcgagcggatcggctaactgccagggtgcaggccctagcgccgatgggattagttctcggctgactcccgcagaaagctgcatgggcctggtgagaatgaatttgtatacacactgcgtaaaggggctagttctgtcccttctggctgaggagcccctccttggcgattccgccgcaatcgaggaggtctatcatagcagcctggcctcccttaacggactcgaggtgcacttgaaggaaacacttcctcgtgatgaagccgcttcaaccagctcaacctacaactttacgcattacgacaggatccagtcactcctcatggcgaatctgccccaggtggccacaccgcaagacaggaggtttcttcaagctgtcagtctgatgcattctgagtttgcccagctgcctgctctctatgagatgaccgtgcgcaatgcctccacagcggtgtacgcgtgctgtaatcccattcaggagacctacttccagcagctggccccagccgcaaggagctccgggttcccaaatccgcaagacggcgcatttagtttgtcaggaaaagctaagcagaagcttctcaaacatggggtcaatttgctttag

SEQ ID NO: 211221 - DNA, 2127 bp, Artificial Sequence
  derived and/or modified sequence
atggcaacatctacctctacagaagcaaaaagtgcgtcttggtggaactactttttcctgtatgatgggtctaaagtgaaggaggaaggagacccgacacgtgccggaatttgttacttttatcctagccaaaccctgttagatcagcaggaattactctgcggccagattgctggcgttgttcgctgcgtttccgatatttcagacagccccccaacacttgttaggctgagaaagctaaaatttgctattaaggtcgatggagattacctatgggtgctgggctgcgccgtggagctacccgatgtctcctgtaaacggttccttgatcaattagtggggttctttaacttctataacggacctgtctctctagcatacgagaattgttcccaagaggaactgtccaccgaatgggatacatttatcgaacagatcctcaagaacactagcgacttgcacaagatttttaactctctttggaacctggaccagaccaaggtagaacctctcctattgctcaaagcggcacggatcttgcagacttgccagagaagcccacatattttggcgggatgtattctctataagggactgatcgtgtcaactcaactgcccccttctctgactgctaaagtgttgctgcatcgcaccgcacctcaggaacagcggctccccaccggagaagatgcaccacaggagcacggagcggctctgcctcccaacgtccaaatcatccccgtgttcgttaccaaagaagaggccatcagtctgcacgagttccctgtggagcaaatgacccgatccctggctagccccgcagggctgcaggatggctccgctcagcaccatccaaaaggaggtagcactagtgccctaaaagagaacgccactggacatgtggaatcgatggcctggacaacgcctgaccctacttctccggatgaagcctgtcccgacggccgtaaggagaacggttgccttagtggccatgatttagagtccatcagacctgcgggacttcacaattctgcaagaggggaggtgttgggcctcagctcatctctcggaaaagaactagtgttcctacaggaggagcttgacctgagcgagatacatatccctgaggcacaggaggtggaaatggcctctggccattttgccttcttgcacgtgccagtgcctgatggcagagctccgtactgtaaggcctccctctcggcctctagcagtctagaacccaccccccctgaggacactgcaataagtagtttacgccctcccagtgctccggaaatgctgacgcagcatggggctcaggagcagctggaagatcatcccggtcattcatcccaggctcctattccccgtgccgaccctctgcccaggcgaactcgtcgacccctcttgctccctagactagacccagggcagcggggaaataagcttccaaccggagaacagggactcgacgaagatgttgatggcgtttgcgagagccatgccgctcctggtcttgagtgcagctccggcagtgctaattgccagggcgcaggaccttccgctgatggaatttcgtcccggttgacaccagccgaatcttgcatgggtttggtccgaatgaacctttacacacactgtgttaaggggctggttctgagtctattagcagaagagcccctgttgggagattccgctgcaattgaggaggtttaccacagttctctggcctccctaaacgggttggaagtgcatcttaaagaaacactgccacgggacgaagctgcgtctacgtcttcaacctacaactttacgcactacgaccgaatccagtctctgctaatggcaaatttacctcaggttgccacaccacaggaccggagattcctgcaggccgtgtctctaatgcacagcgaatttgcacaattgccagccctgtatgagatgaccgtgcggaacgcatccacagctgtgtatgcttgctgtaacccaatccaggaaacctactttcaacagctagctcctgcagccaggagttccggcttccctaatcctcaagatggggctttctctcttagcggtaaagcaaagcagaagttgttaaaacacggagtgaacctgctatag

SEQ ID NO: 211222 - DNA, 2127 bp, Artificial Sequence
  derived and/or modified sequence
atggccaccagcaccagcaccgaggccaagagcgccagctggtggaactacttcttcctgtacgacggcagcaaggtgaaggaggagggcgaccccaccagagccggcatctgctacttctaccccagccagaccctgctggaccagcaggagctgctgtgcggccagatcgccggcgtggtgagatgcgtgagcgacatcagcgacagcccccccaccctggtgagactgagaaagctgaagttcgccatcaaggtggacggcgactacctgtgggtgctgggctgcgccgtggagctgcccgacgtgagctgcaagagattcctggaccagctggtgggcttcttcaacttctacaacggccccgtgagcctggcctacgagaactgcagccaggaggagctgagcaccgagtgggacaccttcatcgagcagatcctgaagaacaccagcgacctgcacaagatcttcaacagcctgtggaacctggaccagaccaaggtggagcccctgctgctgctgaaggccgccagaatcctgcagacctgccagagaagcccccacatcctggccggctgcatcctgtacaagggcctgatcgtgagcacccagctgccccccagcctgaccgccaaggtgctgctgcacagaaccgccccccaggagcagagactgcccaccggcgaggacgccccccaggagcacggcgccgccctgccccccaacgtgcagatcatccccgtgttcgtgaccaaggaggaggccatcagcctgcacgagttccccgtggagcagatgaccagaagcctggccagccccgccggcctgcaggacggcagcgcccagcaccaccccaagggcggcagcaccagcgccctgaaggagaacgccaccggccacgtggagagcatggcctggaccacccccgaccccaccagccccgacgaggcctgccccgacggcagaaaggagaacggctgcctgagcggccacgacctggagagcatcagacccgccggcctgcacaacagcgccagaggcgaggtgctgggcctgagcagcagcctgggcaaggagctggtgttcctgcaggaggagctggacctgagcgagatccacatccccgaggcccaggaggtggagatggccagcggccacttcgccttcctgcacgtgcccgtgcccgacggcagagccccctactgcaaggccagcctgagcgccagcagcagcctggagcccaccccccccgaggacaccgccatcagcagcctgagaccccccagcgcccccgagatgctgacccagcacggcgcccaggagcagctggaggaccaccccggccacagcagccaggcccccatccccagagccgaccccctgcccagaagaaccagaagacccctgctgctgcccagactggaccccggccagagaggcaacaagctgcccaccggcgagcagggcctggacgaggacgtggacggcgtgtgcgagagccacgccgcccccggcctggagtgcagcagcggcagcgccaactgccagggcgccggccccagcgccgacggcatcagcagcagactgacccccgccgagagctgcatgggcctggtgagaatgaacctgtacacccactgcgtgaagggcctggtgctgagcctgctggccgaggagcccctgctgggcgacagcgccgccatcgaggaggtgtaccacagcagcctggccagcctgaacggcctggaggtgcacctgaaggagaccctgcccagagacgaggccgccagcaccagcagcacctacaacttcacccactacgacagaatccagagcctgctgatggccaacctgccccaggtggccaccccccaggacagaagattcctgcaggccgtgagcctgatgcacagcgagttcgcccagctgcccgccctgtacgagatgaccgtgagaaacgccagcaccgccgtgtacgcctgctgcaaccccatccaggagacctacttccagcagctggcccccgccgccagaagcagcggcttccccaacccccaggacggcgccttcagcctgagcggcaaggccaagcagaagctgctgaagcacggcgtgaacctgctgtag

SEQ ID NO: 211223 - protein, 627 aa, Artificial Sequence
  derived and/or modified sequence
MNASSEGESFAGSVQIPGGTTVLVELTPDIHICGICKQQFNNLDAFVAHKQSGCQLTGTSAAAPSTVQFVSEETVPATQTQTTTRTITSETQTITGCQFKTAYGMKDMERHLKIHTGDKPHKCEVCGKCFSRKDKLKTHMRCHTGVKPYKCKTCDYAAADSSSLNKHLRIHSDERPFKCQICPYASRNSSQLTVHLRSHTGDAPFQCWLCSAKFKISSDLKRHMRVHSGEKPFKCEFCNVRCTMKGNLKSHIRIKHSGNNFKCPHCDFLGDSKATLRKHSRVHQSEHPEKCSECSYSCSSKAALRIHERIHCTDRPFKCNYCSFDTKQPSNLSKHMKKFHGDMVKTEALERKDTGRQSSRQVAKLDAKKSFHCDICDASFMREDSLRSHKRQHSEYSESKNSDVTVLQFQIDPSKQPATPLTVGHLQVPLQPSQVPQFSEGRVKIIVGHQVPQANTIVQAAAAAVNIVPPALVAQNPEELPGNSRLQILRQVSLIAPPQSSRCPSEAGAMTQPAVLLTTHEQTDGATLHQTLIPTASGGPQEGSGNQTFITSSGITCTDFEGLNALIQEGTAEVTVVSDGGQNIAVATTAPPVFSSSSQQELPKQTYSIIQGAAHPALLCPADSIPD

SEQ ID NO: 211224 - DNA, 1884 bp, Artificial Sequence
  derived and/or modified sequence
atgaacgccagcagcgagggcgagagcttcgccggcagcgtgcagatccccggcggcaccaccgtgctggtggagctgacccccgacatccacatctgcggcatctgcaagcagcagttcaacaacctggacgccttcgtggcccacaagcagagcggctgccagctgaccggcaccagcgccgccgcccccagcaccgtgcagttcgtgagcgaggagaccgtgcccgccacccagacccagaccaccaccagaaccatcaccagcgagacccagaccatcaccggctgccagttcaagaccgcctacggcatgaaggacatggagagacacctgaagatccacaccggcgacaagccccacaagtgcgaggtgtgcggcaagtgcttcagcagaaaggacaagctgaagacccacatgagatgccacaccggcgtgaagccctacaagtgcaagacctgcgactacgccgccgccgacagcagcagcctgaacaagcacctgagaatccacagcgacgagagacccttcaagtgccagatctgcccctacgccagcagaaacagcagccagctgaccgtgcacctgagaagccacaccggcgacgcccccttccagtgctggctgtgcagcgccaagttcaagatcagcagcgacctgaagagacacatgagagtgcacagcggcgagaagcccttcaagtgcgagttctgcaacgtgagatgcaccatgaagggcaacctgaagagccacatcagaatcaagcacagcggcaacaacttcaagtgcccccactgcgacttcctgggcgacagcaaggccaccctgagaaagcacagcagagtgcaccagagcgagcaccccgagaagtgcagcgagtgcagctacagctgcagcagcaaggccgccctgagaatccacgagagaatccactgcaccgacagacccttcaagtgcaactactgcagcttcgacaccaagcagcccagcaacctgagcaagcacatgaagaagttccacggcgacatggtgaagaccgaggccctggagagaaaggacaccggcagacagagcagcagacaggtggccaagctggacgccaagaagagcttccactgcgacatctgcgacgccagcttcatgagagaggacagcctgagaagccacaagagacagcacagcgagtacagcgagagcaagaacagcgacgtgaccgtgctgcagttccagatcgaccccagcaagcagcccgccacccccctgaccgtgggccacctgcaggtgcccctgcagcccagccaggtgccccagttcagcgagggcagagtgaagatcatcgtgggccaccaggtgccccaggccaacaccatcgtgcaggccgccgccgccgccgtgaacatcgtgccccccgccctggtggcccagaaccccgaggagctgcccggcaacagcagactgcagatcctgagacaggtgagcctgatcgcccccccccagagcagcagatgccccagcgaggccggcgccatgacccagcccgccgtgctgctgaccacccacgagcagaccgacggcgccaccctgcaccagaccctgatccccaccgccagcggcggcccccaggagggcagcggcaaccagaccttcatcaccagcagcggcatcacctgcaccgacttcgagggcctgaacgccctgatccaggagggcaccgccgaggtgaccgtggtgagcgacggcggccagaacatcgccgtggccaccaccgccccccccgtgttcagcagcagcagccagcaggagctgcccaagcagacctacagcatcatccagggcgccgcccaccccgccctgctgtgccccgccgacagcatccccgactag

SEQ ID NO: 211225 - DNA, 1884 bp, Artificial Sequence
  derived and/or modified sequence
atgaatgcatcttccgaaggggaaagctttgcagggagcgttcagataccggggggtactaccgtgctggttgagttgacacctgatattcatatttgcgggatctgtaagcagcagtttaataatctcgacgctttcgtggcccacaagcagtctggatgccaactgactggcacatctgctgccgcaccctctaccgtgcagtttgtaagcgaggaaaccgtcccagctactcagacgcagaccactacaaggactatcacgtccgagacacagacaatcactggctgtcagttcaagacagcgtatggcatgaaggatatggaaagacacctaaagattcacacaggcgataagcctcataaatgcgaagtctgcggcaagtgtttctcccggaaggataagttaaagacccatatgaggtgccacacgggtgtgaagccttacaagtgtaagacttgtgactacgccgcggctgatagtagttcactgaacaagcacctgcggatccattcagacgaaagacctttcaagtgccagatatgcccttacgcatctcggaacagttcacagctaaccgtccacctaagatcccacaccggggacgcaccctttcagtgttggctctgttccgcaaagttcaaaatttcatccgatctgaaaaggcacatgcgggttcactctggcgagaaaccgttcaagtgcgaattctgtaatgtgaggtgtactatgaaaggtaacctcaaatcacacatccggattaaacattcaggaaataacttcaagtgccctcactgcgattttctgggggactccaaggccactctcaggaaacattctagggtccatcaaagcgagcacccagagaagtgttctgagtgtagctatagctgttcgtccaaggcagctttgcgcattcacgagagaatacactgtacggatagaccattcaagtgtaactattgctccttcgacactaaacagccatctaatcttagtaaacacatgaagaaatttcacggcgacatggtaaagaccgaggccctggagcggaaggacaccggccgtcagagcagtagacaagtcgcgaagctggacgctaagaagtccttccactgtgacatttgcgacgcctcctttatgcgcgaggacagcttgcgctcacacaaacgtcaacattctgagtacagcgaatcaaaaaattcagatgtaaccgttctgcagtttcagatagacccttccaagcaacctgcaacccccttaacggtaggacatctgcaggttcccctccagccatctcaagtgccccaattcagtgagggaagagtgaaaattattgttggacaccaggtcccgcaggctaatactatcgtccaagccgcagctgcagctgtcaacatcgtgccacccgcactggttgcacagaaccccgaggaactgcctggtaattctcgcctccagattctccgccaagtgtcgctgattgcaccaccacagtcctctaggtgcccttctgaagcaggggctatgacacagccagcggtcctgctcaccacacatgagcagactgatggggccaccttacaccaaactctcattcctaccgcaagtgggggtccccaggaggggagcggcaatcaaacgttcattacatcctccggaatcacctgcacagatttcgaagggctgaacgctctgatccaggagggcaccgcggaggtgacagtggttagcgacggagggcagaatattgctgttgcgactaccgctccgccagtgttctcatcatctagccagcaggagctacccaagcagacatatagcattatccagggagccgcccatcctgccctgctgtgtcccgcagattcaatccctgattag

SEQ ID NO: 211226 - DNA, 1884 bp, Artificial Sequence
  derived and/or modified sequence
atgaatgccagcagcgagggggagagctttgctggctctgtgcagatccctgggggcaccaccgtgctggtggagctgaccccagacatccacatctgtggcatctgcaagcagcagttcaacaacctggatgcctttgtggcccacaagcagagcggctgccagctgaccggcaccagcgctgctgcccccagcacagtgcagtttgtgtctgaggagaccgtgcctgccacccagacccagaccaccaccaggaccatcaccagcgagacccagaccatcaccggctgccagttcaagacagcctacggcatgaaggacatggagcggcacctgaagatccacactggagacaagccccacaagtgtgaggtgtgtgggaagtgcttcagcaggaaggacaagctgaagacccacatgcgctgccacactggagtgaagccctacaagtgcaagacctgtgactatgctgctgctgacagcagcagcctgaacaagcacctgcgcatccacagtgatgagcggcccttcaagtgccagatctgcccctatgccagcaggaacagcagccagctgactgtgcacctgcggagccacactggagatgcccccttccagtgctggctgtgcagcgccaagttcaagatcagcagtgacctgaagaggcacatgagggtgcacagcggggagaagcccttcaagtgtgagttctgcaatgtgcgctgcaccatgaagggcaacctgaagagccacatccgcatcaagcacagcggcaacaacttcaagtgcccccactgtgacttcctgggggacagcaaggccaccctgaggaagcacagccgggtgcaccagagcgagcaccctgagaagtgcagtgaatgttcctacagctgcagcagcaaggccgccctgcgcatccacgagcgcatccactgcacagaccggcccttcaagtgcaactactgcagctttgacaccaagcagcccagcaacctgagcaagcacatgaagaagttccacggggacatggtgaagacagaggccctggagaggaaggacaccggccggcagagcagccggcaggtggccaagctggatgccaagaagagcttccactgtgacatctgtgatgccagcttcatgagggaggacagcctgcggagccacaagaggcagcacagcgagtacagcgagagcaagaacagtgatgtgacagtgctgcagttccagattgaccccagcaagcagcctgccacccccctgactgtgggccacctgcaggtgcccctgcagcccagccaggtgccccagttcagcgagggccgggtgaagatcatcgtgggccaccaggtgccccaggccaacaccatcgtgcaggccgctgctgctgctgtgaacatcgtgcccccagccctggtggcccagaaccctgaggagctgcccggcaacagccggctgcagatcctgcggcaggtgtccctgattgccccaccccagagcagccgctgccccagcgaggccggggccatgacccagcctgctgtgctgctgaccacccatgagcagacagatggagccaccctgcaccagaccctcatccccacagccagcggcggcccccaggagggcagcggcaaccagaccttcatcaccagcagcggcatcacctgcacagactttgagggcctgaatgccctgatccaggagggcacagctgaggtgacagtggtgtctgatggcggccagaacattgctgtggccaccacagcccctcctgtgttcagcagcagcagccagcaggagctgcccaagcagacctacagcatcatccagggcgccgcccacccagccctgctgtgcccagctgacagcatcccagactag

SEQ ID NO: 211227 - DNA, 1884 bp, Artificial Sequence
  derived and/or modified sequence
atgaacgccagcagcgagggcgagagcttcgccggcagcgtgcagatacctgggggcactaccgtgctggtggaactgactccagatatccacatctgcgggatctgtaagcagcagttcaataatctggacgccttcgtagctcataaacagtctggctgtcaactgactggcaccagtgccgcagccccttccacggtgcaattcgtatccgaggagactgttccagcaacacaaactcagaccacaacaagaactattacctcagagactcaaaccatcactgggtgccagttcaagacagcttacgggatgaaagacatggagcgccaccttaaaatacacacaggggataagccccacaagtgtgaggtttgtggcaagtgtttttcccgaaaagacaagctgaaaactcacatgcggtgtcatacgggagtgaaaccttacaaatgcaagacatgcgactacgccgccgctgactctagtagcttaaacaaacacctcaggatccacagtgacgagcggccattcaagtgtcagatttgcccttacgcttctcgtaacagctctcaactcaccgtacatttgaggagccacactggcgatgctccttttcaatgctggctctgttctgccaaattcaagatctcctccgacctcaaaaggcacatgcgagtgcattccggcgagaaacccttcaaatgcgaattctgcaatgtgcgctgtacaatgaagggcaatcttaaaagtcacatccggatcaaacactccggcaacaacttcaagtgtccccactgtgatttcctgggcgatagtaaggctacccttcggaaacattcacgggtccaccaatctgaacaccccgaaaaatgcagcgaatgctcatactcctgttcttcgaaggctgcgctgcggattcatgagcgcattcactgtacagataggccctttaagtgtaactattgttcattcgacaccaagcagccatccaatctgagtaaacatatgaagaaatttcatggggacatggtgaagaccgaggccctggaacggaaagacacaggacgccagagctcccgccaggttgctaagcttgatgccaaaaaaagcttccactgtgacatctgcgacgcttcattcatgagggaagactctttgagatcacacaaaagacaacacagcgagtactccgagtcgaaaaacagcgatgttactgtgctgcagttccaaatcgatccatcgaagcagccagctacacctctgactgtaggacacctccaggtccctctgcaacctagccaggtgccgcaattctcagagggaagagtgaagattatcgtgggacatcaggttccacaggcaaacacgattgtccaggcggcggccgccgctgtgaacattgtgccgccagctctcgtggcccagaatcccgaagagctgcccggaaactctcggctacaaatcttgcgccaggtgtccctcatcgcccctccacagtcttccagatgcccgagcgaggccggcgccatgacacagcctgcagtgcttttgaccactcacgagcagacggacggagcgaccctgcaccaaaccctcataccaaccgcatccgggggtccccaggagggctcaggaaaccagacattcattacaagttcaggcattacatgtaccgattttgagggtttgaatgccctgatccaggaggggacagctgaggtcactgttgttagtgacggaggacagaatatcgccgtggccaccacggcccctcctgtgttttcaagctctagccaacaggagcttcccaaacaaacgtattcaattattcagggtgcggcacaccccgctctcctatgtcctgccgatagtatccctgactag

SEQ ID NO: 211228 - DNA, 1884 bp, Artificial Sequence
  derived and/or modified sequence
atgaatgcatcttcggagggggaatcttttgcgggatccgttcaaattcctggaggaactactgtgttagtggagctgacaccagatatccacatttgtgggatctgtaagcagcaattcaacaatcttgatgcattcgtggctcataagcagtctgggtgccagctcaccggcacctcggccgctgctcccagcacagtgcagttcgtgagcgaggaaacagtgcccgcaacccaaacacagaccacaactcgaaccatcaccagcgaaacgcaaacgattacaggatgtcaatttaaaacagcctacggcatgaaggatatggaacggcacctgaaaatccataccggcgacaagcctcataaatgcgaggtttgcggcaagtgctttagtcgcaaggacaaactcaaaacacatatgaggtgtcacaccggggtgaagccttacaagtgtaagacgtgtgattacgctgctgctgacagttcctcactgaacaaacatctccggatccatagcgatgagcgaccatttaaatgtcagatctgtccgtatgcctccaggaattccagtcagctgacagtgcacctgcgtagtcacaccggagatgctccatttcagtgctggctctgtagcgcaaagttcaagatatctagcgatttgaaaagacacatgagagtgcactctggtgaaaagcctttcaaatgcgagttctgcaatgtgagatgtactatgaaaggaaaccttaagtcacatattcggattaaacactctggaaataattttaaatgccctcattgcgactttctcggggatagcaaagctaccctgcgaaagcatagccgagtccaccagtccgaacacccggaaaaatgttctgagtgctcttactcttgttccagtaaggcggctctgagaattcatgagcggattcactgcactgaccgccctttcaaatgtaactattgctcgtttgacacaaagcagccatcaaatttgtcaaagcacatgaagaaatttcacggagatatggtgaagaccgaagccctggagaggaaggataccggtaggcagtctagtcgtcaggtcgccaaactggacgcgaaaaaaagttttcactgcgatatttgtgacgcctcctttatgcgcgaagatagtttacgaagccataagcgccagcactctgaatactccgagagtaagaactcagatgtgactgtcctgcagtttcagatagacccgagtaagcagcccgcaactccactgacagtcgggcatctacaagttccactacagccttcccaggttccacagttctctgagggcagggtgaaaattattgtgggccaccaggtcccccaagctaacaccatcgtgcaggcagctgccgctgccgtgaatatagtcccaccagctctggtcgcgcagaaccccgaagagctgcccggaaattcgcgcctccagatcttgcggcaggttagcttaatcgctcccccacagtcatcgagatgcccttcggaggcaggagctatgacacagccagccgtgttgctgacaacccacgaacagacagacggagcaactctgcaccagactctcattcccaccgcgagtgggggtccacaagagggatccggcaatcagactttcatcacaagcagcggtatcacgtgcaccgattttgaggggttaaacgcactcatccaggaaggcaccgcagaggtgacggtggtcagcgacggtggccagaatattgctgtggctactacggcccctccagtgtttagcagtagcagtcagcaggagttgccgaaacagacatacagcataatccagggtgcggcacacccagccttgctgtgccccgctgacagtatcccggattag

SEQ ID NO: 211229 - DNA, 2876 bp, Artificial Sequence
  derived and/or modified sequence
cgcagagttgggagaaggcagggtggggggtgtggaaaaataaaaggaaaagtccttgcaccatgtagatcagcgtcccccactttggcatcccggccggccggggacctcccagtctgcggccatgaacgcgagcagcgagggcgagagcttcgcgggctcggtgcaaattccaggtggcacaacggtgctggtggagctgactcccgacatccatatctgcggcatctgcaagcagcagtttaacaacctggatgcctttgtagctcacaagcaaagtggctgccagctgacaggcacatccgcagcagcccccagcacggtccagtttgtatcggaggaaacagtgcctgccacccagactcagaccaccaccagaaccatcacctcggagacccagacaatcacaggttgccaattcaagactgcttatggcatgaaggacatggagcggcatttaaaaattcacacgggagacaaaccccataagtgtgaagtctgtggcaagtgctttagccggaaagacaagctgaaaactcacatgcggtgccacacgggcgtgaagccctacaagtgtaagacgtgtgactacgccgctgccgacagcagcagcctcaacaagcacctgaggatccactcggacgagcggcccttcaaatgccagatctgcccctacgccagccgcaactccagccagctcactgtccacctgcgatcccacacgggggacgcccccttccagtgctggctctgtagcgccaagttcaaaatcagctcggacttgaaaaggcacatgcgggtgcactcgggggagaagcctttcaagtgcgagttctgcaatgtccgctgcaccatgaaggggaacctcaagtcgcacatccgtatcaagcacagcgggaataacttcaagtgtcctcattgcgacttcctgggtgacagcaaagccaccctccggaagcacagccgcgtgcaccagtcggagcatcctgagaagtgctcggaatgcagctactcctgctccagcaaggccgccctgcgcatccacgagcgtatccactgcaccgaccgccctttcaagtgcaactactgcagcttcgacaccaaacagcccagcaacctgagcaagcacatgaagaagttccatggggacatggttaagactgaggctctagagaggaaggacaccggcaggcagagcagccggcaggtggccaagctggatgccaagaagagtttccactgcgatatatgcgatgcctccttcatgcgggaggactcgctccgcagccacaagagacagcacagtgagtacagtgagagtaagaactcggacgtgaccgttctccagtttcagatcgaccccagcaagcagcccgccacgcccctcactgtgggacacctccaggtgcccctccagcccagccaagtgccccagttcagcgagggaagagtcaaaatcatcgttgggcatcaggtgccccaggcgaacaccatcgtccaggctgccgccgctgcagtgaacatcgtcccgcctgccttggtggcccagaacccagaggaactcccagggaacagccggctgcagatcctgcgccaggtcagtctgatcgccccccctcagtcctcgcggtgtccgagcgaggcgggcgcaatgacccagccggctgtcctgctgaccacccacgagcagacggacggagccactctgcaccagactctcatccccacggcctcaggtggcccccaggaaggctctggcaatcaaactttcattaccagttcgggtattacttgcactgactttgaaggcctaaacgccttgattcaggaggggacagcagaagtgacagtggtgagcgatggaggccagaacatcgcagtggccaccacagcgccaccggtcttctcctcctcttcccagcaagaactacccaagcagacctactccatcattcaaggggcagcccatccagctttgctctgtcccgccgactccattccagattagtgcttaaaaaaacaaaaggagtgggggaaaggaattgagaaaaagaaatcttaagtagaattctctaaaaggtttgctcttaatgttttctttgttttgttttgtttttgagacggagtctcgctctgtttcccaggctggagtgcagtggcgctatcttggctcactgcaacgtccgcctcccaggttcaagcgattctcatgcctcagccctccgagtagctgggaccacaggtgtacgacatcatgactggctaatttttgtatatttagtagagacggggtttcatcatgttgaactcctgacctcaagtgatctgcccacctcagcctcccaaagtgctgggattacaggtgtgagccaccatgcctggccgtggtttgctcttaatgtttttaaggatggttgtgaatccccctggccccataataaattgtaattttatactgcttactataatttttttaacactgtaacaactttgagaccacctctgaatcgtcgcattataactgttgtagaatcttaaatgttaccaagatgattccaatgaggggttggaattaaatgcattaagtagtgaattcatgtgtttgtttccaacttgattttccaactctaataaaggtttctgtccatcttattacatttgtgtagtaaatggtacttcccagcctctcttttgccccattctggaatactccccagagtttgggggtgttcatgttttatacatgtaagtctgttggcatgaaggaccattttctacataatatgacatggatacttgacccaaaaaaaaatgtttagtgctaatgagcagaaaatgaatggttccataataaattgatatctgattaaaatata

SEQ ID NO: 211230 - protein, 111 aa, Artificial Sequence
  derived and/or modified sequence
MALPRLTGALRSFSNVTKQDNYNEEVADLKIKRSKLHEQVLDLGLTWKKIIKFLNEKLEKSKMQSINEDLKDILHAAKQIEVNCPFQKRRLDGKEEDEKMSRASDRFRGLR

SEQ ID NO: 211231 - DNA, 336 bp, Artificial Sequence
  derived and/or modified sequence
atggccctgcccagactgaccggagcactcagatcattctctaatgtgaccaagcaggataactacaatgaggaggtcgcggacctgaaaattaagagaagtaagctgcacgagcaggtgctggatctcggcctaacatggaagaaaattattaagttcttaaacgagaagttggagaaatctaaaatgcaatccataaacgaagatcttaaggatattttgcacgcagccaagcaaatcgaagtgaactgccccttccagaaacgtcgactggatggaaaagaagaggacgaaaagatgtctagggcctccgatcggttcagagggctgcgttag

SEQ ID NO: 211232 - DNA, 336 bp, Artificial Sequence
  derived and/or modified sequence
atggccctgccccggctgactggagccctgcggagcttcagcaatgtgaccaagcaggacaactacaatgaggaggtggccgacctgaagatcaagaggagcaagctgcacgagcaggtgctggacctgggcctgacctggaagaagatcatcaagttcctgaatgagaagctggagaagagcaagatgcagagcatcaatgaagacctgaaggacatcctgcacgccgccaagcagatcgaggtgaactgccccttccagaagaggcggctggatggcaaggaggaggatgagaagatgagccgggccagtgaccgcttccggggcctgaggtag

SEQ ID NO: 211233 - DNA, 336 bp, Artificial Sequence
  derived and/or modified sequence
atggccctgccccggctgaccggcgccctgcggagcttcagcaacgtaaccaaacaggacaattataacgaggaagtggcagatttgaagattaaaaggtccaagcttcacgaacaggtgctggacctggggctgacgtggaagaagataattaaatttttgaacgaaaaattggagaaaagcaaaatgcagagtatcaatgaggatctcaaagatatccttcacgccgccaagcaaatcgaggtcaattgccccttccagaagcgcagactggatggaaaagaggaggatgagaagatgagtagggcttctgatagatttcgcgggctccgatag

SEQ ID NO: 211234 - DNA, 336 bp, Artificial Sequence
  derived and/or modified sequence
atggcattgcctcggctcacaggcgctctgcgttcgttcagtaatgtcaccaagcaagacaactataacgaggaggtggctgacttaaagatcaagaggtccaaactccacgaacaggtgcttgatctgggcctcacgtggaagaagatcattaagttcctgaatgaaaaactggagaaaagcaaaatgcagagcatcaatgaggaccttaaggacatcctccacgccgctaaacagatcgaggtgaattgtccattccagaaaaggaggctcgacggcaaggaagaagatgaaaagatgagtagggcctcagatcgttttcgaggattgcggtag

SEQ ID NO: 211235 - DNA, 3433 bp, Artificial Sequence
  derived and/or modified sequence
gggtctgtgcgtctttgcgtctgtctgtctgactgatggtcctcacacgcggttccctgtgactgggcgcgaccccggcaagcgcggcttggagggcggacggggcgcggcgatacagctgcccgctcgcatctttggccctgcgctcagctcctcacccggcgtgggaagttaaagtaaaaccgaaagggaagaaggcgcggtggcaggagctgacagagtgatgggaaacgcgtgagccaggccgagagtttcaggtttcttgctgtatggatcactgattgaataatagatggctttacctcgtctcacaggagccttgcgttccttttcaaatgtcaccaagcaagataattataatgaagaagtggctgacttaaagataaagcgatctaaacttcatgaacaagttttagatttgggcctgacatggaagaagataataaaatttttgaatgaaaaactggagaagagtaaaatgcaaagtataaatgaagacttaaaagatatattacatgctgcaaagcagatagaagtgaattgtccattccagaagaggaggctggatggaaaagaggaggatgagaagatgagcagagcttctgacagattcagaggactaagatgacaaaaatgactaaaatggacaaaagaagaaatagaaaatctgaatatttgactattaaaggaatttaatctgtaattaaaaaccttaagtacaaagaaatctatatgctatgatggctttaatggagaatgtcataatgtcatttaaaaaggtatgagagtactattgtagattaaaagaggttaaaggcatataataatcaaaatgtaatgtatgatccttgattgactcttgaatcagaaaaaaattacgtatttttggggccgttggagaaatctgaatatgggctggacatcattaggtaatattagatctcaggtgtgataatgttgtggctatgtaagaggatatcctaaatctcaggagaagcatactgcagtatatatagtggtatctcatgaagattaaaatgtactgtcaaatgtgtcagcaaaagaaatacacatgatgtgtgtgtgtgatcaagtgtttataatgagtggattaataaatatgagaagatagggtgatttgttgtaaagtaataaaggtttaaaaattacatgattcagtagagaaaaagcattttatgaatatctaacattacttatgataaaaaatctcagcaaactaggaatagaaggggattttgttaatctgataagctgtagctataaaaaacttggagaaaacatacttaatgctacaaagttagaagcttccctgaggtacggaattagacacaaatgcctgttaccacttctgtttctcactgtattaaaaatccttgctaacataatatggcaagaaaaagtaagggcataaagactggaaaaaaaaacttttccatttttcacatgactgtacctgtagaaaatgaatttaacaaggttaatataaaaatcaattttatttctacttactagaagcacattaaaaattacacttatctttatgtaacgtaatacattttaccttaaattttaaaattttaatttattttacgtttacaaaagcatcataaacatcaaatacgtaggagtaaatttaacaaaaaataagcaagacttcatggaaaactaaaatattgagagaatttaaagaagatctaaataaacagagggatataccaagaattggaagactcactattataatgatatattttttacccaaattgatctgtagattcagtgctatcccaggcacagtcttatgtttgagggtgtgtgtgtgtgtgtgtgtgtatgtgtgcatgtgtgtgtgtggaaattgacaagggtaatatgaaagttatatggaaattcaaaggcaaagagcagcctggttaactttgaaaaataaaaagggagaacttactctagtagatcttaaaacttattataaagataagtatacagtgtggtgttggtccaagaataggcaaatggactagtatgacagaatatagcccagaaacaaacctacggatagaaatatacttgatttataatgaaggccaaacaatagtgagacaaggctattttttcagtatatggtgctgggtcaactgcatatacagatgaaaaaaagtacctattttacaaataattttaaacagcctacagaattaagcatgatacacaaaacaatacatcttctaaaagatgtaaaagagtgtcttcaggatctttgtatgtgcgaaaatttatcaaacagagaacaaaaagtacaaagggaatgattaagttggactgtagtaaaattaataccttctatttattaagagtaaaaaggcaaaacatggagtgggagaatatagcttcaagatatataaccaaaaagagagcttttatccaggttaaatacgagctcctacaaatcaataaggaaaggacagataatcctatatgaacatgagtaagagctttgaacaaggacttcacaagagatagttgaccagtaaacatgaaaagggcttcagcttcattggtagtcaaggatatgccactgcatgcccattagaatggttaaaatgtaaaagactgacatacctattgttaggatcaagaatgtgaactagaatttttgtctactgctgctagagtttacaattggtacaaccactttgagtaactgtttgacagtgtctactattacctactgtggttggacaagtgaaattttaaatcttaggacataaatatccaataaaaatgcttgtacatacatgtatatcaaaaataggtgcattcattgcaacattatttgtgatagccttaatgtagaaacaacccagttcattgttaaaaagcttaagttgtagtatgtagactgccttatagcagtaacggattacagctatgtataacattgtaagtgaatcttataatgttgacaaaagaagccatacaacacatattatgattccattaatatgaaactgaaaactaggcatgaccagtctctggttttagaagtcaggatagtggctgcttttgaggaaggaggtagtgactaggagtgaatatgagggaggtttctggggagctgataatgttctgattcttgaagtagttaaccagattacacaggtgtgttcgttttttgataattctttgaactgtatgtgtactgtatattttcttgttatattcaataaaaagaattactatgatttttatattacatagattaaataagaagtatttcagattgataagtaacacatgcttgtgtatttatttagcttaaggtttggctatcatggtgagaactcctatgtaccctgctcaggtcctggtaaacagtatcataagtataataaattggtgtttttcattctca

SEQ ID NO: 211236 - DNA, 336 bp, Artificial Sequence
  derived and/or modified sequence
atggccctgcccagactgaccggcgccctgagaagcttcagcaacgtgaccaagcaggacaactacaacgaggaggtggccgacctgaagatcaagagaagcaagctgcacgagcaggtgctggacctgggcctgacctggaagaagatcatcaagttcctgaacgagaagctggagaagagcaagatgcagagcatcaacgaggacctgaaggacatcctgcacgccgccaagcagatcgaggtgaactgccccttccagaagagaagactggacggcaaggaggaggacgagaagatgagcagagccagcgacagattcagaggcctgagatag

SEQ ID NO: 211237 - protein, 975 aa, Artificial Sequence
  derived and/or modified sequence
MEDYEQELCGVEDDFHNQFAAELEVLAELEGASTPSPSGVPLFTAGRPPRTFEEALARGDAASSPAPAASVGSSQGGARKRQVDADLQPAGSLPHAPRIKRPRLQVVKRLNFRSEEMEEPPPPDSSPTDITPPPSPEDLAELWGHGVSEAAADVGLTRASPAARNPVLRRPPILEDYVHVTSTEGVRAYLVLRADPMAPGVQGSLLHVPWRGGGQLDLLGVSLASLKKQVDGERRERLLQEAQKLSDTLHSLRSGEEEAAQPLGAPEEEPTDGQDASSHCLWVDEFAPRHYTELLSDDFTNRCLLKWLKLWDLVVFGHERPSRKPRPSVEPARVSKEATAPGKWKSHEQVLEEMLEAGLDPSQRPKQKVALLCGPPGLGKTTLAHVIARHAGYSVVEMNASDDRSPEVFRTRIEAATQMESVLGAGGKPNCLVIDEIDGAPVAAINVLLSILNRKGPQEVGPQGPAVPSGGGRRRRAEGGLLMRPIICICNDQFAPSLRQLKQQAFLLHFPPTLPSRLVQRLQEVSLRQGMRADPGVLAALCEKTDNDIRACINTLQFLYSRGQRELSVRDVQATRVGLKDQRRGLFSVWQEVFQLPRAQRRRVGQDPALPADTLLLGDGDAGSLTSASQRFYRVLHAAASAGEHEKVVQGLFDNFLRLRLRDSSLGAVCVALDWLAFDDLLAGAAHHSQSFQLLRYPPFLPVAFHVLFASSHTPRITFPSSQQEAQNRMSQMRNLIQTLVSGIAPATRSRATPQALLLDALCLLLDILAPKLRPVSTQLYSTREKQQLASLVGTMLAYSLTYRQERTPDGQYIYRLEPNVEELCRFPELPARKPLTYQTKQLIAREIEVEKMRRAEASARVENSPQVDGSPPGLEGLLGGIGEKGVHRPAPRNHEQRLEHIMRRAAREEQPEKDFFGRVVVRSTAVPSAGDTAPEQDSVERRMGTAVGRSEVWFRFNEGVSNAVRRSLYIRDLL

SEQ ID NO: 211238 - protein, 1184 aa, Artificial Sequence
  derived and/or modified sequence
MHVNASARRWGRGGAAALPGPAASPRRPAPRTGPVGRPTLAPSPSRAHAHAKTNLLPGRAVQAPDAVPGAGSSRAPARWRPRDPGSSAPDAWQRFRPAPLRAQPRPPPRPAPGPPPPRKGGCGGQWRAPQDRTRGLRSRNSPRPPLAQPRLRHANQWRAPPGTPAADWRRPARSGRAVRDGGGGAGGSERELGLADGMEDYEQELCGVEDDFHNQFAAELEVLAELEGASTPSPSGVPLFTAGRPPRTFEEALARGDAASSPAPAASVGSSQGGARKRQVDADLQPAGSLPHAPRIKRPRLQVVKRLNFRSEEMEEPPPPDSSPTDITPPPSPEDLAELWGHGFSEAAADVGLTRASPAARNPVLRRPPILEDYVHVTSTEGVRAYLVLRADPMAPGVQGSLLHVPWRGGGQLDLLGVSLASLKKQVDGERRERLLQEAQKLSDTLHRSGEEEAAQPLGAPEEEPTDGQDASSHCLWVDEFAPRHYTELLSDDFTNRCLLKWLKLWDLVVFGHERPSRKPRPSVEPARVSKEATAPGKWKSHEQVLEEMLEAGLDPSQRPKQKVALLCGPPGLGKTTLAHVIARHAGYSVVEMNASDDRSPEVFRTRIEAATQMESVLGAGGKPNCLVIDEIDGAPVAAINVLLSILNRKGPQEVGPQGPAVPSGGGRRRRAEGGLLMRPIICICNDQFAPSLRQLKQQAFLLHFPPTLPSRLVQRLQEGMRADPGVLAALCEKTDNDIRACINTLQFLYSRGQRELSVRDVQATRVGLKDQRRGLFSVWQEVFQLPRAQRSSQHVSVLTCHGTPGDAGLVVLQDMGDAGLGLWDVLLLAWTRRGTFPGRFYRVLHAAASAGEHEKVVQGLFDNFLRLRLRDSSLGAVCVALDWLAFDDLLAGAAHHSQSFQLLRYPPFLPVAFHVLFASSHTPRITFPSSQQEAQNRMSQMRNLIQTLVSGIAPATRSRATPQALLLDALCLLLDILAPKLRPVSTQLYSTREKQQLASLVGTMLAYSLTYRQERTPDGQYIYRLEPNVEELCRFPELPARKPLTYQTKQLIAREIEVEKMRRAEASARVENSPQVDGSPPGLEGLLGGIGEKGVHRPAPRNHEQRLEHIMRRAAREEQPEKDFFGRVVVRSTAVPSAGDTAPEQDSVERRMGTAVGRSEVWFRFNEGVSNAVRRSLYIRDLL

SEQ ID NO: 211239 - DNA, 2928 bp, Artificial Sequence
  derived and/or modified sequence
atggaagattacgaacaggaactttgcggcgtagaggatgattttcacaaccaatttgcggccgagttggaagtacttgcggagctggagggagccagtactcctagcccgtctggtgtcccactctttaccgccggacgacccccaaggactttcgaagaagcccttgccagaggtgatgccgctagctcaccagctccagctgcgtcagtggggtctagccagggaggggcccggaagcgacaggtggatgcggatctgcagccagctggatctctgccgcatgccccaagaatcaaacgtccacgcctacaggtcgtcaaacgtctgaacttcagatccgaagagatggaagagcctcctcctccggattcttcacctacagacattactcctccgccctcacctgaggatctggccgaactgtggggccatggggtgagtgaggcggccgctgatgtaggactcacacgggcttcccccgcagctagaaacccggtgctaagacgaccacctattctggaagattatgtccacgtgacgtcgacagagggcgtcagagcctatcttgtccttagggcagacccaatggctccgggggtgcaaggttccttactgcacgtgccctggagaggaggaggtcaattggacctgctaggagtttctctcgcgtccctaaaaaagcaggtcgacggggaaaggcgggaaagactactgcaggaggctcagaagctctccgacacattgcattctctccggtccggcgaagaggaagccgcacagcctctgggagcccccgaggaggaacctacagatgggcaggatgcgtcttcacactgcctgtgggtcgacgagtttgcgccgaggcattatacggaattactcagcgacgactttacaaaccgctgcttactcaagtggcttaaattgtgggacctcgtggtgtttggacatgaaagacccagtcgcaaaccaagaccttccgtggaaccggcccgggttagcaaagaggcgactgctccaggaaaatggaagtctcatgaacaagtgctagaagaaatgctcgaggcaggccttgaccccagccagcgcccaaaacagaaggtcgccttgctgtgtggtccacccggactcggcaaaacaactctggcacacgtgatagctcgccatgctggctattcagtggtcgagatgaatgcctcggacgacaggtccccggaagtgttccgcactcggatcgaggccgcaacccagatggagtcagtgttaggagcgggtgggaagcctaattgcttagtgattgacgagattgatggcgccccggtagccgcaataaatgtgctgctgagcatactgaacaggaaagggcctcaagaggtgggaccgcagggcccagccgtgccttcaggcggcggcagaagacgaagggctgagggcgggctgctaatgaggccaatcatctgtatttgtaacgaccagtttgccccctcactgcggcaactcaagcaacaagctttcctgctgcactttcctcccactctaccctccaggttggttcagaggcttcaggaggtatccctcaggcagggcatgagggccgacccaggtgttttggcagccctatgtgaaaaaactgacaacgatatcagggcttgtattaacaccctgcagttcctatacagccgggggcagcgggaattgtctgtgcgtgatgtccaagctacccgcgtgggtcttaaagaccagcggcggggcctgttttccgtctggcaggaggtattccagctccctcgggcccagaggcgcagggtagggcaggaccccgcactgcccgcggataccctgttgctgggggacggtgatgcagggagcctaacttctgcatcccaacgcttttaccgcgtgcttcatgccgccgcctccgccggcgaacatgaaaaggtggttcagggcctgttcgataattttttgcgcctgcggctgcgcgactcctctttgggagctgtatgcgttgccctggattggctggcgtttgatgatttactggcaggcgcagcgcaccacagtcagtcctttcagctgctgagatatcccccttttttgccagtagcatttcatgtgctctttgcttcatctcacactcccagaattactttccctagtagccagcaagaggcccagaaccgtatgagccagatgcgcaacctgatccagaccttagtatcaggcatagctcctgccaccaggagtcgggcaactcctcaggccctgctcctagacgctttatgcctgctccttgatatcctcgctcctaagctgcgcccagtgtctacgcaactgtatagcacgcgcgagaagcagcagttggcatctctcgtgggtacaatgctcgcatactcccttacctatcgacaggagcggacgcccgatggccagtatatctaccggctggagcccaacgtggaagaactgtgtcggtttcctgaactccctgccagaaaaccactgacctatcagaccaagcaactgattgcaagagaaatagaggtcgagaaaatgcggcgcgcggaggctagcgcccgagtcgagaatagtccccaggtggacggttctcctcctggtctggagggtctgctagggggaatcggcgagaaaggcgtgcatagacctgcccctcggaaccacgagcagcggctagaacacatcatgcggcgtgccgcaagggaagagcagcccgaaaaggacttctttggaagagtggtcgtgagaagcacggccgtgccaagcgcaggcgatacagctcccgagcaggattctgtggagagacgaatgggaaccgccgtcggccggagtgaggtgtggtttaggtttaacgagggagtgagtaacgcagtgcgtagaagcctctatatcagggatttgctatag

SEQ ID NO: 211240 - DNA, 3555 bp, Artificial Sequence
  derived and/or modified sequence
atgcacgtgaacgcgtcagctaggaggtggggcagagggggagccgccgcactccccggcccggctgcttcgcctcgacgccccgctccccgcactggccctgttggtagaccaaccttagcgcctagtccctccagggcacatgctcatgccaagacgaacctgcttcctggccgggctgtacaggccccagatgcagtcccaggagcgggaagttcccgagcgccggcacggtggcgccccagagaccctggaagcagtgctcctgacgcttggcagagattccggcccgcgccactgagggcccagccccgtccccctccccgtccggctcctggcccaccacctccaaggaaggggggatgtggcggccagtggcgcgcgccgcaggacaggaccagaggcttacggtcccgtaatagcccccggccccctctggctcagccgcggttgaggcacgccaaccaatggcgggcccctcccggaactcctgccgccgactggcggagaccagcaagaagcgggcgtgccgtccgtgacggcgggggaggcgccggaggtagtgaacgagagcttggcttggcagacggcatggaggactacgagcaagagctctgtggagtcgaggacgactttcacaaccaattcgctgccgaactggaagttttggctgaactggaaggcgctagtaccccgtccccttccggcgtgcccctgttcaccgccggaaggcctccccgaacttttgaagaagcactggcaagaggcgacgccgcaagtagccccgcccctgcagcaagcgttggttcaagtcaaggcggcgccaggaaacggcaagttgatgctgatcttcagcccgcgggatcgttaccccacgcgcctcggatcaagcgaccacgacttcaggtggtgaagaggctcaatttcagaagcgaagagatggaggaaccgcctccccctgatagttctccgaccgatatcacaccacctccaagccctgaggatctggccgaactctggggtcatggcttttctgaggcagccgccgatgtgggcctcacccgggcctcccccgctgctcgaaaccccgtcctccgcaggcctcccattcttgaggactacgtgcatgtgaccagtaccgaaggcgtgcgtgcctatctggttctgagggcagacccaatggcgcccggcgtgcaggggtcactccttcatgtgccttggcgaggtggcggccagttagatctgctcggagtcagccttgcttctctgaagaaacaggtggatggggagaggcgggaacgactactgcaagaggcccagaagctaagtgatactttacaccggtctggggaggaagaggcagctcaacccctcggagcaccagaggaggagcccacagatggtcaggacgcttcctctcactgcctgtgggttgatgagtttgccccacgccattacacggaactcctgagtgatgactttacaaatcgctgcctgctgaagtggctgaagctgtgggacctcgtcgttttcggccatgaaagaccatcgcgaaaaccgagaccttcggtggaaccggctagagtctctaaagaggcaaccgctcctggcaagtggaagtcccatgagcaggtgctggaggagatgttagaggcaggtctcgacccgtctcagcggccaaagcagaaagtcgcactgctctgtggaccccctggactgggaaagaccacgcttgctcacgttatagcccgccatgccgggtacagcgtggtggaaatgaacgcatccgatgatagatcgcctgaggtcttccgtacgcggatcgaggcagcaacacagatggaaagcgttctaggcgccggagggaaaccaaactgcttggtcattgacgaaatagacggagcgcctgtggccgctatcaacgtgttgttgtcaatcctgaatcggaaagggccccaggaagtggggcctcagggcccggcagtgcccagtggcggcggacgtcggcgacgtgctgagggtggactgcttatgagacccatcatttgcatatgcaacgaccagtttgccccatcgctgcgtcaactgaagcagcaagcctttctcctgcactttccccccactctgccctccagactggtacagcgcttacaagaaggtatgcgtgccgaccctggggtcctcgcagcactgtgcgagaaaactgataacgacataagggcttgtattaacaccctgcagtttctctatagcagggggcagcgggagctatctgtgagagatgttcaagccactagggttgggctgaaagaccagcgccgaggattgttttcagtttggcaggaggtatttcaactgccaagggctcagaggtctagccagcacgtttccgtcctgacctgccatggcacacctggagacgctggtctcgtggtactgcaagatatgggagacgccggtctcgggctgtgggacgtgttactgctggcatggactcgtaggggcacctttcctggaagattctatcgcgtactgcacgccgccgcatcggctggtgaacatgaaaaagtggtgcagggattattcgataatttcctgcgtcttaggctgagggacagtagcctcggggccgtgtgtgtggcactagattggcttgcctttgacgatctgttggccggtgcagcccaccacagccagtcctttcagctgctccgataccccccttttctgcctgtggccttccatgtcttgttcgctagttcacacaccccacggattacgtttccaagtagccaacaggaagcccagaatcgaatgtctcagatgcgcaacctgatccagactctggtcagtgggattgcgcctgcaacccgctccagagcgacccctcaggccctattgctggacgcactctgtttactcctcgatatactcgctccaaaattgagacccgtgtcaacccagctgtactccacccgggaaaaacagcagctggccagcctagttggtaccatgctggcttattcactgacctaccgacaagagcggacacctgacggtcagtacatctacaggctggagcctaacgtcgaggaactgtgtcgcttcccagaactccccgcccggaagccactgacctatcagaccaagcagctgatcgcaagagagattgaagttgagaagatgcgtagggctgaagcaagcgcccgcgtagaaaacagtccacaggttgatggttcacccccgggcctggaggggctgctgggggggatcggagagaaaggcgtgcacagacccgcacctaggaatcacgaacagcgcctggagcatattatgagaagggccgccagagaagagcagccagaaaaggacttcttcgggcgagtggtcgtgagaagtactgcagtccctagcgcgggtgacactgccccagaacaggacagcgttgagcggaggatgggtacagcagtgggtcgttcagaggtctggttccgatttaacgagggagtgagtaacgctgtgaggaggagcctgtacatccgcgacctgctgtag

SEQ ID NO: 211241 - DNA, 2928 bp, Artificial Sequence
  derived and/or modified sequence
atggaggactatgagcaggagctgtgtggggtggaggatgacttccacaaccagtttgctgctgagctggaggtgctggccgagctggagggcgccagcacccccagccccagcggcgtgcccctcttcaccgctggccggccccccaggacctttgaggaggccctggcccggggagatgctgccagcagccctgccccagctgcctctgtgggcagcagccagggcggggccaggaagaggcaggtggatgctgacctgcagcctgctggcagcctgccccacgccccccgcatcaagaggccccggctgcaggtggtgaagaggctgaacttccgctctgaggagatggaggagcccccacctccagacagcagccccacagacatcaccccaccacccagccctgaggacctggccgagctgtggggccatggagtgtctgaggccgctgctgatgtgggcctgacccgggccagccctgctgccaggaaccctgtgctgcggcggccccccatcctggaggactatgtgcacgtgaccagcacagaaggagtgcgggcctacctggtgctgcgggctgaccccatggcccctggggtgcagggcagcctgctgcacgtgccctggaggggcggcggccagctggacctgctgggcgtgtccctggccagcctgaagaagcaggtggatggagagcggcgggagcggctgctgcaggaggcccagaagctgagtgacaccctgcacagcctgcggagcggggaggaggaggccgcccagcccctgggcgcccctgaggaggagcccacagatggccaggatgccagcagccactgcctgtgggtggatgaatttgcccccaggcactacacagagctgctgagtgatgacttcaccaaccgctgcctgctgaagtggctgaagctgtgggacctggtggtgtttggccacgagcggcccagcaggaagccccggcccagcgtggagcccgcccgggtgtccaaggaggccacagcccctgggaagtggaagagccatgagcaggtgctggaggagatgctggaggccggcctggaccccagccagaggcccaagcagaaggtggccctgctgtgtggccccccaggcctgggcaagaccaccctggcccacgtgattgcccggcatgctggctacagcgtggtggagatgaatgccagtgatgacaggagccctgaggtgttccgcaccagaattgaagctgccacccagatggagagcgtgctgggcgccggcggcaagcccaactgcctggtgattgatgaaattgatggagcccctgtggccgccatcaacgtgctgctgagcatcctgaacaggaagggcccccaggaggtgggcccccagggccctgctgtgcccagcggcggcggcagaagaagaagagctgagggcggcctgctgatgaggcccatcatctgcatctgcaatgaccagtttgcccccagcctgcggcagctgaagcagcaggccttcctgctgcacttcccccccaccctgcccagccggctggtgcagaggctgcaggaggtgtccctgcggcagggcatgagagctgaccccggggtgctggccgccctgtgtgagaagacagacaatgacatccgggcctgcatcaacaccctgcagttcctgtacagccggggccagcgggagctgtctgtgagagatgtgcaggccaccagggtgggcctgaaggaccagaggcggggcctcttctctgtgtggcaggaggtgttccagctgccccgggcccagaggcggcgggtgggccaggaccctgccctgcctgctgacaccctgctgctgggagatggagatgctggcagcctgaccagcgccagccagcgcttctacagagtgctgcacgccgccgccagcgctggggagcacgagaaggtggtgcagggcctgtttgacaacttcctgcggctgcggctgcgggacagcagcctgggcgctgtgtgtgtggccctggactggctggcctttgatgacctgctggccggggccgcccaccacagccagagcttccagctgctgcgctacccacccttcctgcctgtggccttccacgtgctgtttgccagcagccacaccccccgcatcaccttccccagcagccagcaggaggcccagaacaggatgagccagatgaggaacctgatccagaccctggtgtctggcatcgccccagccaccaggagccgggccaccccccaggccctgctgctggatgccctgtgcctgctgctggacatcctggcccccaagctgcggcctgtgtccacccagctgtacagcacccgggagaagcagcagctggccagcctggtgggcaccatgctggcctacagcctgacctaccggcaggagaggaccccagatggccagtacatctaccgcctggagcccaacgtggaggagctgtgccgcttccctgagctgcctgccaggaagcccctgacctaccagaccaagcagctgattgcccgggagattgaggtggagaagatgagaagagctgaggccagcgcccgggtggagaacagcccccaggtggatggcagccccccaggcctggagggcctgctgggcggcatcggggagaagggcgtgcacaggcctgcccccagaaatcatgagcagaggctggagcacatcatgaggcgggccgcccgggaggagcagcctgagaaggacttcttcggccgggtggtggtgcgcagcacagctgtgcccagcgctggggacacagcccctgagcaggacagcgtggagaggaggatgggcacagctgtgggccgctctgaggtgtggttccgcttcaatgaaggagtgtccaatgctgtgcggcgcagcctgtacatccgggacctgctgtag

SEQ ID NO: 211242 - DNA, 3555 bp, Artificial Sequence
  derived and/or modified sequence
atgcacgtgaatgccagcgcccggcgctggggccggggcggggccgccgccctgcccggccctgctgccagcccccggcggcctgcccccaggacaggccctgtgggccggcccaccctggcccccagccccagccgggcccacgcccacgccaagaccaacctgctgcccggccgggctgtgcaggccccagatgctgtgcctggggccggcagcagccgggccccagcccgctggaggccccgggaccccggcagcagcgccccagatgcctggcagcgcttccggcctgcccccctgcgggcccagccccggcccccacccaggcctgcccctggccccccaccacccaggaaaggaggctgcggcggccagtggagggccccccaggacaggacccggggcctgcggagcaggaacagcccccggccccccctggcccagccccggctgcggcatgccaaccagtggagggcccctcctggcaccccagctgctgactggaggaggcctgcccggagcggccgggctgtgagagatggcggcggcggggccggcggcagcgagcgggagctgggcctggctgatggcatggaggactatgagcaggagctgtgtggggtggaggatgacttccacaaccagtttgctgctgagctggaggtgctggccgagctggagggcgccagcacccccagccccagcggcgtgcccctcttcaccgctggccggccccccaggacctttgaggaggccctggcccggggagatgctgccagcagccctgccccagctgcctctgtgggcagcagccagggcggggccaggaagaggcaggtggatgctgacctgcagcctgctggcagcctgccccacgccccccgcatcaagaggccccggctgcaggtggtgaagaggctgaacttccgctctgaggagatggaggagcccccacctccagacagcagccccacagacatcaccccaccacccagccctgaggacctggccgagctgtggggccacggcttcagcgaggccgctgctgatgtgggcctgacccgggccagccctgctgccagaaatcctgtgctgcggcggccccccatcctggaggactatgtgcacgtgaccagcacagagggcgtgcgggcctacctggtgctgcgggctgaccccatggcccctggggtgcagggcagcctgctgcacgtgccctggaggggcggcggccagctggacctgctgggcgtgtccctggccagcctgaagaagcaggtggatggagagcggcgggagcggctgctgcaggaggcccagaagctgagtgacaccctgcacaggtctggagaggaggaggccgcccagcccctgggcgcccctgaggaggagcccacagatggccaggatgccagcagccactgcctgtgggtggatgaatttgcccccaggcactacacagagctgctgagtgatgacttcaccaaccgctgcctgctgaagtggctgaagctgtgggacctggtggtgtttggacatgagcggcccagcaggaagccccggcccagcgtggagcccgcccgggtgtccaaggaggccacagcccctgggaagtggaagagccatgagcaggtgctggaggagatgctggaggccggcctggaccccagccagaggcccaagcagaaggtggccctgctgtgtggccccccaggcctgggcaagaccaccctggcccacgtgattgcccggcatgctggctacagcgtggtggagatgaatgccagtgatgacaggagccctgaggtgttccgcacccgcatcgaggccgccacccagatggagagcgtgctgggcgctgggggcaagcccaactgcctggtgattgatgaaattgatggagcccctgtggccgccatcaacgtgctgctgagcatcctgaacaggaagggcccccaggaggtgggcccccagggccctgctgtgcccagcggcggcggcagaagaagaagagctgagggcggcctgctgatgaggcccatcatctgcatctgcaatgaccagtttgcccccagcctgcggcagctgaagcagcaggccttcctgctgcacttcccccccaccctgcccagccggctggtgcagaggctgcaggagggcatgagagctgaccccggggtgctggccgccctgtgtgagaagacagacaatgacatccgggcctgcatcaacaccctgcagttcctgtacagccggggccagcgggagctgtctgtgagagatgtgcaggccaccagggtgggcctgaaggaccagaggcggggcctcttctctgtgtggcaggaggtgttccagctgccccgggcccagaggagcagccagcacgtgtctgtgctgacctgccacggcaccccaggagatgctggcctggtggtgctgcaggacatgggagatgctggcctgggcctgtgggatgtgctgctgctggcctggacccggcggggcaccttccctggccgcttctacagagtgctgcatgctgctgccagcgctggggagcacgagaaggtggtgcagggcctgtttgacaacttcctgcggctgcggctgcgggacagcagcctgggcgctgtgtgtgtggccctggactggctggcctttgatgacctgctggccggggccgcccaccacagccagagcttccagctgctgcgctacccacccttcctgcctgtggccttccacgtgctgtttgccagcagccacaccccccgcatcaccttccccagcagccagcaggaggcccagaacaggatgagccagatgaggaacctgatccagaccctggtgtctggaattgccccagccaccaggagccgggccaccccccaggccctgctgctggatgccctgtgcctgctgctggacatcctggcccccaagctgcggcctgtgtccacccagctgtacagcacccgggagaagcagcagctggccagcctggtgggcaccatgctggcctacagcctgacctaccggcaggagaggaccccagatggccagtacatctaccgcctggagcccaacgtggaggagctgtgccgcttccctgagctgcctgccaggaagcccctgacctaccagaccaagcagctgattgcccgggagattgaggtggagaagatgagaagagctgaggccagcgcccgggtggagaacagcccccaggtggatggcagccccccaggcctggagggcctgctgggcggcattggagagaagggcgtgcacaggcctgcccccaggaaccacgagcagaggctggagcacatcatgagaagagctgcccgggaggagcagcctgagaaggacttcttcggccgggtggtggtgcgcagcacagctgtgcccagcgctggggacacagcccctgagcaggacagcgtggagaggaggatgggcacagctgtgggccgctctgaggtgtggttccgcttcaatgaaggagtgtccaatgctgtgagaagaagcctgtacatccgggacctgctgtag

SEQ ID NO: 211243 - DNA, 2928 bp, Artificial Sequence
  derived and/or modified sequence
atggaggactacgagcaggagctgtgcggcgtggaggacgacttccataatcagttcgctgcggaactcgaagtcctcgcagaactggagggcgccagcacccctagcccttctggcgtgcctctgtttacagcggggcgcccaccaaggacttttgaggaagccctggccagaggcgacgccgcttcatctcccgcgccagcagctagcgtggggagtagtcagggcggagcaaggaagaggcaggtggacgcggacctgcagccggcgggcagcctcccccatgctccccggattaagcggccccgcctccaagttgtgaaacgactcaatttccggtctgaggaaatggaagagcctccaccgccagacagtagtcccaccgacattacgccaccacctagccctgaagatctcgcagaactttggggccatggtgtgagcgaagctgctgccgacgtcggcctgactcgcgcatccccagcggcaaggaatcctgtgcttaggagaccccccatcttggaggactacgtccatgtgacgtcaactgagggcgttagggcctacctggtcctgagagctgatcctatggcgcccggcgttcagggcagcttgctgcacgtgccttggcgaggcggaggccagctggatttgctgggagtctcattagcttcactgaaaaagcaggtggacggcgagcggcgggagcggctcctccaggaggcccaaaaactgtccgacacactccatagcttgcgctccggggaagaagaggccgcgcagccacttggagcgcctgaggaagaacccaccgatggccaagatgcctccagtcactgcctttgggtagatgaattcgctccaagacattatacagagctactttccgacgacttcaccaatcgttgtctgttaaaatggctgaaactgtgggacctcgtggtgtttggacatgagagacctagccgcaagccgcggccgtcagtggaacccgcccgagtgagtaaagaggctactgcgcctggcaagtggaagagccacgagcaggtgctggaggaaatgctggaggctggactcgatccttctcaacgccccaaacagaaggtggccctgttatgtggaccacctgggctcggaaagacaaccttggcgcacgtaatcgccagacatgctggatattcggtcgtggaaatgaatgcgtccgatgatcgctcaccggaagtttttcggacccgtatcgaggccgcaactcaaatggaaagcgtactgggcgcaggtggcaaaccaaattgtctcgtcatagatgaaatcgacggggcccccgttgccgctatcaatgtgctgctgagcattttgaacaggaaaggaccacaggaagttgggccacaagggccagccgtgccctctggcggtggcaggaggagacgagctgaaggcgggctactcatgcgacccattatatgcatctgcaacgaccagtttgcacctagcctacggcagttaaaacaacaggccttccttctgcattttccaccaactctgccgtcacggctagtgcagcgtctccaagaagtttccctgaggcagggcatgagagccgatcctggagtgctcgcagccttgtgcgagaagacggacaacgacatacgcgcctgcatcaacactttgcaatttctatatagccgagggcagcgcgaactatctgttcgcgacgtgcaggcaactagagtcggccttaaggatcagcgccggggcttgttcagtgtctggcaggaggtgtttcagctgccccgcgctcagaggcggcgtgtcgggcaggaccctgctctccccgcagataccttactgctcggtgatggagacgcaggcagtctgacttccgctagccagcggttttatcgcgtgctccatgcagcggcttctgccggcgagcatgagaaggttgtacagggcctgttcgataacttcctccgcctacgcctgcgcgactcttcactgggagcagtatgtgtggcacttgactggttggcatttgacgacttgctggccggcgccgcgcatcacagtcagtcctttcagcttctgaggtatcctcctttcctccccgtcgcattccacgtgctcttcgcctccagtcatacacccaggatcacgttcccttcctcacagcaagaagcccaaaaccggatgtctcaaatgcggaaccttatccagacactagtatccggcatcgccccagccacacgtagtcgagccacgccgcaggccctcttgttggacgccctgtgcctcctgttggacattttggcaccaaaactccggcccgtgagtactcagttgtactctacccgggagaaacagcagttggcatctctggtggggacgatgctcgcatactctctgacataccggcaggaaagaacaccagatggccaatatatctacagattggagccaaatgtcgaggagctgtgccggtttcccgagctcccagccagaaaacctttgacttaccagacgaaacagcttatcgctagggagatagaggtcgagaaaatgcgcagagcagaagccagcgcacgggtagaaaatagtccacaggtggacgggagccctcctgggctcgagggtctactcggaggcatcggagaaaagggagttcaccgacctgccccacggaatcacgaacaaagactggaacacatcatgagaagggccgcccgggaggagcaaccagagaaggatttcttcggaagagtcgtcgtgcgatccaccgctgtcccaagcgccggcgacacagcccctgagcaagacagcgtcgaaagaagaatggggactgcagtcggcaggtcagaagtttggtttagatttaatgagggtgtcagtaatgcggttaggcgatccctgtatattagggacctactgtag

SEQ ID NO: 211244 - DNA, 3555 bp, Artificial Sequence
  derived and/or modified sequence
atgcacgtgaacgccagcgcccggcggtggggccggggcggcgccgccgcactgcccggcccagctgcctctccgagacgccctgctcccaggaccggccccgtggggaggcctacattggcaccatccccatcgcgggcgcacgctcatgctaaaaccaacctcctgccagggcgggctgtacaggcgcctgatgctgtccctggagctggatcaagtagagcacctgcacgctggagaccaagagaccctgggtcttcagcacccgatgcatggcagcggtttagacccgcccccctcagggcgcagccacgcccgcctccccgtcctgctcccggcccgcccccacctcggaagggaggatgcggtggccaatggagggccccgcaggacagaactagggggcttagaagcaggaattctccaagaccccctcttgcccagccacggctccggcacgcaaatcagtggagagccccgccagggacgccagctgccgattggaggcgtccagccagaagcggccgcgccgtcagagacggcggcgggggcgcggggggatccgaacgcgagcttggccttgcggatggtatggaggattatgaacaggagctttgcggggtggaggatgacttccataatcagtttgctgcagaactggaagtgctggctgaacttgagggcgcttccacacctagcccctccggagtgccgctctttactgctgggaggcccccacggacattcgaggaggccctcgccaggggtgacgccgcaagttctcccgcccctgctgcctccgtggggtcgtctcaaggcggcgcgcgtaagcgccaagttgatgctgatttgcaacccgcaggctcactgccacatgcccctcggattaagcggcctcggcttcaggttgtgaaacggctgaactttagaagcgaagaaatggaggagcccccaccccccgactcttcccccaccgatatcactcccccgccaagtcccgaggatctggccgagctgtggggccacggctttagcgaagccgccgcagatgtggggttgacccgggcttctccggccgcaagaaatcccgttctgaggagaccccccatactcgaggattacgtgcatgtaaccagcaccgagggcgtgagagcatacctggtgctgagagcagatcctatggctcctggcgtccagggatccctcttgcacgtcccctggcgggggggggggcagctcgatctactcggggtgtcactagctagcctaaaaaagcaagtggatggtgagcgaagagaaagactactgcaggaggctcagaagctgtccgataccctgcatagaagtggagaggaagaggccgcacagcctcttggcgctcccgaggaggagcccacggatggccaggacgcgtcgtcccactgcctttgggtggatgagtttgctcctagacactataccgagcttctcagtgatgacttcaccaataggtgcctgctgaaatggctgaagctttgggacttggtggtttttggacacgaacggcccagtcggaagcctagacctagtgtcgaacccgccagggtcagcaaggaggctactgccccgggcaaatggaagagccacgagcaggtgctggaggagatgctcgaagcagggctggatcctagtcagagacccaagcagaaagtggccttgctgtgcggtccacctgggctgggcaaaactaccttggcacacgtaattgccaggcacgctgggtactctgttgtagagatgaacgcctccgatgaccggagccccgaggtttttcgcacccgcatcgaagcggcaactcagatggagtccgtgctgggagccggcgggaaaccaaactgcctggtcatagatgagatcgacggcgctcctgtggctgctattaatgtgcttttgagcattctcaatcgcaagggcccacaggaggtaggcccacagggccctgccgtaccttccggcggtgggaggagaaggagagccgagggcggcctgctgatgaggccaatcatttgtatctgcaacgaccagttcgctcccagcctgaggcagcttaagcaacaggctttcctcctacatttccccccaactttgccaagccgcttggtgcagcggctccaggaaggtatgcgggcagacccaggagttcttgcagccctctgtgaaaagaccgacaatgacattcgcgcttgcattaacaccttgcagtttttatattctagaggccagcgggaattatctgtgcgcgatgtccaggcaaccagagtgggcctcaaggaccagaggcgagggctgttttccgtgtggcaggaggtgttccagctgcctcgagcccagagaagtagtcagcatgtaagcgtgttgacctgccacggtactccgggagacgctggccttgtggtgctccaggacatgggcgacgcagggctggggctatgggacgtccttctgctagcctggacaagacgggggacattccccggccgcttctatcgcgtgttgcacgccgccgcgtccgcgggcgagcacgagaaagtggtgcagggcttgttcgacaactttctgaggttgcggctcagagattctagtttgggagctgtgtgcgtggcactagactggctagcgttcgacgacttgttggccggtgccgcacatcactctcaaagcttccagctcctccgctatccccccttcctccccgtggcatttcatgtgctcttcgcctccagccacacgcccaggattaccttcccttcttcacagcaggaggcccagaatagaatgtcccagatgcgcaatctaatccagacactggtgtccggtatcgctccagctaccaggagccgggccaccccccaggctctcctgctggatgccttgtgcctgctgctcgacattctggccccaaaactccgccccgtcagtacccagctctatagcacccgcgagaagcagcaactggcctccctggtcggaactatgttggcttatagcctgacttatcgccaggagcgcacccccgatggccaatatatttaccgacttgaaccaaatgtggaggagctctgtcggtttcccgagcttcccgcccgaaaacctctgacttaccagactaaacagcttattgctagggagatcgaggtcgagaagatgaggcgcgccgaggcctcagccagggttgaaaattcacctcaggtagatgggtctcctccagggctcgaggggctccttggtggcatcggcgagaaaggcgttcatcgaccagcccctcggaaccatgagcagaggctggaacacatcatgcgcagagcagctcgggaggagcagcctgagaaggatttcttcggacgggtggttgttaggtccaccgcagtcccgtccgccggagacacagctcctgaacaggatagtgtcgagagaagaatgggcaccgccgtcggccggtccgaagtgtggttccggttcaatgagggagtctccaatgctgtgcgtcgttcactgtatatcagagacctgttatag

SEQ ID NO: 211245 - DNA, 2928 bp, Artificial Sequence
  derived and/or modified sequence
atggaggattacgagcaagagttgtgtggcgttgaggatgatttccataaccaatttgcagccgagctggaagtactggctgagctcgagggcgctagtacacccagtccatccggggtaccattgttcacagcgggtagacctcccaggaccttcgaggaggcactcgcaagaggagacgctgcgtcctcacccgcacctgcggcatcagtaggttcctcccaggggggagcacggaagcgccaagtggatgcagatctccagcccgctgggtccttgcctcacgcgcctcgcattaagcgccctagactgcaggtggtgaagcggctgaatttcaggtctgaggaaatggaagagccccctcccccagattcttctcctaccgatatcacacctcctccctcccctgaagatcttgctgagctgtgggggcatggggtcagcgaggccgctgctgatgtggggctcacacgggcttctcccgctgccaggaatccggtactgcgacgaccaccaattcttgaagattacgtgcatgttactagcacagagggagtgcgagcatatctcgttctccgcgcagatcccatggcccctggagtgcagggttccctgcttcatgtgccctggagaggtggtgggcaattggatctgctgggcgtcagcttggcctccttgaagaaacaggtagacggggagcggcgagagaggctgttacaggaggctcagaaactgagcgacaccctacacagcctgcgctccggggaggaggaagccgcacagccactgggcgctcctgaggaagagcctaccgacggacaagacgcatcatcacactgtttatgggtcgatgagtttgcacccagacactatacggagcttctttctgacgattttaccaacaggtgtctgctgaagtggctgaagttgtgggatctagttgtctttggacacgaaaggccttccagaaaacctcgcccatcagtcgaaccagccagggtctccaaggaagcgaccgctcctggcaagtggaaatctcacgaacaggtgctggaagagatgctagaggcaggcctggaccccagccaacggccaaagcagaaagtagcactgctatgcggcccacctggactcgggaagaccacattggcccacgtgattgcaaggcacgctgggtacagcgtggtcgaaatgaacgcctcagacgatcgcagccccgaagtgttccgcacccggattgaggccgcaacacagatggaaagcgtactgggcgcaggtggcaaaccaaactgcctggtgattgatgaaattgacggcgcaccggtcgcagcaatcaacgtcctgctgagcatactgaatcggaaagggcctcaggaggtcggacctcagggtccagccgtgccatccgggggaggacgtaggcgccgagccgaaggcggtctcttaatgagacccataatctgcatctgtaacgaccagtttgccccttctctgcgacagctgaagcagcaggcctttttgttacactttccaccaaccctgccttcgagattggtgcaaaggctgcaagaagtgtccctgaggcaaggtatgcgcgcagacccaggcgtcctggccgctctctgtgaaaaaacggataatgacatccgagcgtgtattaataccctgcagttcttatattcacggggtcagagagagctgtcagtccgtgacgttcaggccactagggtcggcctgaaagatcagaggcgaggcttgtttagtgtttggcaggaggtgtttcagctgccgagagcacagcgccgacgggtaggccaggaccctgcactccccgctgataccttgctgttgggagatggagacgccggatctctaacttccgcctctcaacgcttctatagagtgctgcacgcggcagcttctgccggagagcatgaaaaggtcgttcaggggttgtttgataactttcttcgattgcggctgcgtgacagcagtctcggagccgtgtgcgttgctctggattggttggcctttgacgatctgttggcaggcgcagctcaccattctcagtccttccagctactgcgctaccctcctttcctgcccgtggcttttcacgttctgtttgcatcatcgcacactcccagaatcacctttccatctagtcagcaggaggcgcagaacaggatgtcacagatgcgtaacctgatccagacactggttagtggcatcgctcctgctactcgcagtcgcgctactccgcaagccctcctcctcgatgccctctgtctgctgctggatattcttgcgcctaagctgaggccggtgagcacccagctgtatagcacacgagagaaacagcaattagcgagcctcgttgggaccatgctggcatactcactgacctataggcaagagcggactcctgacggacagtacatctatagactggagcccaacgttgaggagctgtgccgattcccagagcttccagcacgtaaacctctgacatatcagactaagcaactcattgcccgagaaatcgaggtggaaaagatgcggagagccgaagccagtgcaagggtggaaaactctccgcaggtcgatggatccccaccaggccttgagggcttgctaggcggaatcggagaaaagggagtccaccgtccggctccacgcaaccacgagcaacgtctcgagcacatcatgcgtagggccgctcgagaagaacagccagagaaagatttctttgggagggtggtcgttagaagcacagcagtgcctagcgcgggtgatacagcacctgaacaggattcagtggaaagacggatggggaccgccgtgggcaggtctgaagtgtggtttcggtttaacgagggtgtgtcgaacgcagttcggaggtctttatacattcgcgacctgctctag

SEQ ID NO: 211246 - DNA, 3555 bp, Artificial Sequence
  derived and/or modified sequence
atgcacgtgaatgcaagtgccagacgctgggggagggggggtgctgcagcattgcctggtcctgctgcttcaccccgaagaccagctccccgtacaggcccagtgggtaggcctacgctggctccatcaccttcgcgcgctcacgcacacgccaaaaccaacctgctgcctggccgtgctgtacaggctcccgatgctgtgccgggagccggatcatcaagggccccagccagatggaggccgagagacccagggtcctctgcacctgacgcctggcagaggttcagaccggcacccctgcgcgcacagccgaggccaccacccaggcctgcaccaggtccaccgccaccgagaaagggcggatgcgggggtcagtggcgggctccccaggatcggaccagggggcttagatcccggaacagccctaggccacctctggcccaacccagactgagacacgctaaccagtggcgcgctcccccaggcacaccggctgctgactggagacgccctgcacgcagcggacgtgcagtgagagatgggggaggcggagctggaggctctgagagagagctggggctagcggacgggatggaggattacgaacaagagctgtgtggcgtggaagacgatttccataatcaattcgccgcagaacttgaggtgcttgccgagttggaaggagcgagcactccctccccaagtggcgtgcctcttttcacagcaggcagacccccacgtaccttcgaggaagctctcgctaggggagatgctgcaagttcccccgctcccgcagctagcgttggctccagtcaggggggtgcaaggaagcgacaggtagatgcagaccttcaacctgccggatcgctgccacatgccccaaggatcaagaggcctcgtctgcaagtggtgaagcggctaaactttcgaagcgaagagatggaggagccacccccacctgattcaagcccaactgatatcacccccccaccatctcccgaagacctggcagagctgtgggggcacggcttcagcgaagctgccgctgacgtgggcctcactcgggcttctcctgccgcaaggaatcctgtcctccgccgtccacctattctggaggattatgttcatgtgacatccaccgagggggtgagagcctatctcgtccttcgagctgatcctatggctccaggagttcagggatccttacttcacgtaccgtggcgagggggtggacaactagatctgctgggcgtgtcactggcatctcttaagaaacaggtggacggcgagaggcgagagaggctgcttcaggaggctcagaaattatctgacactctgcatagatccggcgaggaggaggcagctcaacctctgggggctccagaggaggagcctacggatggccaggatgcctcttcacactgtctgtgggtggacgaattcgcacccagacattatactgagctgctgtctgatgatttcactaaccgatgcctgcttaaatggctgaaactgtgggacctggtagtgtttgggcacgagaggccttcccgcaaaccaaggccgagcgtcgagccggcacgcgtgagtaaagaggcaaccgctcctgggaagtggaaaagccatgaacaggtgttagaggagatgctcgaagccggacttgacccaagccagcgtcccaagcagaaagtggctcttctctgtggtcctcctggcctcgggaagactaccctcgcccacgttatagcaaggcacgctggatacagcgttgtggaaatgaacgcttctgacgacagaagtcctgaggtgttcaggacccggattgaggcagccactcagatggagtctgtgctgggcgcaggaggaaagcccaactgcctcgtgatcgacgaaattgatggagcccctgtggcagctataaacgttcttctgtctatactaaacagaaagggacctcaagaggtcggaccgcaagggcctgcggtgccgagcggcggagggcgtagacggagagctgaggggggtctgctcatgcgccctatcatctgcatttgcaacgaccaattcgctccctctctgaggcagctaaagcagcaggcctttctgctgcatttcccaccaacgcttccaagcaggctggtccaacgcctgcaagagggaatgagggcagacccaggagttctcgctgcattgtgcgaaaagactgacaacgatattagggcttgtatcaacaccttgcaatttctgtactccaggggacaacgcgaactgtcagtgcgagatgtccaggcgacacgtgtcgggctgaaggatcaacgaagagggttgttctctgtgtggcaggaggtgtttcagctgcccagagcacagcgctcctcacagcatgtatccgtgctcacatgccacggaaccccgggagatgcaggacttgtggtgctacaggacatgggcgacgccggtctggggctctgggatgttctgctcttggcgtggacccgcagaggcaccttcccaggcagattctaccgggtgctgcacgctgccgcttcagctggggaacacgagaaagtggtgcagggcctgtttgacaattttctgcgacttagactacgggattcttcgctgggcgcagtgtgcgttgccctagactggctcgctttcgatgacctgctagctggagccgcacaccacagtcagagcttccagctgctcagatacccacctttcttgccggtggcattccacgttttattcgcaagctcacacacaccccgaatcacgtttccaagctcacaacaggaagcccagaatcgcatgagccagatgcgcaatcttatccaaaccctcgtgtctggaattgctccagccacgcgttccagggcgaccccacaggcactcctgctggatgcgctatgcctcctgctggatattctggccccaaagctgcgtcctgtgagcacgcaactgtactccacccgggaaaaacagcagcttgcctctttagtgggcacgatgctggcatatagtctgacgtatcgccaagagcgtacgcccgatggtcaatatatctatagattggaaccaaatgtcgaggagttatgccgctttcccgagctgccagcacggaaacccctgacttatcagaccaaacaactcatcgcgagggagatagaggtggagaagatgagacgggcagaagcctccgcccgtgtcgagaattcaccccaggtcgacggctcccctcctggattagaggggttgctgggaggtatcggagaaaaaggcgtgcatagaccagctccccgaaatcacgagcagagactggagcatattatgcgaagagcagcccgagaggaacagcccgagaaggattttttcggcagagtggttgtacgatcaactgctgtcccttccgccggagatactgcgcctgagcaagacagcgtggagcgccgtatgggcaccgcagtgggcaggtcagaggtttggtttagatttaatgagggagtgagtaatgccgtccgcagatccctctacatacgggacctgctgtag

SEQ ID NO: 211247 - DNA, 3065 bp, Artificial Sequence
  derived and/or modified sequence
cgggaggttcggagcgggagctcgggctcgcggacggtatggaggactacgagcaggagctgtgcggcgtcgaggatgatttccacaaccagttcgcggccgagctggaggtgctggcagagctggaaggggcgtcgactccgtcgccctccggggtccccctgttcaccgcgggccgacccccgcggacgttcgaggaggcccttgccagaggggacgcggcctccagtcccgccccagccgcatctgtgggcagcagccagggcggcgccaggaagaggcaggtggacgccgacctgcagccggccgggtccctgccccacgcccccaggatcaaacggcctaggctgcaggtggtcaagaggctgaacttcagatcggaggagatggaggagccgccccctcccgactcctcgccgacggacatcaccccgccgccgagccctgaggacctcgcagagctttggggccacggagtctcagaagctgctgccgacgtgggtctcacacgggcctcaccagctgcccgcaatcccgtcctgaggcggccccccatcttggaggactacgtccacgtgacatccacggagggcgtccgggcttatctggtgctgcgtgctgaccccatggccccgggggtgcagggctctctcctccacgtcccatggcgaggcggtggccagctggacctgctgggtgtgtccttagcctccctgaagaagcaggtcgacggcgagcggcgggagcggctgcttcaggaggcccagaagctttcagacaccctgcacagtctcaggtcgggggaggaggaggcagcccagcccttgggggcccctgaggaggagccgactgacggtcaagacgcctccagtcactgcctctgggtggatgagtttgcaccccgccactacacggagctgctcagtgatgacttcaccaaccgctgcctgctcaagtggctgaagttgtgggacctggtggtgtttggccacgagaggccttcccggaagcccaggcccagtgttgagccggcccgggtcagcaaggaggccacagccccaggcaagtggaagagccacgaacaggtgctggaggagatgctggaggctgggctggacccgagccagcgaccgaagcagaaggtggcactgctctgtgggcccccggggctggggaagaccaccctggcacacgtgattgcgcgtcacgcggggtactctgtggtggagatgaacgccagtgacgaccgtagcccggaggtcttccgcacacgcatcgaggcggccacccagatggagtcggtgctgggtgctggcgggaagcccaactgcctggtcatcgatgagatcgacggggcccccgtggccgccatcaacgtcctcctgagcatcctgaaccgcaaggggccacaggaggtggggccacagggcccggctgtgccttcgggaggcggccgacggcgccgggcagagggggggctcctcatgaggcccattatctgcatttgcaatgaccagttcgcaccgtccctgcggcagctgaagcagcaggccttcctgctccacttcccgccgactctgccctcgaggctggtgcagcggctccaggaggtctccctgcggcagggcatgagggccgacccaggggtgctggccgccctctgtgagaaaactgacaatgacatccgggcctgcatcaacaccctgcagttcctgtacagccggggccagcgggagctgagcgtgcgggacgtgcaggccacacgcgtgggcctcaaggaccagcgcagagggctcttctcggtgtggcaggaggtcttccagctgcctcgagcccagaggcgccgtgtgggccaggaccccgccctgcctgctgacacactcctgctgggtgacggggacgcgggctccctcacctccgcctcacagcgattctaccgtgtcctgcatgccgctgcctctgcgggcgagcacgagaaggtggtccagggcttgtttgacaacttcctgcgtctgcggctgcgagactccagcctgggtgctgtgtgtgtggccctcgactggctggccttcgatgacctgctggcgggggctgctcatcacagccagagcttccagctgctgcgctacccacccttcctgcccgtggccttccatgtgctgtttgcttccagccacacacccaggatcaccttccccagcagccagcaggaggcccagaaccggatgagccagatgaggaacctgatccagacgctggtgtccggcatcgcgccagccacgcgcagccgggccacgccccaggccctgctcctcgatgccctctgcctgctcctggacattcttgcacccaagctccgccccgtgagcacacagctgtacagcacccgtgaaaagcaacagctggccagcctggtgggcacgatgctcgcttacagcctgacctaccgccaggagcgcacgcccgatggccagtacatctacaggctggagccgaacgtggaggaactctgccgcttccctgagctgcctgcccgcaagcccctcacctaccagacgaagcagctcatcgcccgcgagatcgaggtggagaagatgcggcgggcggaggcttctgcccgggtagagaacagcccccaggtggatgggagccccccagggctcgagggtctgctggggggcattggggagaaaggggtgcaccgacctgccccacgcaaccatgagcagcggctggagcacatcatgaggcgagcggcccgggaggaacagcctgagaaggacttctttggacgtgtggtcgtcaggagcacagcagtcccgagtgcaggggacacggccccggagcaggactcagtggagcggcgcatgggcacagcggtgggcaggagcgaggtctggttccgcttcaacgagggtgtctccaacgccgtgcggcgcagcctgtacatcagggacttgctctagttctctgagccgcggacatgccctcgcattgcttcccgcagagtgcagagacaggaagctggagatgtctttataaagtcacacctttacagactgtaa

SEQ ID NO: 211248 - DNA, 3652 bp, Artificial Sequence
  derived and/or modified sequence
atgcacgtgaatgcctctgcccgacggtgggggcggggaggggctgcagcactaccaggcccggcagccagtccgcgcagacccgcgccccgcacaggcccggtgggcaggccgaccctggctccgagcccctcccgcgcccacgcccacgccaagaccaacctgctgccgggccgtgcagtccaggcccccgatgccgtgcccggcgccggctccagccgcgcgcccgcgcgctggcgacccagagaccctggaagctccgctccggacgcctggcagcgcttccgccctgcaccgctgcgcgcgcagccccgcccccccccccggcccgcccccggcccgcccccgccgcggaagggcggctgcggcggccaatggcgagctccccaggacaggacgcgggggctgcggagcaggaactcgccccgcccacccctcgcgcagccccgcctccgccacgccaaccaatggcgcgcgccgccgggcacgccggctgctgattggcggcgcccggcacgctcggggcgggcagtgcgcgacggcggcggcggcgcgggaggttcggagcgggagctcgggctcgcggacggtatggaggactacgagcaggagctgtgcggcgtcgaggatgatttccacaaccagttcgcggccgagctggaggtgctggcagagctggaaggggcgtcgactccgtcgccctccggggtccccctgttcaccgcgggccgacccccgcggacgttcgaggaggcccttgccagaggggacgcggcctccagtcccgccccagccgcatctgtgggcagcagccagggcggcgccaggaagaggcaggtggacgccgacctgcagccggccgggtccctgccccacgcccccaggatcaaacggcctaggctgcaggtggtcaagaggctgaacttcagatcggaggagatggaggagccgccccctcccgactcctcgccgacggacatcaccccgccgccgagccctgaggacctcgcagagctttggggccacgggttctcagaagctgctgccgacgtgggtctcacacgggcctcaccagctgcccgcaatcccgtcctgaggcggccccccatcttggaggactacgtccacgtgacatccacggagggcgtccgggcttatctggtgctgcgtgctgaccccatggccccgggggtgcagggctctctcctccacgtcccatggcgaggcggtggccagctggacctgctgggtgtgtccttagcctccctgaagaagcaggtcgacggcgagcggcgggagcggctgcttcaggaggcccagaagctttcagacaccctgcacaggtcgggggaggaggaggcagcccagcccttgggggcccctgaggaggagccgactgacggtcaagacgcctccagtcactgcctctgggtggatgagtttgcaccccgccactacacggagctgctcagtgatgacttcaccaaccgctgcctgctcaagtggctgaagttgtgggacctggtggtgtttggccacgagaggccttcccggaagcccaggcccagtgttgagccggcccgggtcagcaaggaggccacagccccaggcaagtggaagagccacgaacaggtgctggaggagatgctggaggctgggctggacccgagccagcgaccgaagcagaaggtggcactgctctgtgggcccccggggctggggaagaccaccctggcacacgtgattgcgcgtcacgcggggtactctgtggtggagatgaacgccagtgacgaccgtagcccggaggtcttccgcacacgcatcgaggcggccacccagatggagtcggtgctgggtgctggcgggaagcccaactgcctggtcatcgatgagatcgacggggcccccgtggccgccatcaacgtcctcctgagcatcctgaaccgcaaggggccacaggaggtggggccacagggcccggctgtgccttcgggaggcggccgacggcgccgggcagagggggggctcctcatgaggcccattatctgcatttgcaatgaccagttcgcaccgtccctgcggcagctgaagcagcaggccttcctgctccacttcccgccgactctgccctcgaggctggtgcagcggctccaggagggcatgagggccgacccaggggtgctggccgccctctgtgagaaaactgacaatgacatccgggcctgcatcaacaccctgcagttcctgtacagccggggccagcgggagctgagcgtgcgggacgtgcaggccacacgcgtgggcctcaaggaccagcgcagagggctcttctcggtgtggcaggaggtcttccagctgcctcgagcccagaggagcagccagcatgtctctgtcctgacgtgccatgggaccccaggggatgctggcctggtcgtgctgcaggatatgggagacgctggcctgggcctgtgggatgtgctgctcctggcctggacccggagggggactttccctgggcgattctaccgtgtcctgcatgccgctgcctctgcgggcgagcacgagaaggtggtccagggcttgtttgacaacttcctgcgtctgcggctgcgagactccagcctgggtgctgtgtgtgtggccctcgactggctggccttcgatgacctgctggcgggggctgctcatcacagccagagcttccagctgctgcgctacccacccttcctgcccgtggccttccatgtgctgtttgcttccagccacacacccaggatcaccttccccagcagccagcaggaggcccagaaccggatgagccagatgaggaacctgatccagacgctggtgtccggcatcgcgccagccacgcgcagccgggccacgccccaggccctgctcctcgatgccctctgcctgctcctggacattcttgcacccaagctccgccccgtgagcacacagctgtacagcacccgtgaaaagcaacagctggccagcctggtgggcacgatgctcgcttacagcctgacctaccgccaggagcgcacgcccgatggccagtacatctacaggctggagccgaacgtggaggaactctgccgcttccctgagctgcctgcccgcaagcccctcacctaccagacgaagcagctcatcgcccgcgagatcgaggtggagaagatgcggcgggcggaggcttctgcccgggtagagaacagcccccaggtggatgggagccccccagggctcgagggtctgctggggggcattggggagaaaggggtgcaccgacctgccccacgcaaccatgagcagcggctggagcacatcatgaggcgagcggcccgggaggaacagcctgagaaggacttctttggacgtgtggtcgtcaggagcacagcagtcccgagtgcaggggacacggccccggagcaggactcagtggagcggcgcatgggcacagcggtgggcaggagcgaggtctggttccgcttcaacgagggtgtctccaacgccgtgcggcgcagcctgtacatcagggacttgctctagttctctgagccgcggacatgccctcgcattgcttcccgcagagtgcagagacaggaagctggagatgtctttataaagtcacacctttacagactgt

SEQ ID NO: 211249 - DNA, 2928 bp, Artificial Sequence
  derived and/or modified sequence
atggaggactacgagcaggagctgtgcggcgtggaggacgacttccacaaccagttcgccgccgagctggaggtgctggccgagctggagggcgccagcacccccagccccagcggcgtgcccctgttcaccgccggcagaccccccagaaccttcgaggaggccctggccagaggcgacgccgccagcagccccgcccccgccgccagcgtgggcagcagccagggcggcgccagaaagagacaggtggacgccgacctgcagcccgccggcagcctgccccacgcccccagaatcaagagacccagactgcaggtggtgaagagactgaacttcagaagcgaggagatggaggagccccccccccccgacagcagccccaccgacatcacccccccccccagccccgaggacctggccgagctgtggggccacggcgtgagcgaggccgccgccgacgtgggcctgaccagagccagccccgccgccagaaaccccgtgctgagaagaccccccatcctggaggactacgtgcacgtgaccagcaccgagggcgtgagagcctacctggtgctgagagccgaccccatggcccccggcgtgcagggcagcctgctgcacgtgccctggagaggcggcggccagctggacctgctgggcgtgagcctggccagcctgaagaagcaggtggacggcgagagaagagagagactgctgcaggaggcccagaagctgagcgacaccctgcacagcctgagaagcggcgaggaggaggccgcccagcccctgggcgcccccgaggaggagcccaccgacggccaggacgccagcagccactgcctgtgggtggacgagttcgcccccagacactacaccgagctgctgagcgacgacttcaccaacagatgcctgctgaagtggctgaagctgtgggacctggtggtgttcggccacgagagacccagcagaaagcccagacccagcgtggagcccgccagagtgagcaaggaggccaccgcccccggcaagtggaagagccacgagcaggtgctggaggagatgctggaggccggcctggaccccagccagagacccaagcagaaggtggccctgctgtgcggcccccccggcctgggcaagaccaccctggcccacgtgatcgccagacacgccggctacagcgtggtggagatgaacgccagcgacgacagaagccccgaggtgttcagaaccagaatcgaggccgccacccagatggagagcgtgctgggcgccggcggcaagcccaactgcctggtgatcgacgagatcgacggcgcccccgtggccgccatcaacgtgctgctgagcatcctgaacagaaagggcccccaggaggtgggcccccagggccccgccgtgcccagcggcggcggcagaagaagaagagccgagggcggcctgctgatgagacccatcatctgcatctgcaacgaccagttcgcccccagcctgagacagctgaagcagcaggccttcctgctgcacttcccccccaccctgcccagcagactggtgcagagactgcaggaggtgagcctgagacagggcatgagagccgaccccggcgtgctggccgccctgtgcgagaagaccgacaacgacatcagagcctgcatcaacaccctgcagttcctgtacagcagaggccagagagagctgagcgtgagagacgtgcaggccaccagagtgggcctgaaggaccagagaagaggcctgttcagcgtgtggcaggaggtgttccagctgcccagagcccagagaagaagagtgggccaggaccccgccctgcccgccgacaccctgctgctgggcgacggcgacgccggcagcctgaccagcgccagccagagattctacagagtgctgcacgccgccgccagcgccggcgagcacgagaaggtggtgcagggcctgttcgacaacttcctgagactgagactgagagacagcagcctgggcgccgtgtgcgtggccctggactggctggccttcgacgacctgctggccggcgccgcccaccacagccagagcttccagctgctgagatacccccccttcctgcccgtggccttccacgtgctgttcgccagcagccacacccccagaatcaccttccccagcagccagcaggaggcccagaacagaatgagccagatgagaaacctgatccagaccctggtgagcggcatcgcccccgccaccagaagcagagccaccccccaggccctgctgctggacgccctgtgcctgctgctggacatcctggcccccaagctgagacccgtgagcacccagctgtacagcaccagagagaagcagcagctggccagcctggtgggcaccatgctggcctacagcctgacctacagacaggagagaacccccgacggccagtacatctacagactggagcccaacgtggaggagctgtgcagattccccgagctgcccgccagaaagcccctgacctaccagaccaagcagctgatcgccagagagatcgaggtggagaagatgagaagagccgaggccagcgccagagtggagaacagcccccaggtggacggcagcccccccggcctggagggcctgctgggcggcatcggcgagaagggcgtgcacagacccgcccccagaaaccacgagcagagactggagcacatcatgagaagagccgccagagaggagcagcccgagaaggacttcttcggcagagtggtggtgagaagcaccgccgtgcccagcgccggcgacaccgcccccgagcaggacagcgtggagagaagaatgggcaccgccgtgggcagaagcgaggtgtggttcagattcaacgagggcgtgagcaacgccgtgagaagaagcctgtacatcagagacctgctgtag

SEQ ID NO: 211250 - DNA, 3555 bp, Artificial Sequence
  derived and/or modified sequence
atgcacgtgaacgccagcgccagaagatggggcagaggcggcgccgccgccctgcccggccccgccgccagccccagaagacccgcccccagaaccggccccgtgggcagacccaccctggcccccagccccagcagagcccacgcccacgccaagaccaacctgctgcccggcagagccgtgcaggcccccgacgccgtgcccggcgccggcagcagcagagcccccgccagatggagacccagagaccccggcagcagcgcccccgacgcctggcagagattcagacccgcccccctgagagcccagcccagacccccccccagacccgcccccggcccccccccccccagaaagggcggctgcggcggccagtggagagccccccaggacagaaccagaggcctgagaagcagaaacagccccagaccccccctggcccagcccagactgagacacgccaaccagtggagagccccccccggcacccccgccgccgactggagaagacccgccagaagcggcagagccgtgagagacggcggcggcggcgccggcggcagcgagagagagctgggcctggccgacggcatggaggactacgagcaggagctgtgcggcgtggaggacgacttccacaaccagttcgccgccgagctggaggtgctggccgagctggagggcgccagcacccccagccccagcggcgtgcccctgttcaccgccggcagaccccccagaaccttcgaggaggccctggccagaggcgacgccgccagcagccccgcccccgccgccagcgtgggcagcagccagggcggcgccagaaagagacaggtggacgccgacctgcagcccgccggcagcctgccccacgcccccagaatcaagagacccagactgcaggtggtgaagagactgaacttcagaagcgaggagatggaggagccccccccccccgacagcagccccaccgacatcacccccccccccagccccgaggacctggccgagctgtggggccacggcttcagcgaggccgccgccgacgtgggcctgaccagagccagccccgccgccagaaaccccgtgctgagaagaccccccatcctggaggactacgtgcacgtgaccagcaccgagggcgtgagagcctacctggtgctgagagccgaccccatggcccccggcgtgcagggcagcctgctgcacgtgccctggagaggcggcggccagctggacctgctgggcgtgagcctggccagcctgaagaagcaggtggacggcgagagaagagagagactgctgcaggaggcccagaagctgagcgacaccctgcacagaagcggcgaggaggaggccgcccagcccctgggcgcccccgaggaggagcccaccgacggccaggacgccagcagccactgcctgtgggtggacgagttcgcccccagacactacaccgagctgctgagcgacgacttcaccaacagatgcctgctgaagtggctgaagctgtgggacctggtggtgttcggccacgagagacccagcagaaagcccagacccagcgtggagcccgccagagtgagcaaggaggccaccgcccccggcaagtggaagagccacgagcaggtgctggaggagatgctggaggccggcctggaccccagccagagacccaagcagaaggtggccctgctgtgcggcccccccggcctgggcaagaccaccctggcccacgtgatcgccagacacgccggctacagcgtggtggagatgaacgccagcgacgacagaagccccgaggtgttcagaaccagaatcgaggccgccacccagatggagagcgtgctgggcgccggcggcaagcccaactgcctggtgatcgacgagatcgacggcgcccccgtggccgccatcaacgtgctgctgagcatcctgaacagaaagggcccccaggaggtgggcccccagggccccgccgtgcccagcggcggcggcagaagaagaagagccgagggcggcctgctgatgagacccatcatctgcatctgcaacgaccagttcgcccccagcctgagacagctgaagcagcaggccttcctgctgcacttcccccccaccctgcccagcagactggtgcagagactgcaggagggcatgagagccgaccccggcgtgctggccgccctgtgcgagaagaccgacaacgacatcagagcctgcatcaacaccctgcagttcctgtacagcagaggccagagagagctgagcgtgagagacgtgcaggccaccagagtgggcctgaaggaccagagaagaggcctgttcagcgtgtggcaggaggtgttccagctgcccagagcccagagaagcagccagcacgtgagcgtgctgacctgccacggcacccccggcgacgccggcctggtggtgctgcaggacatgggcgacgccggcctgggcctgtgggacgtgctgctgctggcctggaccagaagaggcaccttccccggcagattctacagagtgctgcacgccgccgccagcgccggcgagcacgagaaggtggtgcagggcctgttcgacaacttcctgagactgagactgagagacagcagcctgggcgccgtgtgcgtggccctggactggctggccttcgacgacctgctggccggcgccgcccaccacagccagagcttccagctgctgagatacccccccttcctgcccgtggccttccacgtgctgttcgccagcagccacacccccagaatcaccttccccagcagccagcaggaggcccagaacagaatgagccagatgagaaacctgatccagaccctggtgagcggcatcgcccccgccaccagaagcagagccaccccccaggccctgctgctggacgccctgtgcctgctgctggacatcctggcccccaagctgagacccgtgagcacccagctgtacagcaccagagagaagcagcagctggccagcctggtgggcaccatgctggcctacagcctgacctacagacaggagagaacccccgacggccagtacatctacagactggagcccaacgtggaggagctgtgcagattccccgagctgcccgccagaaagcccctgacctaccagaccaagcagctgatcgccagagagatcgaggtggagaagatgagaagagccgaggccagcgccagagtggagaacagcccccaggtggacggcagcccccccggcctggagggcctgctgggcggcatcggcgagaagggcgtgcacagacccgcccccagaaaccacgagcagagactggagcacatcatgagaagagccgccagagaggagcagcccgagaaggacttcttcggcagagtggtggtgagaagcaccgccgtgcccagcgccggcgacaccgcccccgagcaggacagcgtggagagaagaatgggcaccgccgtgggcagaagcgaggtgtggttcagattcaacgagggcgtgagcaacgccgtgagaagaagcctgtacatcagagacctgctgtag

SEQ ID NO: 211251 - protein, 1299 aa, Artificial Sequence
  derived and/or modified sequence
MSLQEMFRFPMGLLLGSVLLVASAPATLEPPGCSNKEQQVTVSHTYKIDVPKSALVQVDADPQPLSDDGASLLALGEAREEQNIIFRHNIRLQTPQKDCELAGSVQDLLARVKKLEEEMVEMKEQCSAQRCCQGVTDLSRHCSGHGTFSLETCSCHCEEGREGPACERLACPGACSGHGRCVDGRCLCHEPYVGADCGYPACPENCSGHGECVRGVCQCHEDFMSEDCSEKRCPGDCSGHGFCDTGECYCEEGFTGLDCAQVVTPQGLQLLKNTEDSLLVSWEPSSQVDHYLLSYYPLGKELSGKQIQVPKEQHSYEILGLLPGTKYIVTLRNVKNEVSSSPQHLLATTDLAVLGTAWVTDETENSLDVEWENPSTEVDYYKLRYGPMTGQEVAEVTVPKSSDPKSRYDITGLHPGTEYKITVVPMRGELEGKPILLNGRTEIDSPTNVVTDRVTEDTATVSWDPVQAVIDKYVVRYTSADGDTKEMAVHKDESSTVLTGLKPGEAYKVYVWAERGNQGSKKADTNALTEIDSPANLVTDRVTENTATISWDPVQATIDKYVVRYTSADDQETREVLVGKEQSSTVLTGLRPGVEYTVHVWAQKGDRESKKADTNAPTDIDSPKNLVTDRVTENMATVSWDPVQAAIDKYVVRYTSAGGETREVPVGKEQSSTVLTGLRPGMEYMVHVWAQKGDQESKKADTKAQTDIDSPQNLVTDRVTENMATVSWDPVRATIDRYVVRYTSAKDGETREVPVGKEQSSTVLTGLRPGVEYTVHVWAQKGAQESKKADTKAQTDIDSPQNLVTDWVTENTATVSWDPVQATIDRYVVHYTSANGETREVPVGKEQSSTVLTGLRPGMEYTVHVWAQKGNQESKKADTKAQTEIDGPKNLVTDWVTENMATVSWDPVQATIDKYMVRYTSADGETREVPVGKEHSSTVLTGLRPGMEYMVHVWAQKGAQESKKADTKAQTELDPPRNLRPSAVTQSGGILTWTPPSAQIHGYILTYQFPDGTVKEMQLGREDQRFALQGLEQGATYPVSLVAFKGGRRSRNVSTTLSTVGARFPHPSDCSQVQQNSNAASGLYTIYLHGDASRPLQVYCDMETDGGGWIVFQRRNTGQLDFFKRWRSYVEGFGDPMKEFWLGLDKLHNLTTGTPARYEVRVDLQTANESAYAIYDFFQVASSKERYKLTVGKYRGTAGDALTYHNGWKFTTFDRDNDIALSNCALTHHGGWWYKNCHLANPNGRYGETKHSEGVNWEPWKGHEFSIPYVELKIRPHGYSREPVLGRKKRTLRGRLRTF

SEQ ID NO: 211252 - DNA, 3900 bp, Artificial Sequence
  derived and/or modified sequence
atgtccttacaagaaatgtttcgtttcccaatgggcctgctcctggggtccgttctgctggtggcaagcgcgccagccacgctggagcccccaggctgttccaacaaggagcagcaggtaaccgtatctcatacttacaaaatcgatgttccaaaatccgccctcgtgcaagttgatgcagatcctcagcctttgtctgacgacggcgcttccctccttgcactcggcgaggcgcgagaggagcagaacatcattttccgacataatatacgcttgcagacaccacagaaagattgcgagctagcaggctccgtgcaggatctattagctagagtgaaaaagttggaggaagaaatggtggagatgaaagaacaatgttctgctcagcgctgctgccagggggtgactgatctctcgaggcactgtagtggccacggcaccttttctctggagacttgcagctgtcactgcgaagaaggcagagagggccctgcgtgtgaaagacttgcatgtccaggtgcttgctctggacacggaaggtgtgtcgatgggaggtgcctgtgtcatgagccctatgtgggagctgattgtgggtatcctgcatgcccagagaattgctcaggacatggtgagtgtgttaggggagtgtgtcagtgtcatgaagatttcatgagcgaagactgtagtgagaagaggtgtccaggcgactgttcagggcacgggttttgcgacacaggcgaatgctactgtgaagagggcttcactggcttggactgtgcacaggtggtcacaccacaagggctgcagcttcttaaaaacactgaggattccctcctggtgagctgggaaccaagctcacaagtggaccactatctcctcagctattatcccctgggcaaggagctcagcggcaagcagattcaggtgcctaaagagcaacacagctacgagatcctaggtctgcttccaggcaccaaatatatagtgaccttacggaacgtgaagaacgaggtctcaagcagcccccaacatcttttagctaccacagatcttgcggtgctggggactgcttgggtgacagacgaaactgagaactctctggacgttgagtgggagaacccgtccacagaggtggattactacaaactgagatatgggcctatgaccgggcaagaggtagctgaagtaaccgtcccgaagtcctctgatccaaagtccagatatgatatcaccggcctgcatccaggaaccgagtataaaattacggtggtgcctatgaggggggagttggaaggaaaacccatcctgctcaacgggagaactgaaatcgacagtcccaccaatgtggtgaccgatcgcgtgactgaggataccgcaacagtaagttgggacccggttcaggctgtgatagacaaatacgtagttcggtatacgtccgccgacggggataccaaagagatggccgtgcacaaggatgaatccagcaccgtgctgaccggtttgaagcctggggaggcttacaaagtgtacgtctgggcagaaagaggaaatcagggctctaagaaagcagataccaacgctctcaccgagatcgattccccggcaaacttggtgactgaccgtgtgacagaaaataccgccacgataagctgggacccggtacaggcaaccattgacaaatacgtggtccgctacacttcggctgatgaccaggagacaagggaggtgcttgtgggaaaggagcaaagctctacagtgcttacaggcctgagaccaggcgttgagtacacagtgcatgtgtgggcacaaaagggcgacagagaatcaaagaaggccgatacgaacgctcccacggatatcgattccccaaaaaatctagttacagatcgcgtcacggaaaacatggcaactgtgagctgggatccagtccaggctgcgatcgacaaatacgtggtgcggtacaccagcgcaggcggagagactagagaggtgcccgtggggaaagaacaatccagtaccgtcctcacgggacttaggccaggcatggagtacatggtccacgtttgggcccaaaaaggagaccaggagagtaagaaagctgacacaaaagcacagaccgatattgatagccctcagaatcttgtgactgatagggtaacggaaaatatggccacagtgtcctgggatcctgtgcgcgcaacgatcgatagatatgtcgtccgatatacctcggcgaaagacggcgagacacgtgaggttcccgttggaaaggagcagtcatccaccgttctgaccgggctccggccaggggtagaatacacggtccatgtgtgggcgcagaaaggagctcaggaaagcaagaaagcggatacaaaggcccagaccgatattgactctccccagaaccttgtgacagactgggtcacagagaacactgccacagtgtcttgggatcctgtgcaggctaccattgatcgttacgtggtgcactatacatcggctaacggcgagactcgagaggtgcctgtgggaaaggaacaatcttcgaccgttcttaccggactgcgccctgggatggagtataccgtgcatgtatgggcccagaaaggaaaccaggagagcaagaaagccgataccaaagcacagaccgaaatcgatgggcctaagaacctcgttactgactgggtaacagaaaatatggccaccgtgtcttgggatccagtccaagcgactatcgataagtatatggtccgctatactagcgcggatggagaaacacgggaagtgccggtcggcaaggagcacagtagtactgtgctgactggcctgcgtcccggaatggagtatatggtgcacgtttgggctcagaagggtgcccaggaaagtaagaaggccgacacaaaagcccagaccgaattggatcccccacgaaatctcaggccatcagcggttactcagagcggtggaattttgacctggaccccaccaagtgcccagatccacggatacatccttacgtaccagttcccggacggcacagtcaaagagatgcagcttgggcgtgaagaccagcgattcgccctacagggtctagagcaaggcgcaacctacccagttagtttagtcgctttcaaaggtggcaggaggagtagaaatgtctcaaccactctgtctactgtgggcgctcgattccctcacccttccgactgtagccaagttcagcaaaatagcaatgccgcttctggactgtacaccatatacctgcacggcgatgcgtccaggccattacaagtttactgtgacatggaaactgacggagggggttggatcgtctttcagcggaggaacaccggccagctcgacttctttaaaagatggagaagttatgtggagggattcggtgacccaatgaaggagttctggctggggctggataagcttcataaccttaccactggaacacctgcacgatacgaagtaagagttgacctgcagactgcaaatgaatccgcttatgcaatctacgacttcttccaggtggcctccagcaaagagagatataagctcactgtcggcaaatacagaggaacggctggagacgcactgacctaccataatggctggaagttcaccacatttgaccgtgataatgatattgctctcagtaactgtgccctcacccatcacggtggttggtggtacaaaaactgtcacttggctaatccaaacggcaggtacggggaaactaagcactcagagggggtgaactgggagccctggaagggacacgaattcagtatcccttatgtagagctcaaaattagaccccatgggtatagccgggaacctgtcctgggccgaaagaagagaactctgagggggcgattgagaaccttctag

SEQ ID NO: 211253 - DNA, 3900 bp, Artificial Sequence
  derived and/or modified sequence
atgtctctgcaggagatgtttcgttttccaatgggactgttgttaggatccgtcctacttgtggccagcgcccctgctactctcgaaccacccgggtgcagcaataaggaacagcaagtgacagtgtcacacacctacaaaatcgatgttcctaagagcgcgcttgtccaggtggacgccgacccacagccactctcagatgacggtgcatcccttttggctcttggggaagcccgtgaggagcagaacattatcttcagacacaatatccgcctccaaacaccacagaaagattgcgagttggccgggagcgtacaagacctgttggccagggtgaagaagctggaggaggagatggtcgaaatgaaggaacagtgctcggcccagagatgttgtcaaggagttactgatctgtcaaggcactgttctggccacggtacttttagccttgagacctgcagctgccattgcgaggagggccgcgagggacctgcatgcgagcgcctggcctgcccaggtgcatgcagcggacacggaaggtgtgtggacggcaggtgcctgtgccatgagccatacgtcggcgctgactgcggctatcctgcatgccccgaaaattgttcaggacatggcgaatgtgtaaggggcgtctgtcaatgccatgaagacttcatgtccgaggactgttcagagaaaaggtgtcctggcgattgcagcggccacggtttctgtgacaccggggaatgctattgtgaagaaggatttactggacttgattgcgcacaggtggtgacaccccagggtctgcagttattgaagaatacagaagattccttactagtgagttgggagccaagttctcaagtggaccactacctgttatcctactaccccttgggcaaggaactgtcaggcaagcaaatccaggtgccaaaagaacagcactcatatgagatcctaggcctgctgcctggcactaaatacatcgtcaccctgaggaacgtgaagaatgaagtgtcgtcctccccgcagcatctcctcgctacgacagacctcgctgttctgggcacagcttgggttactgatgagaccgagaattcccttgatgtcgaatgggagaacccaagcacagaagtggactattacaaactgcgttacggacccatgacaggccaggaagtcgctgaggtcactgtgcctaagagtagcgatcccaagtccaggtacgacataaccggattgcaccctggcactgagtacaaaatcactgtcgttcccatgcgcggagaactggaagggaagccaatcctcctgaatgggcgcaccgagattgacagtccaacaaatgtcgtaaccgatcgcgtgactgaagacacagctactgttagttgggatccagtgcaggctgtgatcgataagtatgtcgtgcgatacacctccgcagacggagatacaaaagagatggccgtgcacaaagatgaatcgagtacagtgttgaccggccttaagccgggtgaggcctacaaagtgtatgtctgggcggagaggggcaatcaaggctcaaaaaaagccgatactaatgcactgacagagatcgactcacctgcaaacctggtcacggacagagtgacggagaacaccgctacgatcagttgggacccggttcaggccacgatcgataagtatgtggtacgatataccagtgccgacgatcaggagacgcgagaagttctcgtcgggaaggaacaaagcagtacagtgctgacaggccttagacccggagttgaatatacagtacacgtgtgggctcagaaaggcgatcgagaaagcaagaaagctgacacaaacgcaccaactgatatcgactccccgaaaaaccttgtgaccgaccgagtgacagaaaatatggccactgtgtcctgggatccagttcaagcagcgattgacaagtacgtcgtgcgctacacttctgcggggggtgagactagggaagtgcctgtgggcaaggaacaaagctctaccgtactgaccggcctgagacccggcatggaatatatggtccacgtctgggcgcaaaagggtgaccaagaaagtaagaaagctgatactaaggcacagacggatattgacagtccgcagaatctggtgactgatagggtgaccgagaacatggcaacagtctcctgggatcccgtgcgggctactatcgaccggtacgtcgttcggtatacttccgcaaaggacggtgaaactagggaggtacccgtaggaaaagagcagtcatctaccgtattaactggattgcggcctggggtagaatacactgtgcatgtttgggcacagaaaggagcccaagaatctaagaaagcagacacgaaagcacagaccgacattgactctccacagaatcttgtgactgactgggtgactgagaatacggccacagtcagctgggatcccgtgcaggcaaccatcgatagatatgtcgttcactacacgagtgccaacggagaaacaagagaggtcccagttggcaaagagcagtcatcgactgtcctgaccgggctgcggcctgggatggagtacactgtgcacgtttgggcccaaaagggaaatcaagaaagtaaaaaggctgacactaaggcacaaacggagatcgacggacctaagaatctggtgacagactgggtgactgaaaacatggctaccgtctcctgggaccccgtccaggcaactattgataaatatatggtcaggtatacatccgccgatggtgaaacgcgcgaggtccccgttggcaaagaacattcaagtacagtcctgacaggattgcgccctggaatggaatacatggtgcacgtgtgggctcagaaaggggctcaagagtcaaaaaaagctgataccaaggcacagacagagctggacccacctcgaaatctcagaccgtccgccgtgacccagtccggaggaattctcacttggactcccccttcagcgcagatacatggatacattcttacataccagttccctgacggtacagtgaaagaaatgcagcttggtagagaggaccagcggttcgcactgcaagggttagagcagggggctacatatcctgtcagtctggtggcttttaaaggcggaaggcgtagccggaacgtgtcaacaaccctgagtacggttggagcacggttcccgcacccctcggactgctcacaggtgcaacagaattccaatgcggctagcggattgtacaccatctacctgcacggggacgcctctagaccgttacaggtgtactgtgacatggagacagacggaggaggctggatagtgttccagcggcgcaacaccggccagctggatttttttaagagatggagatcatatgtggagggttttggagacccgatgaaagaattttggctgggcctggacaaactgcataacttaacgactggtactccagcacgctacgaggtgagagtagatttacagaccgcaaatgaatccgcttacgcgatctacgacttctttcaggtagcctcatcaaaggaaaggtacaaactcaccgtcggaaagtacagaggtaccgccggggatgctctcacataccataatggctggaaatttaccacctttgacagggataacgacatagcactgagtaattgcgcgcttactcaccacgggggttggtggtataaaaactgccatctggcgaatcctaacggaaggtacggcgagactaaacattcggaaggcgttaactgggaaccttggaagggccatgaattcagtatcccgtacgtagagctgaagatccggccgcatggctactcaagggaacccgtgctgggtcgcaaaaagagaacgctgaggggtaggctgcgcactttctag

SEQ ID NO: 211254 - DNA, 3900 bp, Artificial Sequence
  derived and/or modified sequence
atgagtcttcaggaaatgtttagattcccaatgggcctgctgcttggctcagttctcttagttgcctcagcaccagcgactctagaaccgcccggctgcagtaataaagagcagcaagtgacagtatctcacacatataagattgatgtgcccaagtccgcactcgtgcaagtagatgcagatccacagcctctgagcgacgatggtgcatctctgttggcactgggggaggctcgcgaagaacaaaacatcatatttagacataatatccgcctgcagacgccccaaaaagactgtgagctggcaggttcggttcaggatttactcgctcgagttaagaaattagaggaggaaatggtggagatgaaggaacaatgcagcgcacaacggtgttgtcagggggtcacagaccttagtaggcactgctcaggacatggaaccttcagcctagagacgtgcagctgtcattgtgaagagggaagagaaggccctgcgtgcgaacgactggcgtgccccggggcctgtagtggtcatggccgttgcgtcgacgggagatgtctgtgtcacgaaccttatgtaggcgcagattgtggatacccagcctgcccagaaaattgttctggacacggggaatgcgtccgaggtgtctgtcaatgtcacgaagacttcatgagcgaagactgttccgaaaaacgctgtcctggtgactgcagcggtcacggcttctgtgatactggtgaatgttactgcgaggagggattcacagggctggattgtgcacaagtcgttacacctcagggattgcagctgctcaaaaacacagaagactcccttctcgtttcctgggaaccaagctcacaagttgaccattacttactatcctactacccactgggcaaagaactcagcgggaaacaaatccaggtgccaaaggagcagcatagttacgaaattcttggcctcctgcctggcacaaagtatattgtgacccttaggaacgttaaaaacgaggtatcgtcttcaccccaacacctacttgccactacagacttagcagtcctgggaactgcatgggttaccgacgagaccgagaactccttagacgtggaatgggaaaatccctctaccgaagtggactactataaattaaggtatggccccatgactggacaggaggttgctgaggttactgtgcctaaatcaagcgaccctaagtctaggtacgatattactggattgcatccgggcactgagtacaagatcacagtagtgcccatgcgcggagaactagaaggcaagccaattctgctaaacgggaggaccgaaatagactcacctacaaatgtagtaacagatagagtgacggaggacacagccacagtctcatgggacccagtacaggcagtgatcgataagtatgtggttcgatatacgagtgctgacggcgatacaaaggagatggctgttcacaaggatgaaagctcgactgtgctaaccggtctaaaaccgggagaagcatacaaggtatacgtttgggctgaacggggcaatcaggggtcaaaaaaagccgacacaaacgccctcacagagattgactctcccgccaacttagttacggatagggtgacagaaaatacagccaccatctcctgggacccagtacaggcaacaattgacaagtacgttgtgcgatatacatctgccgacgatcaagaaactcgggaggtcctcgtcggaaaagaacaatcctcaactgtgttgacaggattgcgccccggagtcgagtacacggtgcatgtgtgggctcagaagggagatagagagtctaagaaagctgatacaaacgcccccacagatatagattcgcctaaaaatttagttacagaccgcgttacagaaaatatggctaccgtgtcttgggatcccgttcaggccgctatcgataaatatgtggttcggtataccagcgcagggggagagacaagggaggtccctgtgggtaaagaacagagttcaacagttctcacgggtttgcgaccagggatggagtacatggtacacgtgtgggctcagaagggtgatcaggaatctaagaaagccgataccaaggcccagaccgacatcgacagcccgcaaaacctcgttacagaccgtgtgaccgagaatatggcgaccgtgagctgggaccccgtgagagcgacaattgacagatatgttgtccgttacacctccgctaaagatggggagactcgtgaagtgccagtaggcaaggaacaatcgtccaccgtgctgacgggcctcagacctggagtagaatataccgttcacgtatgggcacaaaaaggcgcccaggagagcaagaaagccgacacaaaagcacaaacagatatagactctccacagaacctggtgacagactgggtcacagaaaatactgctactgtttcatgggaccctgtgcaggcaaccatcgatcgttatgttgttcactatacttcagccaacggcgaaactagagaagtcccagtgggaaaagaacaatcttcaaccgttttgactggccttcgcccagggatggaatatactgtgcacgtgtgggcacaaaaagggaaccaggaatcgaagaaggcagacaccaaagcccaaactgaaatcgacggaccgaagaaccttgtgacagactgggtaaccgagaacatggccaccgtgagttgggatcccgtccaagcaacaatagacaaatacatggtgagatacactagtgccgacggagaaacccgcgaggtccccgtaggtaaagaacactctagcactgtcctgacaggtttgcgtcccggaatggagtacatggtacacgtctgggcccagaagggcgcgcaggaatcaaagaaagcagacacgaaggctcaaacagaactcgatcctccaagaaatctgcgcccatcagctgtgacccaaagcggaggtattctgacttggacgccgccgtctgctcaaatccacgggtacatcctcacctatcaattcccagatggtacagtgaaagaaatgcaactgggcagagaggatcagagatttgcgcttcaaggtctagaacagggcgccacataccccgtatcccttgttgcattcaagggaggaaggagaagccggaatgtgtcgacgacactttctaccgtaggagcaagattcccacacccttctgattgctcacaagttcagcagaattctaacgcagcctccggtttgtacacaatctatctccatggcgacgcgagccggccactgcaggtgtattgcgatatggagaccgacgggggaggctggattgtcttccagagacgcaacacaggacaactggatttttttaaaaggtggcgaagttatgttgaaggatttggagaccccatgaaggaattctggctcggcctagataagttacataaccttacaactggaacacccgcccgctatgaagtgcgagtggacttacaaacagccaacgagagcgcttacgccatctacgactttttccaggtggccagcagcaaagaacggtacaagcttaccgtgggcaaatatagagggactgccggcgacgcccttacataccacaacggatggaaatttacaacctttgacagagacaacgatatcgcactgtctaattgtgctctgacacaccatggggggtggtggtacaaaaattgccacctcgcgaatcctaacggccgatacggcgagaccaaacattcagagggagtcaattgggagccttggaagggccacgaattctctattccatatgtcgaattaaaaatccgcccacatggttacagtagagagcctgtgttaggtcgaaaaaagcgtactcttaggggacgcctccggactttttag

SEQ ID NO: 211255 - DNA, 5008 bp, Artificial Sequence
  derived and/or modified sequence
aagtaccaaggtctgcggcaggaggagaccggctcacaggagcagcagcattggaagaggcacccagcagcctcccaggcatcctggagggtctgctccctgtctttccaaggatgagtctccaggagatgttccgcttccctatggggctcctgcttggctctgtgctcctggtggcttcggccccagccactctggagcctcccggctgcagcaacaaggagcaacaggtcactgtcagccacacctacaagatcgatgtgcccaagtctgccttggttcaggttgacgctgaccctcagcccctcagtgacgatggggcttcgctcttggccctgggggaggccagggaggaacagaacatcatcttcaggcacaacatccgccttcagacgccacagaaggactgcgagttggcaggcagtgtccaggacctcctggcccgggtgaagaagctggaggaagagatggtggagatgaaggaacagtgtagtgcccagcgctgctgccagggagtcactgatctaagccgccactgcagcggccacgggaccttctccctggagacctgcagctgccactgcgaagagggcagggagggccccgcctgcgagcggctggcctgccccggggcgtgcagcggccacgggcgttgcgtggacgggcgctgcctgtgccatgagccctacgtgggtgccgactgcggctacccggcctgccctgagaactgcagcggacacggcgagtgcgtgcgcggcgtgtgccagtgccacgaagacttcatgtcggaggactgcagcgagaagcgctgtcccggcgactgcagcggccacggcttctgtgacacgggcgagtgctactgcgaggagggcttcacaggcctggactgtgcccaggtggtcaccccacagggcctgcagctgctcaagaacacggaggattctctgctggtgagctgggagccctccagccaggtggatcactacctcctcagctactaccccctggggaaggagctctctgggaagcagatccaagtgcccaaggagcagcacagctatgagattcttggtttgctgcctggaaccaagtacatagtcaccctgcgtaacgtcaagaatgaagtttctagcagcccacagcatctacttgccaccacagaccttgctgtgcttggcactgcctgggtgacagatgagactgagaactcccttgacgtggagtgggaaaacccctcaactgaggtggactactacaagctgcgatatggccccatgacaggacaggaggtagctgaggtcactgtgcccaagagcagtgaccccaagagccgatatgacatcactggtctgcacccggggactgagtataagatcacggtggtgcccatgagaggagagctggagggcaagccgatcctcctgaatggcaggacagaaattgacagtccaaccaatgttgtcactgatcgagtgactgaagacacagcaactgtctcctgggacccagtgcaggctgtcatagacaagtatgtagtgcgctacacttctgctgatggggacaccaaggaaatggcagtgcacaaggatgagagcagcactgtcctgacgggcctgaagccaggagaggcatacaaggtctacgtgtgggctgaaaggggcaaccaggggagcaagaaagctgacaccaatgccctcacagaaattgacagcccagcaaacctggtgactgaccgggtgactgagaataccgccaccatctcctgggacccggtacaggccaccattgacaagtacgtggtgcgctacacctctgctgacgaccaagagaccagagaggttctggtggggaaggagcagagcagcactgtcctgacaggcctgaggccaggtgtggagtacacagtgcatgtctgggcccagaagggggaccgagagagcaagaaggctgacaccaacgccccgacagatattgacagccccaaaaacctggtgactgaccgggtgacagagaatatggccacggtctcctgggacccggtgcaggccgccattgacaagtacgtggtgcgctacacctctgctggtggagagaccagggaggttccggtggggaaggagcagagcagcacagtcctgacaggcctgagaccgggtatggagtacatggtgcacgtgtgggcccagaagggggaccaggagagcaagaaggccgacaccaaggcccagacagacattgacagcccccaaaacctggtgaccgaccgggtgacagagaatatggccactgtctcctgggacccggtgcgggccaccattgacaggtatgtggtgcgctacacctctgccaaggacggagagaccagggaggttccggtggggaaggagcagagtagcactgtcctgacgggcctgaggccgggtgtggagtacacggtgcacgtgtgggcccagaagggggcccaggagagcaagaaggctgacaccaaggcccagacagacattgacagcccccaaaacctggtcactgactgggtgacagagaatacagccactgtctcctgggacccggtgcaggccaccattgacaggtatgtggtgcactacacgtctgccaacggagagaccagggaggttccagtggggaaggagcagagcagcactgtcctgacgggcctgaggccgggcatggagtacacggtgcacgtgtgggcccagaaggggaaccaggagagcaagaaggctgacaccaaggcccagacagaaattgacggccccaaaaacctagtgactgactgggtgacggagaatatggccactgtctcctgggacccggttcaggccaccattgacaagtacatggtgcgctacacctctgctgacggagagaccagggaggttccggtggggaaggagcacagcagcactgtcctgacgggcctgagaccaggcatggagtacatggtgcacgtgtgggcccagaagggggcccaggagagcaagaaggctgacaccaaggcccagacagaactcgaccctcccagaaaccttcgtccatctgctgtaacgcagtctggtggcatattgacctggacgcccccctctgctcagatccacggctacattctgacttaccagttcccagatggcacagttaaggagatgcagctgggacgggaagaccagaggtttgcgttgcaaggccttgagcaaggcgccacctaccctgtctcccttgttgcctttaagggtggtcgccggagcagaaatgtatccaccaccctctccacagttggtgcccgtttcccacacccttcggactgcagtcaggttcagcagaacagcaatgccgccagtggtctgtacaccatctacctgcatggcgatgccagccggcccctgcaggtgtactgtgacatggaaacggacggaggtggctggattgtcttccagaggcggaacactgggcagctggatttcttcaagcgatggaggagctatgtggaaggctttggggaccccatgaaggagttctggcttggacttgacaagctacacaacctcaccaccggcactccagcgcggtatgaggtgagagtggatttacagactgccaatgaatctgcctatgctatatatgatttcttccaagtggcctccagcaaggagcggtataagctgacagttgggaaatacagaggcacggcaggggatgctcttacttaccacaatggatggaagtttacaacttttgacagagacaatgatatcgcactcagcaactgtgccctgacacatcatggtggctggtggtataagaactgccacttggccaaccctaatggcagatatggggagaccaagcacagtgagggggtgaactgggagccttggaaaggacatgaattctccattccttacgtggagttgaaaatccgccctcatggctacagcagggagcctgtcctgggcagaaagaagcggacgctgagaggaaggctgcgaacgttctgatggcccgtgtgagcagtcctcgcaggagacaccaccagctgtggcagcttggggcggggtgggtagtggtcactgcggtctgggagtgctcagatagcccgcagaacaaatcatgtcaccaagcttcaagccatggaggttccttccctctcacctgcatttttgcccgtctttatgagggtcttgaaaatcaaaatagtagttgcacagtatgtgtaggaaagacagtactggaacggcaaggtttctcagcttatcttcagcaacatatatactggattagggcaagagaaggaatcacccagcacttcaccagttggaaatctctggaaatttacatctatgtatttaaagttctgctaatgcaaatcttttctctggaaagaagcacagaggaggagttctgatgacccaggggttagggctgagacaaccggacgtttgtcacctcctttcccattgggtttttaggaaaacagtgtgaacctcccccttttaatttctggtgttatgaggaagaataaaggggataaaaggggctaagatggactcatgtttagctaagttctgacttgtatccagcatgctggagaccaaagctgccgccttactgctatttttaagtgccctcttttcagtcatttgcataattgcgtccatagagctgcatatgttgtgaataaattctcactcatttcaactttgaataatttgactgtcttgataattggttcctcccaaagactcttctgcaactcccattcatgcccaccaggcctcagactccctcttttccccgccctgcactattggagccctgggttttgtgggagtgctcagcaccgtgagtcttactgtttgatcggacagttagcaagatcagatcctttttgcttattttctatcactttggagggttttctgtagcaaaatcagtgaccaatgaagtaacttaaattcctattgaagaaaaaaaataataaaccacttgattt

SEQ ID NO: 211256 - DNA, 3900 bp, Artificial Sequence
  derived and/or modified sequence
atgagcctgcaggagatgttcagattccccatgggcctgctgctgggcagcgtgctgctggtggccagcgcccccgccaccctggagccccccggctgcagcaacaaggagcagcaggtgaccgtgagccacacctacaagatcgacgtgcccaagagcgccctggtgcaggtggacgccgacccccagcccctgagcgacgacggcgccagcctgctggccctgggcgaggccagagaggagcagaacatcatcttcagacacaacatcagactgcagaccccccagaaggactgcgagctggccggcagcgtgcaggacctgctggccagagtgaagaagctggaggaggagatggtggagatgaaggagcagtgcagcgcccagagatgctgccagggcgtgaccgacctgagcagacactgcagcggccacggcaccttcagcctggagacctgcagctgccactgcgaggagggcagagagggccccgcctgcgagagactggcctgccccggcgcctgcagcggccacggcagatgcgtggacggcagatgcctgtgccacgagccctacgtgggcgccgactgcggctaccccgcctgccccgagaactgcagcggccacggcgagtgcgtgagaggcgtgtgccagtgccacgaggacttcatgagcgaggactgcagcgagaagagatgccccggcgactgcagcggccacggcttctgcgacaccggcgagtgctactgcgaggagggcttcaccggcctggactgcgcccaggtggtgaccccccagggcctgcagctgctgaagaacaccgaggacagcctgctggtgagctgggagcccagcagccaggtggaccactacctgctgagctactaccccctgggcaaggagctgagcggcaagcagatccaggtgcccaaggagcagcacagctacgagatcctgggcctgctgcccggcaccaagtacatcgtgaccctgagaaacgtgaagaacgaggtgagcagcagcccccagcacctgctggccaccaccgacctggccgtgctgggcaccgcctgggtgaccgacgagaccgagaacagcctggacgtggagtgggagaaccccagcaccgaggtggactactacaagctgagatacggccccatgaccggccaggaggtggccgaggtgaccgtgcccaagagcagcgaccccaagagcagatacgacatcaccggcctgcaccccggcaccgagtacaagatcaccgtggtgcccatgagaggcgagctggagggcaagcccatcctgctgaacggcagaaccgagatcgacagccccaccaacgtggtgaccgacagagtgaccgaggacaccgccaccgtgagctgggaccccgtgcaggccgtgatcgacaagtacgtggtgagatacaccagcgccgacggcgacaccaaggagatggccgtgcacaaggacgagagcagcaccgtgctgaccggcctgaagcccggcgaggcctacaaggtgtacgtgtgggccgagagaggcaaccagggcagcaagaaggccgacaccaacgccctgaccgagatcgacagccccgccaacctggtgaccgacagagtgaccgagaacaccgccaccatcagctgggaccccgtgcaggccaccatcgacaagtacgtggtgagatacaccagcgccgacgaccaggagaccagagaggtgctggtgggcaaggagcagagcagcaccgtgctgaccggcctgagacccggcgtggagtacaccgtgcacgtgtgggcccagaagggcgacagagagagcaagaaggccgacaccaacgcccccaccgacatcgacagccccaagaacctggtgaccgacagagtgaccgagaacatggccaccgtgagctgggaccccgtgcaggccgccatcgacaagtacgtggtgagatacaccagcgccggcggcgagaccagagaggtgcccgtgggcaaggagcagagcagcaccgtgctgaccggcctgagacccggcatggagtacatggtgcacgtgtgggcccagaagggcgaccaggagagcaagaaggccgacaccaaggcccagaccgacatcgacagcccccagaacctggtgaccgacagagtgaccgagaacatggccaccgtgagctgggaccccgtgagagccaccatcgacagatacgtggtgagatacaccagcgccaaggacggcgagaccagagaggtgcccgtgggcaaggagcagagcagcaccgtgctgaccggcctgagacccggcgtggagtacaccgtgcacgtgtgggcccagaagggcgcccaggagagcaagaaggccgacaccaaggcccagaccgacatcgacagcccccagaacctggtgaccgactgggtgaccgagaacaccgccaccgtgagctgggaccccgtgcaggccaccatcgacagatacgtggtgcactacaccagcgccaacggcgagaccagagaggtgcccgtgggcaaggagcagagcagcaccgtgctgaccggcctgagacccggcatggagtacaccgtgcacgtgtgggcccagaagggcaaccaggagagcaagaaggccgacaccaaggcccagaccgagatcgacggccccaagaacctggtgaccgactgggtgaccgagaacatggccaccgtgagctgggaccccgtgcaggccaccatcgacaagtacatggtgagatacaccagcgccgacggcgagaccagagaggtgcccgtgggcaaggagcacagcagcaccgtgctgaccggcctgagacccggcatggagtacatggtgcacgtgtgggcccagaagggcgcccaggagagcaagaaggccgacaccaaggcccagaccgagctggacccccccagaaacctgagacccagcgccgtgacccagagcggcggcatcctgacctggaccccccccagcgcccagatccacggctacatcctgacctaccagttccccgacggcaccgtgaaggagatgcagctgggcagagaggaccagagattcgccctgcagggcctggagcagggcgccacctaccccgtgagcctggtggccttcaagggcggcagaagaagcagaaacgtgagcaccaccctgagcaccgtgggcgccagattcccccaccccagcgactgcagccaggtgcagcagaacagcaacgccgccagcggcctgtacaccatctacctgcacggcgacgccagcagacccctgcaggtgtactgcgacatggagaccgacggcggcggctggatcgtgttccagagaagaaacaccggccagctggacttcttcaagagatggagaagctacgtggagggcttcggcgaccccatgaaggagttctggctgggcctggacaagctgcacaacctgaccaccggcacccccgccagatacgaggtgagagtggacctgcagaccgccaacgagagcgcctacgccatctacgacttcttccaggtggccagcagcaaggagagatacaagctgaccgtgggcaagtacagaggcaccgccggcgacgccctgacctaccacaacggctggaagttcaccaccttcgacagagacaacgacatcgccctgagcaactgcgccctgacccaccacggcggctggtggtacaagaactgccacctggccaaccccaacggcagatacggcgagaccaagcacagcgagggcgtgaactgggagccctggaagggccacgagttcagcatcccctacgtggagctgaagatcagaccccacggctacagcagagagcccgtgctgggcagaaagaagagaaccctgagaggcagactgagaaccttctag

SEQ ID NO: 211257 - DNA, 3900 bp, Artificial Sequence
  derived and/or modified sequence
atgtctttacaggagatgtttcggtttcccatggggctgttgttaggaagtgttctgctcgtggcctcggctcctgccacactggagccccccgggtgttctaataaggagcaacaagttaccgtcagccatacgtataagatagatgttccaaaatctgccctggtgcaggtggatgcggacccacaaccgctgtccgacgatggggcttcactgctggcactgggagaagctcgggaagaacagaatattatcttccgccacaacattaggctgcaaaccccgcagaaggattgtgagctcgccggaagcgtccaagacctcctggctcgggtgaagaagctggaagaagaaatggtagagatgaaggagcagtgttccgcacaacgctgttgccagggcgtcaccgacctgagtcggcattgctctggccatgggacgttctctctcgaaacatgttcctgtcactgtgaggaaggaagggaaggcccagcctgcgagaggctcgcatgtcctggggcatgctctggtcatggcaggtgtgtggatggtaggtgtctgtgccacgagccctatgtgggagccgactgcgggtatcccgcttgtcccgagaactgctctggccacggtgagtgtgtacgcggagtctgccagtgccacgaggacttcatgtctgaggattgtagtgagaaaaggtgccccggggactgtagtggccacggcttctgtgataccggagagtgctattgcgaagaaggcttcacggggctggactgcgcccaggtggtgactccacagggcctccaactgttaaagaacaccgaggacagcctcctcgtctcatgggaaccaagttcacaagtcgatcattatctcctctcttactaccccctgggaaaggaactgtccggaaagcaaattcaggttcctaaggagcagcatagctatgagattttgggactgttgcctggaacgaagtatatcgtcacactgagaaacgtgaaaaatgaagtctcaagcagcccgcagcacttattggccactaccgaccttgccgtattaggaaccgcctgggtcaccgatgagactgagaatagccttgatgttgagtgggaaaacccctctaccgaggtggactactacaagttacggtacgggccaatgacagggcaggaggtggcagaggttacagtgcccaaatcctctgatcccaagtctcgatacgatattactgggcttcaccctgggacagaatataagatcactgtggtgccaatgcgcggggagttagagggcaaacctattctcctgaacggccgtacagaaattgactccccgacaaatgtggtgactgaccgtgtgacagaggatacagcgacggtttcctgggatccagtgcaggctgtcattgataaatacgtggtgcgctatacctctgctgatggcgacaccaaggagatggccgttcacaaagatgaaagttccacggtattgaccggactaaaacccggtgaggcgtacaaagtttacgtgtgggctgaacgaggcaatcagggctcaaagaaggccgacaccaacgctctgactgagattgattcccctgcaaatctagtcaccgatcgcgtgacagaaaataccgccacaatttcatgggacccagtgcaagctactatcgataagtacgtggtgaggtacactagtgccgatgaccaggaaactcgcgaggtcctcgttggcaaagaacagtctagcaccgtgcttactgggctgaggcctggggtagaatatactgttcatgtctgggcacaaaaaggcgatagggaaagtaaaaaagctgacaccaatgcccctaccgacatcgactcacctaaaaatctggtgaccgacagggtgaccgaaaacatggccaccgtatcctgggatcccgtccaggcagcaattgataaatacgtagttagatatacatcagccggcggcgaaacccgcgaagtgccagtgggcaaggagcaatcttccaccgttttaactgggctgcgccccggaatggaatacatggttcacgtttgggctcaaaagggggatcaggagtcaaagaaagcagacactaaagctcagaccgacattgattcaccgcagaacctcgtgacagacagagtgactgagaacatggccacagtgtcttgggacccagttcgggctacaattgaccgttatgtagtgaggtacacatcagctaaggatggggaaacacgagaggtgccagtgggaaaagaacagtcctcaaccgtgctgacaggcctcaggcccggcgtggaatacaccgttcatgtttgggcacaaaaaggggcccaggagagcaagaaagcagacactaaagctcaaaccgatatcgacagtccccagaacctggtgacagactgggtaaccgagaacaccgcaaccgtgagctgggaccctgtgcaagccaccatcgatcgatacgttgtgcactatacttccgcgaacggtgagaccagagaggttccagtcggaaaagagcaaagcagcacagttctgacaggacttagacccggaatggagtacaccgttcatgtgtgggcccaaaagggaaaccaagaatctaagaaagccgatacgaaagcacagacagagattgatggaccaaaaaacctggtgaccgactgggttactgagaatatggccactgtatcctgggatcccgtgcaggctactatcgataagtacatggtgaggtacacatccgccgacggcgagacacgagaggtacccgtgggaaaggaacacagcagcacagtacttaccggtctccgcccaggcatggaatatatggtgcatgtttgggctcagaagggtgctcaggagagcaaaaaggccgacaccaaggcccagaccgaattggacccccctagaaacctgcggcccagtgctgtcacccagagtggcggaattctaacgtggacgccaccatccgctcagatccacggctacatcctgacctaccaatttccagacggaaccgtcaaagaaatgcaattaggacgggaagatcaaagatttgcactgcagggcttggaacagggagccacttacccggtgtccctggtggccttcaaaggtggccggagatcccgaaacgtttcaaccacattgtcgacggtgggagcaagattccctcacccctcggattgctcccaagtgcaacagaactcaaatgccgcaagtgggctgtacacaatctatctgcatggcgacgctagtcggccactccaggtttactgtgacatggagacggatgggggaggttggatcgtttttcagcgcagaaacacaggacagttagatttctttaagaggtggcgctcctatgtcgaaggattcggcgatcctatgaaagagttctggttgggcttggacaagctgcataacctgactactggcacccctgccagatatgaggtcagggtcgatcttcagactgccaatgagtccgcctatgccatatacgacttcttccaggtcgcgtcaagtaaggagcgctacaagctgaccgtgggtaaatatcggggcacagcaggtgatgccctgacgtatcacaatggctggaaatttactacgttcgacagggataacgacatcgctctgagcaattgtgccctgacgcatcacggagggtggtggtataagaactgccatttagcaaacccgaacgggcgctatggtgagaccaaacacagcgagggggtcaactgggagccctggaagggccatgagttcagcattccctatgttgagttgaaaattaggcctcacgggtattcaagagagccggtgctaggccggaaaaagcgtaccctgcgcggcaggctgagaaccttctag

SEQ ID NO: 211258 - DNA, 3900 bp, Artificial Sequence
  derived and/or modified sequence
atgagcctgcaggagatgttccgcttccccatgggcctgctgctgggctctgtgctgctggtggccagcgccccagccaccctggagcccccaggctgcagcaacaaggagcagcaggtgacagtgagccacacctacaagattgatgtgcccaagagcgccctggtgcaggtggatgctgacccccagcccctgagtgatgatggagccagcctgctggccctgggggaggcccgggaggagcagaacatcatcttccgccacaacatccggctgcagaccccccagaaggactgtgagctggccggctctgtgcaggacctgctggcccgggtgaagaagctggaggaggagatggtggagatgaaggagcagtgcagcgcccagcgctgctgccagggcgtgacagacctgagccgccactgcagcggccacggcaccttcagcctggagacctgcagctgccactgtgaggagggccgggagggccctgcctgtgagcggctggcctgccctggggcctgcagcggccacggccgctgtgtggatggccgctgcctgtgccacgagccctacgtgggcgctgactgtggctacccagcctgcccagagaactgcagcggccatggagaatgtgtgcggggcgtgtgccagtgccacgaggacttcatgtctgaggactgcagcgagaagcgctgccctggggactgcagcggccacggcttctgtgacacaggagagtgctactgtgaggagggcttcaccggcctggactgtgcccaggtggtgaccccccagggcctgcagctgctgaagaacacagaggacagcctgctggtgtcctgggagcccagcagccaggtggaccactacctgctgagctactaccccctgggcaaggagctgagcggcaagcagatccaggtgcccaaggagcagcacagctatgagatcctgggcctgctgcccggcaccaagtacatcgtgaccctgagaaatgtgaagaatgaggtgagcagcagcccccagcacctgctggccaccacagacctggccgtgctgggcacagcctgggtgacagatgaaacagagaacagcctggatgtggagtgggagaaccccagcacagaggtggactactacaagctgcgctatggccccatgacaggccaggaggtggccgaggtgacagtgcccaagagcagtgaccccaagagccgctatgacatcaccggcctgcaccctggaacagagtacaagatcaccgtggtgcccatgagaggagagctggagggcaagcccatcctgctgaatggccgcacagaaattgacagccccaccaacgtggtgacagacagagtgacagaggacacagccaccgtgtcctgggaccctgtgcaggccgtcatcgacaagtatgtggtgcgctacaccagcgcagatggagacaccaaggagatggctgtgcacaaggatgagagcagcacagtgctgaccggcctgaagccaggagaggcctacaaggtgtatgtgtgggccgagcggggcaaccagggcagcaagaaggctgacaccaatgccctgacagaaattgacagccctgccaacctggtgacagacagagtgacagagaacacagccaccatctcctgggaccctgtgcaggccaccatcgacaagtatgtggtgcgctacaccagcgcagatgaccaggagacccgggaggtgctggtgggcaaggagcagagcagcacagtgctgaccggcctgcggcctggggtggagtacacagtgcacgtgtgggcccagaagggggaccgggagagcaagaaggctgacaccaatgcccccacagacatcgacagccccaagaacctggtgacagacagagtgacagagaacatggccaccgtgtcctgggaccctgtgcaggccgccatcgacaagtatgtggtgcgctacaccagcgctggaggagagacccgggaggtgcctgtgggcaaggagcagagcagcacagtgctgaccggcctgcggcccggcatggagtacatggtgcacgtgtgggcccagaagggggaccaggagagcaagaaggctgacaccaaggcccagacagacatcgacagcccccagaacctggtgacagacagagtgacagagaacatggccaccgtgtcctgggaccctgtgcgggccaccatcgaccgctacgtggtgcgctacaccagcgccaaggatggagagacccgggaggtgcctgtgggcaaggagcagagcagcacagtgctgaccggcctgcggcctggggtggagtacacagtgcacgtgtgggcccagaagggggcccaggagagcaagaaggctgacaccaaggcccagacagacatcgacagcccccagaacctggtgacagactgggtgacagagaacacagccaccgtgtcctgggaccctgtgcaggccaccatcgacagatatgtggtgcactacaccagcgccaatggagagacccgggaggtgcctgtgggcaaggagcagagcagcacagtgctgaccggcctgcggcccggcatggagtacacagtgcacgtgtgggcccagaagggcaaccaggagagcaagaaggctgacaccaaggcccagacagaaattgatggccccaagaacctggtgacagactgggtgacagagaacatggccaccgtgtcctgggaccctgtgcaggccaccatcgacaagtacatggtgcgctacaccagcgcagatggagagacccgggaggtgcctgtgggcaaggagcacagcagcacagtgctgaccggcctgcggcccggcatggagtacatggtgcacgtgtgggcccagaagggggcccaggagagcaagaaggctgacaccaaggcccagacagagctggaccccccaagaaacctgcggcccagcgctgtgacccagagcggcggcatcctgacctggaccccaccttctgcccagatccacggctacatcctgacctaccagttcccagatggcaccgtgaaggagatgcagctgggccgggaggaccagagatttgccctgcagggcctggagcagggcgccacctaccctgtgtccctggtggccttcaagggcggccgccgcagcagaaatgtgtccaccaccctgagcacagtgggcgcccgcttcccccaccccagcgactgcagccaggtgcagcagaacagcaatgctgccagcggcctgtacaccatctacctgcatggagatgccagccggcccctgcaggtgtactgtgacatggagacagatggcggcggctggatcgtgttccagaggaggaacacaggccagctggacttcttcaagcgctggaggagctatgtggagggctttggagaccccatgaaggagttctggctgggcctggacaagctgcacaacctgaccaccggcaccccagcccgctatgaggtgcgggtggacctgcagacagccaatgaaagtgcctatgccatctatgacttcttccaggtggccagcagcaaggagcgctacaagctgactgtgggcaagtaccggggcacagctggagatgccctgacctaccacaacggctggaagttcaccacctttgaccgggacaatgacatcgccctgagcaactgtgccctgacccaccacggcggctggtggtacaagaactgccacctggccaaccccaacggccgctacggggagaccaagcacagcgagggcgtgaactgggagccctggaagggccacgagttcagcatcccctacgtggagctgaagatccggccccacggctacagccgggagcctgtgctgggcaggaagaagaggaccctgcggggccgcctgcggaccttctag

SEQ ID NO: 211259 - DNA, 3900 bp, Artificial Sequence
  derived and/or modified sequence
atgagcctgcaggagatgttccggttccccatgggcctgctgctgggatccgtgctactggtggcttcggctcccgcaacgttggagcccccggggtgcagcaacaaggagcaacaagtcactgtcagccacacatacaagatcgacgtgccaaagtcagcactcgtgcaggtagatgctgacccgcaaccactctcagatgatggcgccagtttgctggccttgggagaggcacgcgaggagcaaaacatcatttttagacacaatatccggctgcagacgccgcagaaagattgcgagctcgctggctctgtccaggacttgcttgccagggtgaagaagctggaagaggagatggtggagatgaaggaacagtgttctgcccagcgctgctgtcagggtgtcaccgatctctcaaggcactgttccggccatgggaccttctctctggaaacttgctcgtgccactgcgaggaagggagagaaggccccgcttgcgagagattggcatgcccgggcgcttgcagtggccacggtaggtgcgtggatgggagatgtctgtgtcacgagccttatgtaggggcagactgcggttatcccgcgtgtccggaaaattgtagcggccatggtgaatgtgtgcgtggggtgtgtcagtgccacgaggacttcatgagcgaggactgtagcgaaaaaagatgtcccggcgattgcagtggacatggcttttgtgatacaggcgagtgttactgtgaggaaggctttaccggactcgactgcgctcaggtggtcacgccccaggggcttcagctgctaaagaacaccgaggattcattgttggtatcttgggagcccagctcacaggttgaccactacttgttgagttattaccccttaggcaaggaactctcaggtaagcagatccaagtccctaaggaacagcactcttatgagatcctcgggctgttgcccggcacgaaatacattgtgactttgcgcaacgtgaaaaacgaggtctcaagtagtccccagcacctgctggccacaaccgacttagccgtcctggggactgcttgggtcacggatgagactgaaaatagtcttgacgtggaatgggagaatccctctacagaggtcgactactacaagctcaggtacggcccaatgactgggcaggaggtcgctgaggtgaccgtgcccaaatcctccgacccaaaatcgcggtacgacatcacaggcctccatcctggcactgaatacaagattacagttgttccaatgagaggtgaattggaaggcaaacccattcttctgaatggtagaactgagattgactcaccgactaatgtggtgacggacagggtgacagaagatactgctacagtgagctgggatccagtgcaggcagtgattgacaagtatgtagtacgttacacctcagcagatggtgatactaaagaaatggccgttcacaaggatgaatccagcacagttctcacaggtctgaagccaggcgaagcctacaaagtttacgtctgggccgaacgcggcaatcaggggtctaaaaaagccgatacgaacgctctgaccgagattgatagccccgccaacctggtcaccgaccgcgtgactgaaaatactgctaccataagctgggatccagtgcaggcaacaatcgataagtatgtggtgagatacacttctgctgacgaccaggaaaccagagaggtgttggttggcaaggaacagtcctctacagtcctgaccggcctgcgcccaggagtagagtacaccgtgcatgtatgggcacaaaaaggagaccgcgaaagcaagaaggccgataccaatgcccccacagatatcgactcccccaaaaaccttgtcactgatagagtcaccgagaatatggcaacggtgtcatgggacccggttcaagcagccattgacaaatatgtggttaggtacaccagcgctggcggcgaaactagagaggtgccagtcggcaaagagcagtcatctacagtgctcactggtctgcgacccggcatggaatatatggtccatgtgtgggcacagaaaggagaccaggagtccaagaaggcagacacaaaagcacaaaccgatatcgactcaccccagaacctggttactgatcgcgttacagagaatatggcaacagtgagctgggacccagtcagggccaccatcgaccgctacgtcgtcagatacactagcgccaaggatggagagacacgtgaagtccctgtaggaaaagaacagtcgagcacggtgctaacagggctgcggcccggagtagagtacacggtgcatgtgtgggcccagaagggggctcaggagagtaaaaaggcagacaccaaggctcagacagacatagactcaccccagaatctcgtgacggactgggttacggaaaacaccgctacggtttcttgggatccagttcaggccactattgaccgctacgtcgtgcactatacctcagccaatggggagacacgggaggtgccagtgggaaaggagcagtcatcaaccgtgctgaccgggttacgacccggcatggaatacacagtacatgtatgggctcagaaaggcaatcaggaaagcaagaaggctgacactaaagcccagactgagattgacggacccaagaacctggtgacagactgggtgacggagaacatggcaacagtatcatgggaccccgttcaggcaacaatagataagtacatggtacgctacacctccgccgatggtgagaccagggaggtccctgttggcaaggagcatagctctacagtgctgacgggcctccgtcctggcatggaatatatggtgcacgtgtgggcccagaagggcgcccaggagtcaaagaaggccgacaccaaagcccaaaccgagctggacccgccgagaaacttacggcctagtgcagtgactcagtctggcggaatcctgacatggacacccccctctgcccagattcacggctatatcctaacttatcagttcccagacggcactgtaaaggaaatgcagttaggtagagaggatcagcggttcgccctacagggcctggagcagggtgcaacgtaccccgtatccctagtggcttttaagggtggtcgcaggtcacgtaacgtcagtactactcttagcaccgtcggcgctcgctttccccacccttccgactgctcgcaggtgcagcagaattccaacgccgcatccgggctctatacaatatacttacatggcgacgccagtaggccactgcaggtgtactgtgacatggaaaccgacggcgggggttggatagtcttccaacggcggaataccgggcaattggattttttcaagaggtggcgcagttacgtcgaagggtttggagatcccatgaaggagttttggctggggctggacaagctccataacttaactaccggaactcctgccaggtatgaggtacgagtcgacctgcagaccgctaacgagagtgcctatgcgatttatgattttttccaggtagcctcttcaaaggaacgctataagctcacagttggaaaatacagggggaccgcaggtgacgccctgacctatcacaatggctggaagtttacaacgttcgatagggacaatgacatcgctctatctaattgcgctttgacacatcacggggggtggtggtacaagaattgtcacctggcaaaccctaatggcagatatggtgagaccaaacacagcgagggagttaactgggaaccatggaagggccacgagtttagtataccttacgtggagctgaagattaggcctcacgggtattccagagagcccgtcctgggcaggaagaagaggacccttagagggcgcctgcggaccttctag

SEQ ID NO: 211260 - RNA, 3900 nt, Artificial Sequence
  derived and/or modified sequence
augucucugcaggagauguuucguuuuccaaugggacuguuguuaggauccguccuacuuguggccagcgccccugcuacucucgaaccacccgggugcagcaauaaggaacagcaagugacagugucacacaccuacaaaaucgauguuccuaagagcgcgcuuguccagguggacgccgacccacagccacucucagaugacggugcaucccuuuuggcucuuggggaagcccgugaggagcagaacauuaucuucagacacaauauccgccuccaaacaccacagaaagauugcgaguuggccgggagcguacaagaccuguuggccagggugaagaagcuggaggaggagauggucgaaaugaaggaacagugcucggcccagagauguugucaaggaguuacugaucugucaaggcacuguucuggccacgguacuuuuagccuugagaccugcagcugccauugcgaggagggccgcgagggaccugcaugcgagcgccuggccugcccaggugcaugcagcggacacggaagguguguggacggcaggugccugugccaugagccauacgucggcgcugacugcggcuauccugcaugccccgaaaauuguucaggacauggcgaauguguaaggggcgucugucaaugccaugaagacuucauguccgaggacuguucagagaaaagguguccuggcgauugcagcggccacgguuucugugacaccggggaaugcuauugugaagaaggauuuacuggacuugauugcgcacagguggugacaccccagggucugcaguuauugaagaauacagaagauuccuuacuagugaguugggagccaaguucucaaguggaccacuaccuguuauccuacuaccccuugggcaaggaacugucaggcaagcaaauccaggugccaaaagaacagcacucauaugagauccuaggccugcugccuggcacuaaauacaucgucacccugaggaacgugaagaaugaagugucguccuccccgcagcaucuccucgcuacgacagaccucgcuguucugggcacagcuuggguuacugaugagaccgagaauucccuugaugucgaaugggagaacccaagcacagaaguggacuauuacaaacugcguuacggacccaugacaggccaggaagucgcugaggucacugugccuaagaguagcgaucccaaguccagguacgacauaaccggauugcacccuggcacugaguacaaaaucacugucguucccaugcgcggagaacuggaagggaagccaauccuccugaaugggcgcaccgagauugacaguccaacaaaugucguaaccgaucgcgugacugaagacacagcuacuguuaguugggauccagugcaggcugugaucgauaaguaugucgugcgauacaccuccgcagacggagauacaaaagagauggccgugcacaaagaugaaucgaguacaguguugaccggccuuaagccgggugaggccuacaaaguguaugucugggcggagaggggcaaucaaggcucaaaaaaagccgauacuaaugcacugacagagaucgacucaccugcaaaccuggucacggacagagugacggagaacaccgcuacgaucaguugggacccgguucaggccacgaucgauaaguaugugguacgauauaccagugccgacgaucaggagacgcgagaaguucucgucgggaaggaacaaagcaguacagugcugacaggccuuagacccggaguugaauauacaguacacgugugggcucagaaaggcgaucgagaaagcaagaaagcugacacaaacgcaccaacugauaucgacuccccgaaaaaccuugugaccgaccgagugacagaaaauauggccacuguguccugggauccaguucaagcagcgauugacaaguacgucgugcgcuacacuucugcggggggugagacuagggaagugccugugggcaaggaacaaagcucuaccguacugaccggccugagacccggcauggaauauaugguccacgucugggcgcaaaagggugaccaagaaaguaagaaagcugauacuaaggcacagacggauauugacaguccgcagaaucuggugacugauagggugaccgagaacauggcaacagucuccugggaucccgugcgggcuacuaucgaccgguacgucguucgguauacuuccgcaaaggacggugaaacuagggagguacccguaggaaaagagcagucaucuaccguauuaacuggauugcggccugggguagaauacacugugcauguuugggcacagaaaggagcccaagaaucuaagaaagcagacacgaaagcacagaccgacauugacucuccacagaaucuugugacugacugggugacugagaauacggccacagucagcugggaucccgugcaggcaaccaucgauagauaugucguucacuacacgagugccaacggagaaacaagagaggucccaguuggcaaagagcagucaucgacuguccugaccgggcugcggccugggauggaguacacugugcacguuugggcccaaaagggaaaucaagaaaguaaaaaggcugacacuaaggcacaaacggagaucgacggaccuaagaaucuggugacagacugggugacugaaaacauggcuaccgucuccugggaccccguccaggcaacuauugauaaauauauggucagguauacauccgccgauggugaaacgcgcgagguccccguuggcaaagaacauucaaguacaguccugacaggauugcgcccuggaauggaauacauggugcacgugugggcucagaaaggggcucaagagucaaaaaaagcugauaccaaggcacagacagagcuggacccaccucgaaaucucagaccguccgccgugacccaguccggaggaauucucacuuggacucccccuucagcgcagauacauggauacauucuuacauaccaguucccugacgguacagugaaagaaaugcagcuugguagagaggaccagcgguucgcacugcaaggguuagagcagggggcuacauauccugucagucugguggcuuuuaaaggcggaaggcguagccggaacgugucaacaacccugaguacgguuggagcacgguucccgcaccccucggacugcucacaggugcaacagaauuccaaugcggcuagcggauuguacaccaucuaccugcacggggacgccucuagaccguuacagguguacugugacauggagacagacggaggaggcuggauaguguuccagcggcgcaacaccggccagcuggauuuuuuuaagagauggagaucauauguggaggguuuuggagacccgaugaaagaauuuuggcugggccuggacaaacugcauaacuuaacgacugguacuccagcacgcuacgaggugagaguagauuuacagaccgcaaaugaauccgcuuacgcgaucuacgacuucuuucagguagccucaucaaaggaaagguacaaacucaccgucggaaaguacagagguaccgccggggaugcucucacauaccauaauggcuggaaauuuaccaccuuugacagggauaacgacauagcacugaguaauugcgcgcuuacucaccacggggguuggugguauaaaaacugccaucuggcgaauccuaacggaagguacggcgagacuaaacauucggaaggcguuaacugggaaccuuggaagggccaugaauucaguaucccguacguagagcugaagauccggccgcauggcuacucaagggaacccgugcugggucgcaaaaagagaacgcugagggguaggcugcgcacuuucuag

SEQ ID NO: 211261 - RNA, 3900 nt, Artificial Sequence
  derived and/or modified sequence
augagucuucaggaaauguuuagauucccaaugggccugcugcuuggcucaguucucuuaguugccucagcaccagcgacucuagaaccgcccggcugcaguaauaaagagcagcaagugacaguaucucacacauauaagauugaugugcccaaguccgcacucgugcaaguagaugcagauccacagccucugagcgacgauggugcaucucuguuggcacugggggaggcucgcgaagaacaaaacaucauauuuagacauaauauccgccugcagacgccccaaaaagacugugagcuggcagguucgguucaggauuuacucgcucgaguuaagaaauuagaggaggaaaugguggagaugaaggaacaaugcagcgcacaacgguguugucagggggucacagaccuuaguaggcacugcucaggacauggaaccuucagccuagagacgugcagcugucauugugaagagggaagagaaggcccugcgugcgaacgacuggcgugccccggggccuguaguggucauggccguugcgucgacgggagaugucugugucacgaaccuuauguaggcgcagauuguggauacccagccugcccagaaaauuguucuggacacggggaaugcguccgaggugucugucaaugucacgaagacuucaugagcgaagacuguuccgaaaaacgcuguccuggugacugcagcggucacggcuucugugauacuggugaauguuacugcgaggagggauucacagggcuggauugugcacaagucguuacaccucagggauugcagcugcucaaaaacacagaagacucccuucucguuuccugggaaccaagcucacaaguugaccauuacuuacuauccuacuacccacugggcaaagaacucagcgggaaacaaauccaggugccaaaggagcagcauaguuacgaaauucuuggccuccugccuggcacaaaguauauugugacccuuaggaacguuaaaaacgagguaucgucuucaccccaacaccuacuugccacuacagacuuagcaguccugggaacugcauggguuaccgacgagaccgagaacuccuuagacguggaaugggaaaaucccucuaccgaaguggacuacuauaaauuaagguauggccccaugacuggacaggagguugcugagguuacugugccuaaaucaagcgacccuaagucuagguacgauauuacuggauugcauccgggcacugaguacaagaucacaguagugcccaugcgcggagaacuagaaggcaagccaauucugcuaaacgggaggaccgaaauagacucaccuacaaauguaguaacagauagagugacggaggacacagccacagucucaugggacccaguacaggcagugaucgauaaguaugugguucgauauacgagugcugacggcgauacaaaggagauggcuguucacaaggaugaaagcucgacugugcuaaccggucuaaaaccgggagaagcauacaagguauacguuugggcugaacggggcaaucaggggucaaaaaaagccgacacaaacgcccucacagagauugacucucccgccaacuuaguuacggauagggugacagaaaauacagccaccaucuccugggacccaguacaggcaacaauugacaaguacguugugcgauauacaucugccgacgaucaagaaacucgggagguccucgucggaaaagaacaauccucaacuguguugacaggauugcgccccggagucgaguacacggugcaugugugggcucagaagggagauagagagucuaagaaagcugauacaaacgcccccacagauauagauucgccuaaaaauuuaguuacagaccgcguuacagaaaauauggcuaccgugucuugggaucccguucaggccgcuaucgauaaauaugugguucgguauaccagcgcagggggagagacaagggaggucccuguggguaaagaacagaguucaacaguucucacggguuugcgaccagggauggaguacaugguacacgugugggcucagaagggugaucaggaaucuaagaaagccgauaccaaggcccagaccgacaucgacagcccgcaaaaccucguuacagaccgugugaccgagaauauggcgaccgugagcugggaccccgugagagcgacaauugacagauauguuguccguuacaccuccgcuaaagauggggagacucgugaagugccaguaggcaaggaacaaucguccaccgugcugacgggccucagaccuggaguagaauauaccguucacguaugggcacaaaaaggcgcccaggagagcaagaaagccgacacaaaagcacaaacagauauagacucuccacagaaccuggugacagacugggucacagaaaauacugcuacuguuucaugggacccugugcaggcaaccaucgaucguuauguuguucacuauacuucagccaacggcgaaacuagagaagucccagugggaaaagaacaaucuucaaccguuuugacuggccuucgcccagggauggaauauacugugcacgugugggcacaaaaagggaaccaggaaucgaagaaggcagacaccaaagcccaaacugaaaucgacggaccgaagaaccuugugacagacuggguaaccgagaacauggccaccgugaguugggaucccguccaagcaacaauagacaaauacauggugagauacacuagugccgacggagaaacccgcgagguccccguagguaaagaacacucuagcacuguccugacagguuugcgucccggaauggaguacaugguacacgucugggcccagaagggcgcgcaggaaucaaagaaagcagacacgaaggcucaaacagaacucgauccuccaagaaaucugcgcccaucagcugugacccaaagcggagguauucugacuuggacgccgccgucugcucaaauccacggguacauccucaccuaucaauucccagaugguacagugaaagaaaugcaacugggcagagaggaucagagauuugcgcuucaaggucuagaacagggcgccacauaccccguaucccuuguugcauucaagggaggaaggagaagccggaaugugucgacgacacuuucuaccguaggagcaagauucccacacccuucugauugcucacaaguucagcagaauucuaacgcagccuccgguuuguacacaaucuaucuccauggcgacgcgagccggccacugcagguguauugcgauauggagaccgacgggggaggcuggauugucuuccagagacgcaacacaggacaacuggauuuuuuuaaaagguggcgaaguuauguugaaggauuuggagaccccaugaaggaauucuggcucggccuagauaaguuacauaaccuuacaacuggaacacccgcccgcuaugaagugcgaguggacuuacaaacagccaacgagagcgcuuacgccaucuacgacuuuuuccagguggccagcagcaaagaacgguacaagcuuaccgugggcaaauauagagggacugccggcgacgcccuuacauaccacaacggauggaaauuuacaaccuuugacagagacaacgauaucgcacugucuaauugugcucugacacaccaugggggguggugguacaaaaauugccaccucgcgaauccuaacggccgauacggcgagaccaaacauucagagggagucaauugggagccuuggaagggccacgaauucucuauuccauaugucgaauuaaaaauccgcccacaugguuacaguagagagccuguguuaggucgaaaaaagcguacucuuaggggacgccuccggacuuuuuag

SEQ ID NO: 211262 - protein, 1119 aa, Artificial Sequence
  derived and/or modified sequence
AAEERGWRPRRCRSQRGTWLRKPRSEVPRPYAPLSGSPPIRWRRTRWRAAATRPLGLAGPRSPLRAAWVWAPSRVRRQQRRRGRPGAGRGIDDLEEDSDYNPAEDEPRGRQLRLQRPTPSTPRPRRRPGRPRKLPRLEISDLPDGVEGEPLVSSQSGQSPPEPQDPEAPSSSGPGHLVAMGKVSRTPVEAGVSQSDAENAAPSCPDEHDTLPRRRGRPSRRFLGKKYRKYYYKSPKPLLRPFLCRICGSRFLSHEDLRFHVNSHEAGDPQLFKCLQCSYRSRRWSSLKEHMFNHVGSKPYKCDECSYTSVYRKDVIRHAAVHSRDRKKRPDPTPKLSSFPCPVCGRVYPMQKRLTQHMKTHSTEKPHMCDKCGKSFKKRYTFKMHLLTHIQAVANRRFKCEFCEFVCEDKKALLNHQLSHVSDKPFKCSFCPYRTFREDFLLSHVAVKHTGAKPFACEYCHFSTRHKKNLRLHVRCRHASSFEEWGRRHPEEPPSRRRPFFSLQQIEELKQQHSAAPGPPPSSPGPPEIPPEATTFQSSEAPSLLCSDTLGGATIIYQQGAEESTAMATQTALDLLLNMSAQRELGGTALQVAVVKSEDVEAGLASPGGQPSPEGATPQVVTLHVAEPGGGAAAESQLGPPDLPQITLAPGPFGGTGYSVITAPPMEEGTSAPGTPYSEEPAGEAAQAVVVSDTLKEAGTHYIMATDGTQLHHIELTADGSISFPSPDALASGAKWPLLQCGGLPRDGPEPPSPAKTHCVGDSQSSASSPPATSKALGLAVPPSPPSAATAASKKFSCKICAEAFPGRAEMESHKRAHAGPGAFKCPDCPFSARQWPEVRAHMAQHSSLRPHQCSQCSFASKNKKDLRRHMLTHTKEKPFACHLCGQRFNRNGHLKFHIQRLHSPDGRKSGTPTARAPTQTPTQTIILNSDDETLATLHTALQSSHGVLGPERLQQALSQEHIIVAQEQTVTNQEEAAYIQEITTADGQTVQHLVTSDNQVQYIISQDGVQHLLPQEYVVVPEGHHIQVQEGQITHIQYEQGAPFLQESQIQYVPVSPGQQLVTQAQLEAAAHSAVTAVADAAMAQAQGLFGTDETVPEHIQQLQHQGIEYDVITLADD

SEQ ID NO: 211263 - protein, 1342 aa, Artificial Sequence
  derived and/or modified sequence
MEENEVESSSDAAPGPGRPEEPSESGLGVGTSEAVSADSSDAAAAPGQAEADDSGVGQSSDRGSRSQEEVSESSSSADPLPNSYLPDSSSVSHGPVAGVTGGPPALVHSSALPDPNMLVSDCTASSSDLGSAIDKIIESTIGPDLIQNCITVTSAEDGGAETTRYLILQGPDDGAPMTSPMSSSTLAHSLAAIEALADGPTSTSTCLEAQGGPSSPVQLPPASGAEEPDLQSLEAMMEVVVVQQFKCKMCQYRSSTKATLLRHMRERHFRPVAAAAAAAGKKGRLRKWSTSTKSQEEEGPEEEDDDDIVDAGAIDDLEEDSDYNPAEDEPRGRQLRLQRPTPSTPRPRRRPGRPRKLPRLEISDLPDGVEGEPLVSSQSGQSPPEPQDPEAPSSSGPGHLVAMGKVSRTPVEAGVSQSDAENAAPSCPDEHDTLPRRRGRPSRRFLGKKYRKYYYKSPKPLLRPFLCRICGSRFLSHEDLRFHVNSHEAGDPQLFKCLQCSYRSRRWSSLKEHMFNHVGSKPYKCDECSYTSVYRKDVIRHAAVHSRDRKKRPDPTPKLSSFPCPVCGRVYPMQKRLTQHMKTHSTEKPHMCDKCGKSFKKRYTFKMHLLTHIQAVANRRFKCEFCEFVCEDKKALLNHQLSHVSDKPFKCSFCPYRTFREDFLLSHVAVKHTGAKPFACEYCHFSTRHKKNLRLHVRCRHASSFEEWGRRHPEEPPSRRRPFFSLQQIEELKQQHSAAPGPPPSSPGPPEIPPEATTFQSSEAPSLLCSDTLGGATIIYQQGAEESTAMATQTALDLLLNMSAQRELGGTALQVAVVKSEDVEAGLASPGGQPSPEGATPQVVTLHVAEPGGGAAAESQLGPPDLPQITLAPGPFGGTGYSVITAPPMEEGTSAPGTPYSEEPAGEAAQAVVVSDTLKEAGTHYIMATDGTQLHHIELTADGSISFPSPDALASGAKWPLLQCGGLPRDGPEPPSPAKTHCVGDSQSSASSPPATSKALGLAVPPSPPSAATAASKKFSCKICAEAFPGRAEMESHKRAHAGPGAFKCPDCPFSARQWPEVRAHMAQHSSLRPHQCSQCSFASKNKKDLRRHMLTHTKEKPFACHLCGQRFNRNGHLKFHIQRLHSPDGRKSGTPTARAPTQTPTQTIILNSDDETLATLHTALQSSHGVLGPERLQQALSQEHIIVAQEQTVTNQEEAAYIQEITTADGQTVQHLVTSDNQVQYIISQDGVQHLLPQEYVVVPEGHHIQVQEGQITHIQYEQGAPFLQESQIQYVPVSPGQQLVTQAQLEAAAHSAVTAVADAAMAQAQGLFGTDETVPEHIQQLQHQGIEYDVITLADD

SEQ ID NO: 211264 - protein, 1187 aa, Artificial Sequence
  derived and/or modified sequence
MATSSMPESERNVATKASGAPMTSPMSSSTLAHSLAAIEALADGPTSTSTCLEAQGGPSSPVQLPPASGAEEPDLQSLEAMMEVVVVQQFKCKMCQYRSSTKATLLRHMRERHFRPVAAAAAAAGKKGRLRKWSTSTKSQEEEGPEEEDDDDIVDAGAIDDLEEDSDYNPAEDEPRGRQLRLQRPTPSTPRPRRRPGRPRKLPRLEISDLPDGVEGEPLVSSQSGQSPPEPQDPEAPSSSGPGHLVAMGKVSRTPVEAGVSQSDAENAAPSCPDEHDTLPRRRGRPSRRFLGKKYRKYYYKSPKPLLRPFLCRICGSRFLSHEDLRFHVNSHEAGDPQLFKCLQCSYRSRRWSSLKEHMFNHVGSKPYKCDECSYTSVYRKDVIRHAAVHSRDRKKRPDPTPKLSSFPCPVCGRVYPMQKRLTQHMKTHSTEKPHMCDKCGKSFKKRYTFKMHLLTHIQAVANRRFKCEFCEFVCEDKKALLNHQLSHVSDKPFKCSFCPYRTFREDFLLSHVAVKHTGAKPFACEYCHFSTRHKKNLRLHVRCRHASSFEEWGRRHPEEPPSRRRPFFSLQQIEELKQQHSAAPGPPPSSPGPPEIPPEATTFQSSEAPSLLCSDTLGGATIIYQQGAEESTAMATQTALDLLLNMSAQRELGGTALQVAVVKSEDVEAGLASPGGQPSPEGATPQVVTLHVAEPGGGAAAESQLGPPDLPQITLAPGPFGGTGYSVITAPPMEEGTSAPGTPYSEEPAGEAAQAVVVSDTLKEAGTHYIMATDGTQLHHIELTADGSISFPSPDALASGAKWPLLQCGGLPRDGPEPPSPAKTHCVGDSQSSASSPPATSKALGLAVPPSPPSAATAASKKFSCKICAEAFPGRAEMESHKRAHAGPGAFKCPDCPFSARQWPEVRAHMAQHSSLRPHQCSQCSFASKNKKDLRRHMLTHTKEKPFACHLCGQRFNRNGHLKFHIQRLHSPDGRKSGTPTARAPTQTPTQTIILNSDDETLATLHTALQSSHGVLGPERLQQALSQEHIIVAQEQTVTNQEEAAYIQEITTADGQTVQHLVTSDNQVQYIISQDGVQHLLPQEYVVVPEGHHIQVQEGQITHIQYEQGAPFLQESQIQYVPVSPGQQLVTQAQLEAAAHSAVTAVADAAMAQAQGLFGTDETVPEHIQQLQHQGIEYDVITLADD

SEQ ID NO: 211265 - DNA, 4462 bp, Artificial Sequence
  derived and/or modified sequence
cgcagcggaggaaagaggatggcgacctcgtcgatgccggagtcagagaggaacgtggctacgaaagcctcggagtgaagttcccagaccctacgccccgctgtcaggcagcccgccgatcagatggaggagaacgaggtggagagcagcagcgacgcggcccctgggcctggccggcccgaggagccctctgagagcggcctgggtgtgggcacctcagaagccgtgtccgccgacagcagcgacgccgcggccgccccggggcaggcagaggccgatgactctggcgtggggcaaagctcggaccgcggcagccgttctcaggaggaggtatctgagagcagctcgagcgcagaccccctgcctaatagctacctccctgattcatcgtctgtgtctcatgggccagtggcaggggtgacaggcggtcccccagcacttgtgcactctagtgcactcccagaccccaacatgctggtgtccgactgcacagcttcctcctcggacctgggctcggccatcgacaagatcatcgagtccaccatcgggcccgacctcatccagaactgcatcactgtgaccagtgctgaggatggcggggccgagaccacacggtacctgatcctacagggcccagatgatggagcccccatgacatcaccaatgtccagttccaccttggcccacagcctagcagccattgaggccctggcagatggccccacatccacatccacatgcctggaggcacagggtgggcccagctccccggtgcagctgcccccagcctccggtgccgaagagccggacctgcagagcctggaggccatgatggaggtggtggtggtgcagcagttcaaatgcaagatgtgccagtaccggagcagcaccaaggccacactgctgcgccacatgcgggaacgccacttccgtccagtagcagcagccgcagcagcagctggtaaaaaaggacgtctacggaagtggagcacctccaccaagagccaagaggaagagggaccagaggaggaggacgatgatgacattgtagacgctggagccattgatgacctggaggaggatagcgactataatccagctgaggatgagccccgaggccggcagcttcggctccagcgccccacccccagtaccccaaggccccgaaggagacctggccggccccggaagctgccccgcctggagatctcagacctcccagatggtgtggaaggagagcctctagtgagttcccagagtggacagagccctccagagccacaggatcccgaggctcccagctcctcaggcccaggacacctggtggccatgggcaaggtgagcaggacccctgtggaagctggtgtgagccagtcagatgcagagaacgcagccccctcctgcccggatgagcatgacactctgccccggcgccgaggtcgaccttccaggcgcttcctaggcaagaaataccgcaagtactattacaagtcgcccaaaccacttttgaggcccttcctgtgccgcatctgtggttctcgctttctgtcccacgaggacctgcgcttccacgtcaactcccatgaggctggcgatccccagctcttcaagtgcctgcagtgcagctatcgttcccgccgctggtcctcgctcaaggagcacatgttcaaccacgtgggcagcaagccctacaagtgtgacgagtgcagctacaccagtgtctaccggaaggacgtcattcggcacgccgctgtgcacagccgggaccggaagaagaggccagatccgactccaaagctgagctctttcccctgccctgtgtgtggccgtgtgtaccccatgcagaaaagactcacgcagcacatgaagacgcacagcactgagaagccccacatgtgtgacaagtgtggaaagtcctttaagaagcgctacaccttcaaaatgcacctgctcacgcacatccaggctgttgccaaccgcaggttcaagtgtgagttctgtgagtttgtttgtgaagacaagaaggcactgctgaaccaccagttgtcccacgtcagtgacaagcccttcaaatgcagcttttgtccctaccgcaccttccgagaggacttcttgctgtcccatgtggctgtcaagcacacaggggccaagcccttcgcctgtgagtactgccacttcagcacacggcacaagaagaacctgcgcctgcacgtacggtgccgacacgcaagcagcttcgaggaatgggggaggcgccaccctgaggagcccccctcccgccgtcgccccttcttctctctgcagcagattgaggagctgaagcagcagcacagtgcggcccctggaccacctcccagttccccaggacctcctgagatacccccagaggcgacaactttccagtcatctgaggctccctcattgctctgttctgacaccctgggcggcgccaccatcatctaccagcaaggagctgaggagtcgacagcgatggccacgcagacagccttggatcttctgctgaacatgagtgctcagcgggaactggggggcacagccctgcaggtggctgtggtgaagtcggaagatgtggaagcagggttagcatcccctggtgggcagccctcccctgaaggtgccactccacaggtggtcaccctccacgtggcagagccagggggcggtgcagcagccgagagccagctaggccctcctgacctaccgcagatcaccctggcacctggtccatttggtgggactggctacagtgtcatcacagcaccccctatggaggagggaacatcagctcctggcacaccttacagcgaggagcccgcaggagaggcagcccaggctgtggttgtgagtgacaccctaaaagaagctggcacccactacatcatggctactgatggtacccagttgcaccacattgagctcaccgcagatggctccatctccttcccaagtccagatgctctggcctctggtgccaaatggcccctgctgcagtgtgggggactgcccagagacggccctgagcccccatctccagccaagacccactgcgtaggggactcccagagctctgcctcctcacctcctgcaaccagcaaagccctgggcctggcagtgcccccgtcaccgccatctgcagccactgctgcatcaaagaagttttcctgcaagatctgtgccgaggccttccctggccgagctgagatggagagtcacaagcgggcccacgctgggcctggtgccttcaagtgccccgactgccccttcagtgcccgccagtggcccgaggtccgggcgcacatggcacagcactcaagcctacggccccaccagtgtagccagtgcagctttgcctccaagaacaagaaggacctgcgtcggcacatgctgactcacacaaaggagaagccttttgcatgccacctctgcgggcagcgtttcaaccgtaacgggcacctcaagttccacatccagcggctgcacagtcctgatgggaggaagtcaggaacccctacagcccgggcccctacccagaccccaacccagaccatcatcctgaacagtgatgacgaaacactggccaccctgcacactgcactccagtccagtcacggggtcctgggcccagagcggctacagcaggcactgagccaggaacacatcatcgttgcccaggaacagacagtgaccaatcaggaggaagccgcctacatccaagagatcaccacggcagatggccagaccgtacagcacctggtgacctccgacaaccaggtgcagtatatcatctcccaggatggtgtccagcacctgctcccccaggaatatgttgtggtccctgaaggccatcacatccaggtacaggagggccagatcacacacatccagtatgaacaaggagccccgttccttcaggagtcccagatccagtatgtgcctgtgtccccaggccagcagcttgtcacacaggctcaacttgaggctgcagcacactcagctgtcacagcagtggctgatgctgccatggcccaagcccagggcctgtttggtacagacgagacagtgcccgaacacattcaacagctgcagcaccagggcatcgagtacgacgtcatcaccctggccgatgactgagccccgagggcccaacacagatcatggatttgcggccagctctcctgggggtagggggccaccaggactcacctccctcttcatttaggatctccagatactggatagccagcatcctctcattcccagggagccagacctgtgctgttggggttaggggcagccatgggccccagccaggacatgctgggtgccccagcctgcaggcaggctttgggagagaaatttatttttgtttgggtggacccactggcctgtcagtctcaataaagggaccggagtccagtcctgaacagcttaaaaaaaaaaa

SEQ ID NO: 211266 - DNA, 4029 bp, Artificial Sequence
  derived and/or modified sequence
atggaggagaacgaggtggagagcagcagcgacgccgcccccggccccggcagacccgaggagcccagcgagagcggcctgggcgtgggcaccagcgaggccgtgagcgccgacagcagcgacgccgccgccgcccccggccaggccgaggccgacgacagcggcgtgggccagagcagcgacagaggcagcagaagccaggaggaggtgagcgagagcagcagcagcgccgaccccctgcccaacagctacctgcccgacagcagcagcgtgagccacggccccgtggccggcgtgaccggcggcccccccgccctggtgcacagcagcgccctgcccgaccccaacatgctggtgagcgactgcaccgccagcagcagcgacctgggcagcgccatcgacaagatcatcgagagcaccatcggccccgacctgatccagaactgcatcaccgtgaccagcgccgaggacggcggcgccgagaccaccagatacctgatcctgcagggccccgacgacggcgcccccatgaccagccccatgagcagcagcaccctggcccacagcctggccgccatcgaggccctggccgacggccccaccagcaccagcacctgcctggaggcccagggcggccccagcagccccgtgcagctgccccccgccagcggcgccgaggagcccgacctgcagagcctggaggccatgatggaggtggtggtggtgcagcagttcaagtgcaagatgtgccagtacagaagcagcaccaaggccaccctgctgagacacatgagagagagacacttcagacccgtggccgccgccgccgccgccgccggcaagaagggcagactgagaaagtggagcaccagcaccaagagccaggaggaggagggccccgaggaggaggacgacgacgacatcgtggacgccggcgccatcgacgacctggaggaggacagcgactacaaccccgccgaggacgagcccagaggcagacagctgagactgcagagacccacccccagcacccccagacccagaagaagacccggcagacccagaaagctgcccagactggagatcagcgacctgcccgacggcgtggagggcgagcccctggtgagcagccagagcggccagagcccccccgagccccaggaccccgaggcccccagcagcagcggccccggccacctggtggccatgggcaaggtgagcagaacccccgtggaggccggcgtgagccagagcgacgccgagaacgccgcccccagctgccccgacgagcacgacaccctgcccagaagaagaggcagacccagcagaagattcctgggcaagaagtacagaaagtactactacaagagccccaagcccctgctgagacccttcctgtgcagaatctgcggcagcagattcctgagccacgaggacctgagattccacgtgaacagccacgaggccggcgacccccagctgttcaagtgcctgcagtgcagctacagaagcagaagatggagcagcctgaaggagcacatgttcaaccacgtgggcagcaagccctacaagtgcgacgagtgcagctacaccagcgtgtacagaaaggacgtgatcagacacgccgccgtgcacagcagagacagaaagaagagacccgaccccacccccaagctgagcagcttcccctgccccgtgtgcggcagagtgtaccccatgcagaagagactgacccagcacatgaagacccacagcaccgagaagccccacatgtgcgacaagtgcggcaagagcttcaagaagagatacaccttcaagatgcacctgctgacccacatccaggccgtggccaacagaagattcaagtgcgagttctgcgagttcgtgtgcgaggacaagaaggccctgctgaaccaccagctgagccacgtgagcgacaagcccttcaagtgcagcttctgcccctacagaaccttcagagaggacttcctgctgagccacgtggccgtgaagcacaccggcgccaagcccttcgcctgcgagtactgccacttcagcaccagacacaagaagaacctgagactgcacgtgagatgcagacacgccagcagcttcgaggagtggggcagaagacaccccgaggagccccccagcagaagaagacccttcttcagcctgcagcagatcgaggagctgaagcagcagcacagcgccgcccccggccccccccccagcagccccggcccccccgagatcccccccgaggccaccaccttccagagcagcgaggcccccagcctgctgtgcagcgacaccctgggcggcgccaccatcatctaccagcagggcgccgaggagagcaccgccatggccacccagaccgccctggacctgctgctgaacatgagcgcccagagagagctgggcggcaccgccctgcaggtggccgtggtgaagagcgaggacgtggaggccggcctggccagccccggcggccagcccagccccgagggcgccaccccccaggtggtgaccctgcacgtggccgagcccggcggcggcgccgccgccgagagccagctgggcccccccgacctgccccagatcaccctggcccccggccccttcggcggcaccggctacagcgtgatcaccgccccccccatggaggagggcaccagcgcccccggcaccccctacagcgaggagcccgccggcgaggccgcccaggccgtggtggtgagcgacaccctgaaggaggccggcacccactacatcatggccaccgacggcacccagctgcaccacatcgagctgaccgccgacggcagcatcagcttccccagccccgacgccctggccagcggcgccaagtggcccctgctgcagtgcggcggcctgcccagagacggccccgagccccccagccccgccaagacccactgcgtgggcgacagccagagcagcgccagcagcccccccgccaccagcaaggccctgggcctggccgtgccccccagcccccccagcgccgccaccgccgccagcaagaagttcagctgcaagatctgcgccgaggccttccccggcagagccgagatggagagccacaagagagcccacgccggccccggcgccttcaagtgccccgactgccccttcagcgccagacagtggcccgaggtgagagcccacatggcccagcacagcagcctgagaccccaccagtgcagccagtgcagcttcgccagcaagaacaagaaggacctgagaagacacatgctgacccacaccaaggagaagcccttcgcctgccacctgtgcggccagagattcaacagaaacggccacctgaagttccacatccagagactgcacagccccgacggcagaaagagcggcacccccaccgccagagcccccacccagacccccacccagaccatcatcctgaacagcgacgacgagaccctggccaccctgcacaccgccctgcagagcagccacggcgtgctgggccccgagagactgcagcaggccctgagccaggagcacatcatcgtggcccaggagcagaccgtgaccaaccaggaggaggccgcctacatccaggagatcaccaccgccgacggccagaccgtgcagcacctggtgaccagcgacaaccaggtgcagtacatcatcagccaggacggcgtgcagcacctgctgccccaggagtacgtggtggtgcccgagggccaccacatccaggtgcaggagggccagatcacccacatccagtacgagcagggcgcccccttcctgcaggagagccagatccagtacgtgcccgtgagccccggccagcagctggtgacccaggcccagctggaggccgccgcccacagcgccgtgaccgccgtggccgacgccgccatggcccaggcccagggcctgttcggcaccgacgagaccgtgcccgagcacatccagcagctgcagcaccagggcatcgagtacgacgtgatcaccctggccgacgactag

SEQ ID NO: 211267 - DNA, 3564 bp, Artificial Sequence
  derived and/or modified sequence
atggccaccagcagcatgcccgagagcgagagaaacgtggccaccaaggccagcggcgcccccatgaccagccccatgagcagcagcaccctggcccacagcctggccgccatcgaggccctggccgacggccccaccagcaccagcacctgcctggaggcccagggcggccccagcagccccgtgcagctgccccccgccagcggcgccgaggagcccgacctgcagagcctggaggccatgatggaggtggtggtggtgcagcagttcaagtgcaagatgtgccagtacagaagcagcaccaaggccaccctgctgagacacatgagagagagacacttcagacccgtggccgccgccgccgccgccgccggcaagaagggcagactgagaaagtggagcaccagcaccaagagccaggaggaggagggccccgaggaggaggacgacgacgacatcgtggacgccggcgccatcgacgacctggaggaggacagcgactacaaccccgccgaggacgagcccagaggcagacagctgagactgcagagacccacccccagcacccccagacccagaagaagacccggcagacccagaaagctgcccagactggagatcagcgacctgcccgacggcgtggagggcgagcccctggtgagcagccagagcggccagagcccccccgagccccaggaccccgaggcccccagcagcagcggccccggccacctggtggccatgggcaaggtgagcagaacccccgtggaggccggcgtgagccagagcgacgccgagaacgccgcccccagctgccccgacgagcacgacaccctgcccagaagaagaggcagacccagcagaagattcctgggcaagaagtacagaaagtactactacaagagccccaagcccctgctgagacccttcctgtgcagaatctgcggcagcagattcctgagccacgaggacctgagattccacgtgaacagccacgaggccggcgacccccagctgttcaagtgcctgcagtgcagctacagaagcagaagatggagcagcctgaaggagcacatgttcaaccacgtgggcagcaagccctacaagtgcgacgagtgcagctacaccagcgtgtacagaaaggacgtgatcagacacgccgccgtgcacagcagagacagaaagaagagacccgaccccacccccaagctgagcagcttcccctgccccgtgtgcggcagagtgtaccccatgcagaagagactgacccagcacatgaagacccacagcaccgagaagccccacatgtgcgacaagtgcggcaagagcttcaagaagagatacaccttcaagatgcacctgctgacccacatccaggccgtggccaacagaagattcaagtgcgagttctgcgagttcgtgtgcgaggacaagaaggccctgctgaaccaccagctgagccacgtgagcgacaagcccttcaagtgcagcttctgcccctacagaaccttcagagaggacttcctgctgagccacgtggccgtgaagcacaccggcgccaagcccttcgcctgcgagtactgccacttcagcaccagacacaagaagaacctgagactgcacgtgagatgcagacacgccagcagcttcgaggagtggggcagaagacaccccgaggagccccccagcagaagaagacccttcttcagcctgcagcagatcgaggagctgaagcagcagcacagcgccgcccccggccccccccccagcagccccggcccccccgagatcccccccgaggccaccaccttccagagcagcgaggcccccagcctgctgtgcagcgacaccctgggcggcgccaccatcatctaccagcagggcgccgaggagagcaccgccatggccacccagaccgccctggacctgctgctgaacatgagcgcccagagagagctgggcggcaccgccctgcaggtggccgtggtgaagagcgaggacgtggaggccggcctggccagccccggcggccagcccagccccgagggcgccaccccccaggtggtgaccctgcacgtggccgagcccggcggcggcgccgccgccgagagccagctgggcccccccgacctgccccagatcaccctggcccccggccccttcggcggcaccggctacagcgtgatcaccgccccccccatggaggagggcaccagcgcccccggcaccccctacagcgaggagcccgccggcgaggccgcccaggccgtggtggtgagcgacaccctgaaggaggccggcacccactacatcatggccaccgacggcacccagctgcaccacatcgagctgaccgccgacggcagcatcagcttccccagccccgacgccctggccagcggcgccaagtggcccctgctgcagtgcggcggcctgcccagagacggccccgagccccccagccccgccaagacccactgcgtgggcgacagccagagcagcgccagcagcccccccgccaccagcaaggccctgggcctggccgtgccccccagcccccccagcgccgccaccgccgccagcaagaagttcagctgcaagatctgcgccgaggccttccccggcagagccgagatggagagccacaagagagcccacgccggccccggcgccttcaagtgccccgactgccccttcagcgccagacagtggcccgaggtgagagcccacatggcccagcacagcagcctgagaccccaccagtgcagccagtgcagcttcgccagcaagaacaagaaggacctgagaagacacatgctgacccacaccaaggagaagcccttcgcctgccacctgtgcggccagagattcaacagaaacggccacctgaagttccacatccagagactgcacagccccgacggcagaaagagcggcacccccaccgccagagcccccacccagacccccacccagaccatcatcctgaacagcgacgacgagaccctggccaccctgcacaccgccctgcagagcagccacggcgtgctgggccccgagagactgcagcaggccctgagccaggagcacatcatcgtggcccaggagcagaccgtgaccaaccaggaggaggccgcctacatccaggagatcaccaccgccgacggccagaccgtgcagcacctggtgaccagcgacaaccaggtgcagtacatcatcagccaggacggcgtgcagcacctgctgccccaggagtacgtggtggtgcccgagggccaccacatccaggtgcaggagggccagatcacccacatccagtacgagcagggcgcccccttcctgcaggagagccagatccagtacgtgcccgtgagccccggccagcagctggtgacccaggcccagctggaggccgccgcccacagcgccgtgaccgccgtggccgacgccgccatggcccaggcccagggcctgttcggcaccgacgagaccgtgcccgagcacatccagcagctgcagcaccagggcatcgagtacgacgtgatcaccctggccgacgactag

SEQ ID NO: 211268 - DNA, 4029 bp, Artificial Sequence
  derived and/or modified sequence
atggaggagaacgaggtcgagtcctcgtccgatgcagctcctggccccggtcgtcctgaagagccttccgaaagtggattgggcgtcgggacatcagaagcagtgagcgccgactcttcagatgctgcagccgcgcccgggcaggcagaagccgatgacagtggcgtgggtcaatcatcggaccgcggaagccgctcacaggaggaagtatcagaatcaagctcttcagccgacccattacctaattcatacctgcctgactcctcctcggtttctcatggaccagtggctggcgtgactggtggccctcccgcccttgtccattcctcagccttgcctgaccccaacatgctcgtgtctgactgcaccgcgtcttctagcgacttggggagcgctatcgataaaattattgagagcactatcggcccggatctgatccagaattgcattacagttacaagcgctgaagacggaggggctgagaccacaaggtatctgatactgcagggaccggatgacggtgccccaatgactagccccatgtcctcttcaacactggctcatagtctcgccgcaattgaagccttagccgatggcccgactagcacttccacctgtctcgaggcccaggggggcccctccagcccagttcaactacctcctgccagcggggccgaggaaccagatctccagagtttagaggccatgatggaagtggttgtcgtgcagcagttcaaatgcaagatgtgccagtataggtcaagtaccaaagcgaccttgcttcgccatatgcgggaacgacactttcggcccgttgctgcggctgccgcagcggctgggaagaagggaagactcaggaagtggtctacttccactaagagccaggaggaagaaggtcccgaggaggaggatgatgacgacatcgtagatgccggagctatcgacgacttggaggaggacagtgactataatccagctgaggatgaaccacgcggaagacaattacgactgcagcgcccgacccccagcaccccgcggccacggcggagacccggtcgaccgagaaaattgccccgtctggagatctccgaccttccagacggcgttgaaggagaaccgctggtaagctcacagtccgggcagtctcctccagaaccccaagacccagaggcaccttccagcagtggaccaggtcacctggtggctatggggaaagtgtccaggacacctgtggaagctggcgtatcacagtcagacgctgaaaacgccgcaccatcttgtcccgacgaacatgacactctgcctcggaggagaggccggccctcccgccgatttctgggcaaaaaatacagaaagtattactataagtcgcccaagccccttctgaggcctttcctgtgccgcatttgtggctccaggttcctaagtcacgaagatcttaggttccatgtgaactctcatgaggcaggcgatccacaactcttcaaatgccttcagtgttcatacagaagccggcgctggtcctctttaaaggagcacatgtttaatcatgtagggtcgaaaccctataaatgcgacgagtgcagctacaccagcgtgtacagaaaagatgtcatccggcacgcagccgttcacagccgcgatcggaagaaaaggcccgaccccacacccaagctctcctcttttccatgccctgtgtgtggaagggtgtacccaatgcagaaacggttgacacaacacatgaagacgcattcaacggagaaaccacacatgtgcgacaagtgtggcaagagtttcaagaaacgctacacctttaaaatgcacctgctcacacacatccaagccgtcgccaacaggcggttcaagtgtgagttctgcgagttcgtgtgcgaggacaaaaaagcactcttgaatcaccagttgtctcacgtttcagataagccgttcaaatgttctttctgcccttaccggacttttcgcgaggacttcctgctgtcgcacgtagctgtgaaacataccggtgctaagccgttcgcgtgtgagtactgccacttttcaacaagacacaagaaaaatctgagactccacgtgagatgccggcacgccagtagctttgaagaatggggacgaaggcacccggaggaacccccgtcccggcggcggcccttcttctccctgcaacaaattgaagaactcaaacagcaacattctgcagcaccagggccgcctcccagctcacccggaccccctgagattccacccgaagctacaaccttccagagctcagaggccccatcactgctatgttccgacactctagggggtgccacaataatttatcaacagggggcagaggagtctacggccatggcaactcaaactgctctggatctgctcctgaatatgagtgcacagcgcgaactcggggggacggctctgcaggttgccgtcgtgaaatcagaagacgtcgaggccggcctggcatcacccggaggacagccgagtccagagggcgccacgcctcaagtggtgacactgcatgtggccgaacctgggggcggcgctgccgccgaatcgcagctgggccctccagatttgcctcagatcactcttgctcccgggccgtttggagggaccggatactctgttatcacagctcccccgatggaggaaggcacaagcgcccctggcaccccctatagcgaagagccggccggtgaagcagctcaggccgtcgtggtctcagacactctcaaggaggctgggactcattacattatggcaaccgatggcacgcagctccatcatatcgagctgactgcggacggtagtatttctttcccttctcctgatgctctggcttctggagctaaatggccattactgcaatgcggcgggctgccccgagacgggccagaaccacctagccccgcaaagacacactgcgttggtgactcccagtcctctgcgtccagcccgcccgcaacgagcaaagccctcggcttagccgtgcccccttcccctcccagtgcagcgacagccgccagtaagaaattcagttgcaaaatttgcgccgaagcttttcccggtcgcgcagagatggaatcccacaaacgggcccacgcgggccccggcgccttcaagtgcccagactgccccttctccgcaagacagtggcccgaggtccgggcccacatggcccaacactcctccctgagaccacatcagtgctcgcaatgttctttcgcatcaaaaaataaaaaggatctgagacggcacatgctaacccacaccaaagaaaaaccctttgcctgccatctgtgtgggcagcggttcaaccgaaatggccatcttaagtttcatatccagcgtctgcattcccccgatgggaggaaaagtggcacacccaccgcacgggcccccactcaaactccaactcagactatcattctgaattctgatgatgaaaccttggctacccttcatactgccttgcagagcagccacggtgtcctcgggcctgagcgcctgcagcaggcgctgtctcaagagcacattatcgtggcccaagagcagaccgtgaccaaccaggaggaggctgcatatattcaggagattaccaccgccgatggccaaacggtgcaacacttagtcacctctgacaaccaggtacaatacatcataagccaagacggggtccagcacctgctgcctcaggagtatgtagtcgttccagagggtcaccacatccaagtacaggaagggcagataacacatatacagtatgaacaaggagcacctttcctccaggaatctcaaattcagtatgtacctgtaagtcccgggcaacaactggtgacccaggcccagctagaggcggccgcacacagtgctgtgactgccgtggctgatgccgctatggcacaggcccaagggttgtttggaaccgacgagaccgttccagagcatattcagcagcttcagcatcagggtatcgagtacgacgtgattactctggccgatgattag

SEQ ID NO: 211269 - DNA, 3564 bp, Artificial Sequence
  derived and/or modified sequence
atggccaccagctccatgcctgagtctgagcgcaacgtggccacaaaggccagtggggcccccatgacttcacccatgtccagcagtactctggcccatagtctggccgcaatcgaggctctggccgatggccccacatccacctcaacttgtttggaggcgcaagggggccccagctcccctgtccagctgcctccagccagcggcgctgaggagccagatctgcagtcactggaagccatgatggaggttgttgtggtgcagcagtttaaatgtaagatgtgtcagtatcgttccagcactaaagccacattgttgaggcatatgcgggaaaggcacttcaggccagtagccgcagcagctgctgccgccggcaaaaagggtcgcctgagaaagtggtccacatcaacgaaaagtcaggaggaagaaggcccagaagaggaagacgacgacgacatcgttgatgctggagccatcgacgatctggaggaggattccgactacaatccagctgaagatgagcccagagggcgccagcttcgattgcagagacctacccctagtacgccgcggccaagaaggagacccggccggccccggaagttgccgagactggaaataagtgatctgcctgacggggtggagggggagcctcttgtcagctcacagagcggacagtccccacccgaaccacaagaccctgaagccccttcttcctccggaccaggtcacctggtcgcaatggggaaggtcagtaggacccccgtggaagccggggtttcacagtccgacgccgagaatgcagccccgagctgccccgatgaacacgatacccttccaaggcgcagaggtcgtccatcccggcggtttctcggcaaaaagtatcgcaagtattactacaagagtcctaagccactgctgcggcctttcctctgcagaatttgcgggtcccgattcttgtcccacgaggacctccggtttcatgtgaacagccatgaagcgggcgacccacagttgttcaaatgcttgcagtgctcttacagaagccgaaggtggtcgtccctgaaggagcacatgtttaatcacgtgggctctaaaccttacaagtgtgacgagtgctcttacacaagtgtgtaccggaaggatgttattcgccatgcagctgttcacagtcgggatagaaaaaagagacctgaccctacacccaagcttagctcctttccctgtccggtgtgcggccgcgtttaccctatgcagaaacggttgacgcagcatatgaaaacccactctactgaaaagccccatatgtgcgacaagtgtggcaagtcttttaaaaaacggtatacttttaaaatgcatctgctcacgcacattcaggccgtcgcaaaccggcgctttaaatgtgagttttgtgaatttgtgtgtgaagataagaaggcgctactgaaccaccaattatcccacgtgtcagataagccttttaaatgctcattttgcccttacaggacattccgtgaagatttcctgctgtcccacgtggccgttaaacatactggtgctaagccctttgcgtgtgaatactgtcacttctcaacgcgccataaaaagaatcttcgtttgcacgtccgttgtcggcacgcaagctccttcgaggaatggggccggaggcaccctgaggaacctccatccagaagacggccttttttttcactgcagcagatcgaggagttgaagcagcagcacagcgccgctccgggaccccccccaagttctcctggtcccccagaaatccctcccgaggctaccacatttcagtccagcgaagcccccagcttgctctgcagcgacacactggggggggcaacaatcatataccagcagggcgcagaggagtctaccgccatggccacccagactgcactggacctgcttctcaacatgagcgcgcagcgcgagctgggaggaaccgctctacaggtggcagtggtcaagagtgaagacgtcgaggcagggttggccagtcctggcgggcagccgagtcctgaaggtgccactcctcaggtggtgaccttgcacgtcgcagagcctggggggggagccgccgccgagtctcagcttggtccccctgatctacctcagattacactggcccccgggccgtttggaggaacaggctatagcgtgattacagccccacctatggaggagggaacctcagcccccggtaccccctactcagaagagccggccggggaggcagctcaagcggttgttgtgagcgatactctgaaagaggcaggcacacactacattatggcgactgacggcacgcagctgcaccatatagaattaacagccgacggttccatcagttttccatcccctgatgcactcgcttctggggctaaatggccgttgctccagtgtggaggcctgccccgcgatgggcctgagcctccttcccccgccaaaacacattgtgtgggggacagccagtcaagtgccagctcccctccagctacctcgaaggccttaggtctcgcagtgccgccttcccccccatctgccgcaactgccgccagtaagaaatttagttgcaagatatgcgccgaggccttccctgggcgcgcagaaatggaatcacataagcgggcccacgctgggccaggcgccttcaagtgtccagattgtcctttcagtgcacggcagtggccagaagtccgtgcccatatggcccagcactcatcactgaggcctcaccagtgcagtcaatgtagtttcgcaagtaaaaacaagaaagacctgcgccgtcacatgttgactcatactaaagaaaaacccttcgcatgccacctctgtggccaacgatttaacaggaatggtcacttgaagtttcatatacagcggctgcactctcccgatgggcgaaaatcagggacccccacagcgcgggcaccgactcagacgcccacgcagacgatcattttgaattcagatgacgaaactctcgccaccttgcacacggcactgcagtcaagtcatggcgtgcttggcccggaaaggctgcagcaggcactgagccaggagcatatcatcgtggcacaggagcagaccgtgaccaaccaggaagaggcagcttacatacaagagattactacagccgatggacagactgtgcagcacctggttacctccgataatcaggtccagtacatcatctctcaggatggagtccaacacctattgccacaggagtacgtagtcgtacccgaaggacaccatatccaagttcaggagggacagatcactcatattcagtacgaacagggtgcgccttttcttcaggagagtcaaatccagtacgtgcctgtaagtcctggacagcaactcgtgactcaggcccagctagaagccgccgcccactcagctgttacagctgttgctgatgcggcaatggcgcaggcacaggggctgttcggcactgatgaaactgtacctgagcacatccagcagctgcaacaccaggggattgagtatgatgtgatcaccctcgccgacgactag

SEQ ID NO: 211270 - DNA, 4029 bp, Artificial Sequence
  derived and/or modified sequence
atggaggagaatgaggtggagagcagcagtgatgctgcccctggccctggccggcctgaggagcccagcgagagcggcctgggcgtgggcaccagcgaggccgtgtctgctgacagcagtgatgctgctgctgcccctggccaggccgaggctgatgacagcggcgtgggccagagcagtgaccggggcagccgcagccaggaggaggtgtctgagagcagcagcagcgctgaccccctgcccaacagctacctgcctgacagcagctctgtgagccacggccctgtggccggcgtgactggaggccccccagccctggtgcacagcagcgccctgcctgaccccaacatgctggtgtctgactgcacagccagcagcagtgacctgggcagcgccatcgacaagatcatcgagagcaccatcggccctgacctgatccagaactgcatcaccgtgaccagcgcagaagatggaggagctgagaccacccgctacctgatcctgcagggcccagatgatggagcccccatgaccagccccatgagcagcagcaccctggcccacagcctggccgccatcgaggccctggctgatggccccaccagcaccagcacctgcctggaggcccagggcggccccagcagccctgtgcagctgcccccagccagcggggctgaggagccagacctgcagagcctggaggccatgatggaggtggtggtggtgcagcagttcaagtgcaagatgtgccagtaccgcagcagcaccaaggccaccctgctgcggcacatgagggagcggcacttccggcctgtggccgctgctgctgctgctgctgggaagaagggccgcctgaggaagtggagcaccagcaccaagagccaggaggaggagggccctgaggaggaggatgatgatgacatcgtggatgctggggccattgatgacctggaggaggacagcgactacaacccagcagaagatgagccccggggccggcagctgcggctgcagaggcccacccccagcaccccccggcccaggagaagacctggccggcccaggaagctgccccggctggagatcagtgacctgcctgatggagtggagggggagcccctggtgagcagccagagcggccagagccccccagagccccaggaccctgaggcccccagcagcagcggccctggccacctggtggccatgggcaaggtgtccaggacccctgtggaggccggcgtgtcccagagtgatgctgaaaatgctgcccccagctgcccagatgaacatgacaccctgcccaggagaagaggccggcccagccgccgcttcctgggcaagaagtacaggaagtactactacaagagccccaagcccctgctgcggcccttcctgtgccgcatctgtggcagccgcttcctgagccatgaggacctgcgcttccacgtgaacagccatgaagctggggacccccagctgttcaagtgcctgcagtgcagctaccgcagccgccgctggagcagcctgaaggagcacatgttcaaccacgtgggcagcaagccctacaagtgtgatgaatgttcctacacctctgtgtacaggaaggatgtgatcagacatgctgctgtgcacagccgggacaggaagaagaggccagaccccacccccaagctgagcagcttcccctgccctgtgtgtggccgggtgtaccccatgcagaagaggctgacccagcacatgaagacccacagcacagagaagccccacatgtgtgacaagtgtgggaagagcttcaagaagcgctacaccttcaagatgcacctgctgacccacatccaggccgtggccaacagacgcttcaagtgtgagttctgtgaatttgtgtgtgaggacaagaaggccctgctgaaccaccagctgagccacgtgtctgacaagcccttcaagtgcagcttctgcccctaccgcaccttccgggaggacttcctgctgagccacgtggccgtgaagcacactggagccaagccctttgcctgtgagtactgccacttcagcaccaggcacaagaagaacctgcggctgcacgtgcgctgcagacatgccagcagctttgaggagtggggccgccgccaccctgaggagccccccagcagaagaagacccttcttcagcctgcagcagatcgaggagctgaagcagcagcacagcgctgcccctggccccccacccagcagccctggccccccagagatccccccagaggccaccaccttccagagcagcgaggcccccagcctgctgtgcagcgacaccctgggcggggccaccatcatctaccagcagggcgctgaggagagcacagccatggccacccagacagccctggacctgctgctgaacatgtctgcccagcgggagctgggcggcacagccctgcaggtggccgtggtgaagtcagaagatgtggaggccggcctggccagccctgggggccagcccagccctgagggcgccaccccccaggtggtgaccctgcacgtggccgagcccggcggcggcgctgctgctgagagccagctgggccccccagacctgccccagatcaccctggcccctggcccctttggaggcaccggctacagcgtcatcacagccccacccatggaggagggcaccagcgcccctggcaccccctacagcgaggagcctgctggggaggccgcccaggccgtggtggtgtctgacaccctgaaggaggccggcacccactacatcatggccacagatggcacccagctgcaccacatcgagctgacagcagatggcagcatctccttccccagcccagatgccctggccagcggggccaagtggcccctgctgcagtgtggcggcctgcccagagatggccctgagccccccagccctgccaagacccactgtgtgggggacagccagagcagcgccagcagccccccagccaccagcaaggccctgggcctggccgtgccccccagcccccccagcgctgccacagctgccagcaagaagttcagctgcaagatctgtgccgaggccttccctggccgggcagagatggagagccacaagagggcccacgccggccctggggccttcaagtgcccagactgccccttcagcgcccggcagtggccagaggtgcgggcccacatggcccagcacagcagcctgcggccccaccagtgcagccagtgcagctttgccagcaagaacaagaaggacctgcggcggcacatgctgacccacaccaaggagaagccctttgcctgccacctgtgtggccagcgcttcaacagaaatggccacctgaagttccacatccagaggctgcacagcccagatggcaggaagagcggcacccccacagcccgggcccccacccagacccccacccagaccatcatcctgaacagtgatgatgagaccctggccaccctgcacacagccctgcagagcagccatggagtgctgggccctgagcggctgcagcaggccctgagccaggagcacatcatcgtggcccaggagcagacagtgaccaaccaggaggaggccgcctacatccaggagatcaccacagcagatggccagacagtgcagcacctggtgaccagtgacaaccaggtgcagtacatcatcagccaggatggagtgcagcacctgctgccccaggagtatgtggtggtgcctgagggccaccacatccaggtgcaggagggccagatcacccacatccagtatgagcagggcgcccccttcctgcaggagagccagatccagtatgtgcctgtgtccccaggccagcagctggtgacccaggcccagctggaggccgccgcccacagcgctgtgacagctgtggctgatgctgccatggcccaggcccagggcctgtttggaacagatgaaacagtgcctgagcacatccagcagctgcagcaccagggcatcgagtatgatgtgatcaccctggctgatgactag

SEQ ID NO: 211271 - DNA, 3564 bp, Artificial Sequence
  derived and/or modified sequence
atggccaccagctccatgcctgagagcgagagaaatgtggccaccaaggccagcggggcccccatgaccagccccatgagcagcagcaccctggcccacagcctggccgccatcgaggccctggctgatggccccaccagcaccagcacctgcctggaggcccagggcggccccagcagccctgtgcagctgcccccagccagcggggctgaggagccagacctgcagagcctggaggccatgatggaggtggtggtggtgcagcagttcaagtgcaagatgtgccagtaccgcagcagcaccaaggccaccctgctgcggcacatgagggagcggcacttccggcctgtggccgctgctgctgctgctgctgggaagaagggccgcctgaggaagtggagcaccagcaccaagagccaggaggaggagggccctgaggaggaggatgatgatgacatcgtggatgctggggccattgatgacctggaggaggacagcgactacaacccagcagaagatgagccccggggccggcagctgcggctgcagaggcccacccccagcaccccccggccccggcggcggcccggccggcccaggaagctgccccggctggagatcagtgacctgcctgatggagtggagggggagcccctggtgagcagccagagcggccagagccccccagagccccaggaccctgaggcccccagcagcagcggccctggccacctggtggccatgggcaaggtgtccaggacccctgtggaggccggcgtgtcccagagtgatgctgaaaatgctgcccccagctgcccagatgaacatgacaccctgccccggcggcggggccggcccagccgccgcttcctgggcaagaagtacaggaagtactactacaagagccccaagcccctgctgcggcccttcctgtgccgcatctgtggcagccgcttcctgagccatgaggacctgcgcttccacgtgaacagccatgaggccggggacccccagctgttcaagtgcctgcagtgcagctaccgcagccgccgctggagcagcctgaaggagcacatgttcaaccacgtgggcagcaagccctacaagtgtgatgagtgcagctacacctctgtgtacaggaaggatgtgatcagacatgctgctgtgcacagccgggacaggaagaagaggccagaccccacccccaagctgagcagcttcccctgccctgtgtgtggccgggtgtaccccatgcagaagaggctgacccagcacatgaagacccacagcacagagaagccccacatgtgtgacaagtgtgggaagagcttcaagaagcgctacaccttcaagatgcacctgctgacccacatccaggccgtggccaacagacgcttcaagtgtgagttctgtgaatttgtgtgtgaggacaagaaggccctgctgaaccaccagctgagccacgtgtctgacaagcccttcaagtgcagcttctgcccctaccgcaccttccgggaggacttcctgctgagccacgtggccgtgaagcacactggagccaagccctttgcctgtgagtactgccacttcagcaccaggcacaagaagaacctgcggctgcacgtgcgctgcagacatgccagcagctttgaggagtggggcagaagacaccctgaggagccccccagcagaagaagacccttcttcagcctgcagcagatcgaggagctgaagcagcagcacagcgctgcccctggccccccacccagcagccctggccccccagagatccccccagaggccaccaccttccagagcagcgaggcccccagcctgctgtgcagcgacaccctgggcggggccaccatcatctaccagcagggcgctgaggagagcacagccatggccacccagacagccctggacctgctgctgaacatgtctgcccagcgggagctgggcggcacagccctgcaggtggccgtggtgaagtcagaagatgtggaggccggcctggccagccctgggggccagcccagccctgagggcgccaccccccaggtggtgaccctgcacgtggccgagcccggcggcggcgctgctgctgagagccagctgggccccccagacctgccccagatcaccctggcccctggcccctttggaggcaccggctacagcgtcatcacagccccacccatggaggagggcaccagcgcccctggcaccccctacagcgaggagcctgctggggaggccgcccaggccgtggtggtgtctgacaccctgaaggaggccggcacccactacatcatggccacagatggcacccagctgcaccacatcgagctgacagcagatggcagcatctccttccccagcccagatgccctggccagcggggccaagtggcccctgctgcagtgtggcggcctgcccagagatggccctgagccccccagccctgccaagacccactgtgtgggggacagccagagcagcgccagcagccccccagccaccagcaaggccctgggcctggccgtgccccccagccccccatctgctgccacagctgccagcaagaagttcagctgcaagatctgtgccgaggccttccctggccgggcagagatggagagccacaagagggcccatgctggccctggggccttcaagtgcccagactgccccttcagcgcccggcagtggccagaggtgcgggcccacatggcccagcacagcagcctgcggccccaccagtgcagccagtgcagctttgccagcaagaacaagaaggacctgcggcggcacatgctgacccacaccaaggagaagccctttgcctgccacctgtgtggccagcgcttcaacagaaatggccacctgaagttccacatccagaggctgcacagcccagatggcaggaagagcggcacccccacagcccgggcccccacccagacccccacccagaccatcatcctgaacagtgatgatgagaccctggccaccctgcacacagccctgcagagcagccacggcgtgctgggccctgagcggctgcagcaggccctgagccaggagcacatcatcgtggcccaggagcagacagtgaccaaccaggaggaggccgcctacatccaggagatcaccacagcagatggccagacagtgcagcacctggtgaccagtgacaaccaggtgcagtacatcatcagccaggatggagtgcagcacctgctgccccaggagtatgtggtggtgcctgagggccaccacatccaggtgcaggagggccagatcacccacatccagtatgagcagggcgcccccttcctgcaggagagccagatccagtatgtgcctgtgtccccaggccagcagctggtgacccaggcccagctggaggccgccgcccacagcgctgtgacagctgtggctgatgctgccatggcccaggcccagggcctgtttggaacagatgagaccgtgcctgagcacatccagcagctgcagcaccagggcattgaatatgatgtgatcaccctggctgatgactag

SEQ ID NO: 211272 - DNA, 4029 bp, Artificial Sequence
  derived and/or modified sequence
atggaggagaacgaggtggagagcagcagcgacgccgcccccggcccgggccggccggaggagccatcagagagtggattgggggtgggtacaagcgaggccgtgtcagccgacagctcagatgccgccgctgcccccgggcaggcagaagccgacgatagcggcgtggggcagagctccgacaggggcagccgatcgcaggaagaagtgtcagagtcttcctcctcggccgacccactaccaaactcctaccttccagacagttccagcgtgtcacatgggcccgtcgcaggcgtcactggggggcccccagccctcgtccacagcagcgcacttccagaccctaacatgctggtttctgattgtaccgcgagttcatcagacttaggctccgccatcgacaagatcattgagagtaccattggacccgacctgatccagaactgcatcaccgtgacctcggctgaggatggcggtgcggagaccacccggtacctaattctgcaggggcccgacgatggcgcgcccatgacaagtcccatgtcatcttccaccctggcccacagtctagcggccatcgaagccctcgccgacggccctacttccacatccacttgcctggaagcccagggaggcccaagttccccagtgcaacttccaccagcctctggcgccgaagagccagaccttcagtctcttgaagccatgatggaggtggtggtcgtacagcagttcaaatgcaaaatgtgccagtacagaagcagtactaaagcaacactcttgcggcatatgcgggaaagacactttcgccccgtcgccgccgcagccgccgcggccggtaagaaaggcaggctccggaagtggtctacctctacaaagtcccaggaggaggagggaccagaggaggaggacgatgatgacattgtcgacgccggagccatcgatgatctggaggaggactcagattacaacccagcagaggatgagcccaggggccggcagcttagactgcagaggcccacgcccagcactccacggccacgacgcagacccggccggcctcggaagctgccacggctcgagatatcagatcttcccgatggggtagagggcgaacccctggtcagctcccagtcagggcagagcccgccagaacctcaggacccagaagctccctcctcctcaggccctggccatctggtggctatgggaaaagtcagccggacccctgtagaggccggcgtttcacagagtgacgcggagaatgcagcgccatcatgtcctgacgagcatgatacccttccacgccggagaggcagaccctctcgacgctttttggggaagaagtaccgtaagtattattataagagtcccaagcctttactgaggccattcctgtgtcggatctgtggttcaaggttcctgtcacatgaggaccttcggttccacgtaaactcacacgaggctggggatcctcagctgttcaagtgcctccagtgcagttaccggtcccgtcgctggagctctctcaaagagcacatgttcaatcacgttggaagcaagccatacaaatgcgacgagtgctcttacacctctgtctacaggaaggacgtcattcgtcacgccgccgtccattcacgtgaccggaaaaagcgcccagaccctactcccaaactgagctcgttcccatgcccagtgtgcgggcgtgtgtaccccatgcaaaagaggctgacgcagcatatgaaaacacattcaaccgaaaagcctcatatgtgcgacaaatgcggtaaatcttttaagaagcggtacacatttaagatgcatctgctgacccacatccaggccgtggcgaacaggagatttaagtgcgagttttgcgagtttgtctgcgaggacaaaaaggctctgttaaatcaccagctaagtcacgtttcagataagccctttaagtgcagcttttgtccctatcgcacgttcagagaagactttctcctcagtcacgtagccgttaagcataccggggcaaaaccttttgcgtgcgagtactgccacttctctactcggcacaaaaagaatctgaggctgcatgtccggtgcaggcacgccagttcattcgaagagtggggccgccgacacccggaagaaccgccaagcaggcgccggcccttcttttccctccagcagatcgaggagctgaagcaacagcacagtgccgcccccggaccaccgccatctagcccaggaccgcccgaaattccgcccgaggccaccacattccagagcagcgaagctccttccctcttgtgtagcgacacactaggcggggctaccatcatttaccaacaaggggcagaagaatccaccgccatggcgacccagaccgccctggatctgttgcttaacatgtccgcccaacgagagctgggcggaactgctcttcaagtcgctgtagttaaatctgaagatgtcgaggctggattggccagtcctggcgggcagcctagccccgaaggagccaccccacaggtggtcacccttcatgtagctgagcccggcgggggagctgccgcagaatcccaactaggaccgccagatctgcctcagatcactctggcacccggacccttcggcgggactggctattccgtcatcaccgcgccccctatggaagagggaacgtccgcccccggcaccccgtactcggaggaacccgccggagaagccgctcaagcagtggtcgtctccgacactcttaaggaggccggtacacactacattatggcaacagacggcacccagttacaccatatcgagcttaccgcggacgggtccatctcttttccaagccctgacgcattagcatccggggcaaagtggccactgctgcaatgcggcggcttgccaagagatggccctgagccacccagtcccgctaagacccactgcgttggggattcacagtctagcgcgtcatccccccccgccacctctaaggctttaggacttgcggtgccgccctctcctcctagtgctgcaaccgccgcttcaaagaagttttcctgcaagatctgtgccgaggccttccccggacgagctgagatggagtcacataagcgagcccatgccggccctggggctttcaaatgccctgattgtccattctccgcccggcagtggcccgaagtccgagctcacatggcccagcacagcagtctgaggccccaccagtgttcacagtgttcttttgcctctaagaataagaaggacctgcgaagacatatgctgacccataccaaggagaaacctttcgcctgtcatctttgcggccagaggttcaatagaaatggccatctgaagtttcatattcagagactgcactccccggatgggcgcaaatccggaacaccgactgccagggctcccacccagacacccacgcagactatcatcctcaactccgatgatgaaacccttgcaactctgcacaccgccctacagagcagtcacggcgtgctggggcctgagcgtttacagcaggccctttcccaagagcacatcatagtggcacaggaacaaaccgttactaaccaggaggaagcagcatacatccaggagataaccactgcagacggccagaccgtacagcacctggtgacgtccgacaaccaggtgcagtatataataagtcaggatggggtgcaacatctgctgccccaggaatatgtcgtcgtgccagagggtcatcacattcaggtgcaggagggccaaataacacatattcagtacgaacagggagcgccctttcttcaggagtctcagattcagtacgtgccagtgagcccaggccagcaactggtgactcaggcccagctggaggccgccgctcattctgccgtaaccgcggtggccgatgcagcgatggcacaggcgcagggcctgtttggcactgacgaaacagtgccagagcatatccaacagctgcaacatcaaggaattgaatatgacgttatcaccctggctgacgactag

SEQ ID NO: 211273 - DNA, 3564 bp, Artificial Sequence
  derived and/or modified sequence
atggccaccagcagcatgcccgagagcgagcggaacgtggccaccaaggctagtggtgcgcccatgactagtcctatgtctagtagcactttagctcacagcctggcagccattgaggctctggccgatgggcccactagtacatctacatgcctagaagcgcagggaggtcccagtagtcccgtccaactgccgcctgcctctggggcagaggagcccgatctacagtccctcgaggctatgatggaggttgtggtcgtccagcagttcaaatgtaaaatgtgccagtataggtcaagcaccaaagctacgctgttgagacatatgcgggagcggcactttcggccggtggccgcagccgctgctgccgccggaaaaaaaggtcgtctgcgaaaatggtccacctccacaaagtcccaggaggaagaaggtcctgaggaggaggacgatgatgacatcgtggatgcaggtgccattgacgaccttgaggaagatagcgattacaatccagcagaggatgagccccgagggcggcagctgaggttacaacgtccaacaccctcaactcctcgtccccggcgccggcccggccggcctcggaaattgcctaggctggagatttccgatctgccagacggagtcgaaggagagcctttggtctcctcacagagtggccaatcccctccagagccccaggatccagaagcaccttcttccagtggaccaggccatctggttgcaatgggaaaggtcagcaggaccccggtcgaggcaggcgtgtcgcaatctgatgcagaaaatgccgctccatcatgtcctgatgagcacgatactctgcccagaagacggggtcggccgagccggcggttcctgggaaaaaagtatagaaagtattattacaaaagcccgaagccgcttctgagaccttttctgtgccgcatttgcggcagccgcttcctgtcccacgaagacctaaggtttcacgtgaatagccacgaagctggagatcctcagctgtttaaatgtctgcagtgctcttaccgctcacgccggtggtccagcctaaaggagcacatgtttaatcacgtagggtcgaaaccctacaaatgcgacgagtgctcttatacttccgtctaccggaaagatgtgatcaggcacgctgccgttcacagtcgcgatcgtaaaaagcgtcccgatcctacacctaagctgtcctcatttccttgccccgtctgcggcagagtgtaccccatgcagaagagactgacgcagcatatgaaaacccattccacagagaaacctcacatgtgcgacaaatgcggtaaatcctttaagaagcggtataccttcaaaatgcacctgctcactcatattcaagcagtggccaacaggagattcaaatgtgaattttgcgagtttgtatgcgaggacaaaaaggccctgctgaatcatcaactgtcacacgtatctgataaaccattcaagtgttccttctgtccttatcggaccttcagggaagatttcctcctgagccacgttgccgtcaaacacacgggagctaaaccctttgcctgtgaatattgccatttcagcacacggcataagaagaatctgcgcctgcatgtgcgctgcaggcacgcctcctcctttgaagaatggggtaggcggcaccccgaggagcccccatcacggcgtcgcccattcttcagtctgcagcagatcgaggaactgaaacagcagcacagcgccgctcccggcccaccacctagttcgccaggtccgcctgagattcccccggaggccaccaccttccagagcagcgaggcgccctccttactctgttcagatacactgggcggcgcaactattatatatcagcagggtgccgaagaatccacggccatggccactcagacggcactggatttattgctgaatatgtcagcccagcgtgaactgggcggcaccgccctccaagttgcagtcgtgaagtccgaggacgtggaagcaggcctggcttcaccgggagggcagccaagtccagagggcgcaacaccacaggtggtcactctgcacgttgccgagccgggtgggggcgctgccgcagagtctcaactgggaccgcccgatctgcctcagatcaccctggccccgggcccttttggtggaacaggttattccgtgattaccgcaccaccaatggaagaagggacctcagccccaggtacaccttacagcgaagagcctgccggtgaagctgcccaagcagtggtcgtgtccgacacccttaaggaagccggcactcactacatcatggctacagatggcacacagctccatcacatcgaactcaccgccgatgggtctatcagctttccctccccagacgctttagcttcgggtgcaaaatggcctcttctgcagtgcggcgggctccccagagatgggccagagccgccttcgccagccaagactcactgcgtcggagattcgcagtcttctgcttcttccccaccagctactagcaaagccttggggcttgccgttccaccctcacccccttccgctgctacggcagcttccaaaaaattttcatgcaaaatctgcgccgaggcatttcccgggcgcgcggaaatggaaagccataagagggcacacgctggtcctggggcttttaaatgtcctgactgcccctttagtgcccggcagtggccggaggtccgggcccacatggcgcagcattcctctctgcgcccccatcagtgctcacagtgctctttcgcaagcaagaacaaaaaagacctgcgaagacacatgctgactcataccaaggaaaaaccctttgcctgccacctttgtggccagcggtttaaccgtaacggccacctcaaattccatattcagaggctgcacagccccgacgggcgtaagtcagggacaccaaccgctcgcgcaccaactcagacgcccacccagactatcatccttaattccgacgatgaaaccctggccaccctgcataccgccctgcagagcagtcacggtgtattgggccctgagaggctccaacaggcgctgagccaagagcatattatagtggcacaggaacagacggttacgaaccaagaggaagcagcatatatccaggagatcaccacggctgacggtcagactgttcaacatctggtgacttctgacaaccaggtgcagtatattatcagtcaggatggggtacagcatttgctgccccaggaatacgtggtagtaccagagggacaccacattcaagttcaggagggccagattacccacatccagtatgagcaaggagctcctttcctgcaggagtctcagatacaatacgttcctgtttctccgggccagcagttggtgactcaggcccagctggaagctgccgcccatagcgctgtcacagctgttgccgatgcggccatggcgcaagctcaggggcttttcggcacagacgagacagtgcctgagcacattcaacagcttcagcaccaaggcattgaatacgacgtcattactctggctgatgactag

SEQ ID NO: 211274 - DNA, 4029 bp, Artificial Sequence
  derived and/or modified sequence
atggaggaaaatgaagtggagagttcctccgatgcggctccgggacccggaagaccagaggaaccatccgagtccggtttgggagttggtacatctgaagccgtgtccgctgattcatccgatgctgcagctgccccaggacaggccgaagctgacgatagcggcgtcggccagtcctctgaccgtgggtcccggtcccaggaagaagtgtccgagagttcctctagcgctgatcctctgccgaacagttatcttccagactccagttcagtttcacacggccctgtcgcgggagtcacaggcggaccaccagctctggtccacagcagcgcgctgcccgatcccaacatgttggttagtgactgcaccgcctcctcctctgaccttggatcggctatcgacaaaatcattgagtcgacaattggcccagatttgatacagaattgcataactgtgacatctgctgaggatggaggggcagaaaccacacgttacctgattctccaggggcctgacgacggagctcccatgactagccccatgtctagttcaactctggcccacagcctggccgctattgaagcactggcagacggcccaacatcgaccagcacttgtcttgaagcccaaggtggtccaagttcccctgtgcagctccccccagccagcggagcagaggaaccagacctgcagtcacttgaagccatgatggaagtggtggtcgtccagcaattcaaatgcaagatgtgccagtacaggtccagcaccaaggccacactgctgcggcacatgcgcgaaagacatttccgcccagtggctgccgctgcagctgctgcaggcaagaagggtaggttgagaaagtggagcacatctacaaaaagtcaagaagaagagggccctgaggaggaagacgatgacgacattgtggatgccggtgccatcgatgaccttgaagaggacagcgactataaccccgcagaggacgagcccagaggtcgccagctccgtctccagcggcctaccccttccacaccaaggcctaggaggcgccctggccgacccaggaaactgcctcgtctcgaaatctccgatctgccagacggcgtggaaggagaacctctggtgtcctcgcagagtgggcagtcgccacccgagcctcaggaccccgaggccccatcctcttctggccctggccacctggtggctatgggcaaggtctctcgcacccctgtggaagctggggtctcccagtcagacgctgaaaacgctgcacccagctgtccagatgagcatgatacgctaccacggcgaaggggacggccatcaagacgattcttgggcaagaaatatcggaaatactattataagtcgccgaagcccttgctgcgacccttcctatgtcgaatctgtggcagtcgattcctcagtcacgaagatttgcgattccacgtcaatagtcacgaagcaggggatccgcagctcttcaagtgtctgcagtgctcttatcgctctaggcgctggtccagcttaaaggagcatatgtttaaccacgtcggcagcaaaccatataagtgcgatgaatgcagctataccagtgtctacaggaaggacgtgatacgtcacgccgcagtgcactccagagatcggaagaaacgaccagatcctactcccaaattgagctcctttccttgtcctgtctgcggcagggtgtacccaatgcaaaaacgtttaacccagcatatgaaaactcattctaccgaaaaaccacacatgtgcgacaagtgcggaaaaagttttaagaagcgatacacctttaagatgcatctcttaactcacattcaggccgttgccaaccgaaggttcaaatgtgagttctgtgagttcgtctgcgaagataagaaggcactgctgaatcaccagctgtcacacgtgagcgacaaaccttttaagtgttctttctgcccatacaggacctttagagaggacttcctattgtcccatgtagcagtgaagcatactggcgcaaagccatttgcttgtgagtattgccacttcagcaccaggcacaaaaagaacctcagattgcatgtgcgttgcagacatgcctcgtcctttgaagagtggggcaggcgacaccccgaagagccgccatccaggcgaagacccttttttagtttgcagcagattgaagaactgaaacagcagcacagcgcggcacctggccctcctcccagctcaccagggcctccagagattccaccagaggctactactttccagtcctcagaagccccaagtttgctctgcagcgacaccctggggggagccacgatcatttaccagcaaggagccgaagagtccactgccatggccacccagacggctctggatttgcttctgaacatgagcgctcaacgagaactgggaggaacagccctccaggtggctgtggtgaagtccgaggacgtggaagccggattagctagcccgggagggcaacccagtcccgaaggtgcgaccccccaggtagtcacgctacacgtggctgaaccaggtggaggggcagctgcagaaagccagctgggacccccagacctcccccaaattacgctggcgcctggtccatttggtggcaccggatactcagtgattactgctccacctatggaggaggggacctctgcaccaggaactccttattcagaggagccagcaggcgaggctgcccaggcggtggtggtctcagataccttgaaagaggccggtactcattacatcatggccaccgatggcactcagctgcatcatattgaactcactgccgacggcagcataagctttccgtcccccgacgcactcgcctcaggagccaagtggcccctgctgcagtgcggagggttaccacgtgatggtcccgaacccccttctcccgctaagactcattgcgttggtgactcgcagtctagcgctagctcacctcccgctaccagtaaagccttgggactggctgtgcctccaagcccgcctagcgcagccacagccgctagtaaaaagttcagttgcaagatttgtgccgaggccttcccgggaagagcagaaatggaatctcacaaacgggctcacgccggaccaggagccttcaagtgtccagattgcccttttagtgcacgacaatggcccgaggttagagcccacatggctcagcactcgtccctgcgcccacatcagtgctcacagtgtagtttcgccagcaagaacaagaaagacttgcggaggcatatgctgactcacacgaaggagaagccctttgcctgtcacctgtgcggtcagcgcttcaaccgtaatggccatctcaaatttcatatccagaggctgcactcccctgatggtcgcaaatccggaaccccaacagcccgagcccctacacagactccaacacagacaatcattctgaactcagacgatgagaccttggccacactgcacactgctcttcaaagctctcatggtgtacttggacccgaaagactgcagcaagctctgagccaagagcacatcattgtggctcaggagcaaacagtaactaaccaggaagaggcggcttacatccaggaaatcacaaccgccgatgggcaaaccgtccagcaccttgtaacaagcgataaccaggtgcagtacatcattagccaggatggtgtccagcatctcctcccccaggaatatgtggtcgtgcccgagggacaccatatacaggttcaggaaggtcagataacacacattcaatatgaacagggagccccttttctccaggagtcccagatacagtacgtacccgtaagtccaggtcagcagttagttacccaagcccaacttgaagcggcagcccatagcgcggtgactgccgtcgcagatgctgcaatggcacaggcacaaggcctatttggaaccgatgagactgtccctgagcacatccagcagctgcagcaccaaggaatagaatatgatgtgatcacccttgcggacgattag

SEQ ID NO: 211275 - DNA, 3564 bp, Artificial Sequence
  derived and/or modified sequence
atggcaacgtcctctatgcccgaaagtgaacggaatgtggccactaaggcttccggagctccaatgacttctcccatgagttcatcaaccttagcccattcacttgctgccatcgaggccctagctgacggccctactagtacctccacatgcctggaagcccagggtggaccctcaagcccggttcagctccctccggcaagcggagccgaagagccagacctacagagtttggaggccatgatggaagtggtcgtcgttcagcaatttaagtgcaagatgtgccagtacagatcctccacaaaggcaaccctcttgcgccacatgagagaaaggcacttccgccctgtggctgccgcagccgcagcagccggaaagaaaggtcgactgcgaaagtggtccacaagcacgaaatcccaagaagaagaaggccctgaggaggaggacgacgacgatattgtcgatgctggggctatagatgacctcgaagaggatagtgattacaatcctgccgaagatgaaccaaggggtaggcagctgagactgcagaggcctacacctagcacaccacgacccagacgtcgacctgggcgaccaagaaagttgccaaggctcgagatatctgatctccccgacggggtggagggcgagccattagtgtcatcccagtcggggcagtctcccccagaaccccaagaccccgaggcccctagttcctctggaccagggcatctggtggccatgggaaaagttagccgcactccagtagaggctggtgtgagtcagtctgacgcagagaacgccgctccgtcttgccccgatgagcacgatacactgccacggagacgcggaaggcccagcagaagatttctcgggaaaaagtaccgaaaatattattataagagtccaaagcccctgctgagacctttcctctgtagaatatgcgggagtaggttcctgtctcacgaggatttgaggtttcacgtcaactctcacgaggctggggacccacaactgttcaagtgcctgcagtgctcttaccggtctcggagatggtcctcccttaaggaacatatgtttaaccacgtcggctcaaagccttacaaatgcgacgagtgctcatacacttccgtttacaggaaagacgtcatacgccacgcagcagtccactccagagaccggaagaaacgacctgacccgactccgaagctgtcctcttttccttgccccgtgtgtggcagggtgtatcctatgcagaaaaggctgacacagcacatgaagacccacagcaccgagaagccacacatgtgtgataagtgcggtaaaagcttcaaaaaacgctatacctttaagatgcatctgctgacccatattcaggccgtcgccaaccgcaggttcaagtgcgaattttgcgaattcgtgtgtgaagacaagaaagccctgctcaatcatcagttgagtcacgtatccgataaacctttcaaatgcagtttctgtccctaccggacattccgtgaggacttcctcctctctcacgttgcagtaaaacacacaggagctaaaccctttgcctgcgagtactgccacttttccacacggcacaagaaaaatcttagacttcacgtgaggtgtaggcacgcctcctccttcgaagaatggggaagaaggcacccagaggaaccaccctcacggagacgcccattcttttccctgcagcaaatcgaggagttgaagcaacaacattcagctgcaccaggccctccacctagcagcccgggtcctcccgaaattccccctgaggctacgaccttccagagttcagaagccccttccttgttgtgtagcgacacactcggcggagcaacaatcatttaccagcagggagccgaagagtccaccgctatggctactcagacagccctcgatcttctcctgaatatgtcagctcagcgggagctaggcggaacagcccttcaggtcgccgttgtcaagtccgaggacgttgaagcaggattagccagtcccggtggtcagccgtctcctgagggcgcaacgcctcaggtggtgacactgcatgttgcagaaccaggcggaggcgctgccgctgagtcgcagctcggcccacccgacctgcctcagatcaccttggctccaggcccttttggcggaacgggatactcagtaattactgccccaccaatggaagagggtacgtctgcccctggaaccccttatagcgaagaaccagccggtgaggcagcccaggccgtggtggtttccgatacactgaaagaggccggaacccactacattatggccacagacggcacacaactgcaccacatagagctgacagcagacgggagcatttcctttccttctcccgacgccctggcatctggggctaaatggccattgctccagtgcggcggactgcctagggacggtcccgagcccccaagtcccgcaaaaacccactgtgtgggcgactctcagagttcggcctccagcccccctgcaacttcaaaagctctggggctggctgtgcctccttcgcccccaagtgcggcaacagcagcatcaaagaaattctcctgtaaaatttgcgcagaagcattcccaggaagagctgagatggaatcccataagagagcccatgctggccctggcgctttcaagtgccctgattgccctttcagcgcaaggcaatggccggaggttcgggctcatatggcacagcactcgtccctccgcccacaccagtgtagccaatgttctttcgcctccaagaacaaaaaggaccttcgtagacacatgctgacccatactaaggagaagcccttcgcctgtcacctgtgtggccaacgttttaatagaaacggtcaccttaaattccacattcagcgtttacattcccccgatggcagaaagagcggaactcccactgccagagcacccacgcagacacccacccagaccataatccttaattccgatgatgaaacattagctacactgcatacagccctgcagtcttctcacggcgtcctcgggccagagcggctgcagcaagccctgagccaggagcacattatagttgcacaggagcagacagttacgaaccaggaggaggcagcatacatacaggagattacaactgccgatgggcagacggtgcagcacttggttacttccgataatcaggtgcaatacattatctcacaggatggggttcaacacttgctgccgcaggagtatgtggtagtcccggaggggcatcacatccaagtgcaagagggccagataactcatatccagtacgagcagggcgctcccttcctccaggaaagccaaatacagtatgtgccggtgtcacctggacaacagctggtaactcaggcccagctggaggccgcagcccatagcgctgtcaccgccgtggcagacgcagctatggcgcaggcacagggcctgttcggaaccgacgaaacggtcccagaacacatccagcaactgcagcaccagggaatcgagtatgacgtgatcacccttgccgatgactag

SEQ ID NO: 211276 - DNA, 4430 bp, Artificial Sequence
  derived and/or modified sequence
cgacctcgtcgatgccggagtcagagaggaacgtggctacgaaagcctcggagtgaagttcccagaccctacgccccgctgtcaggcagcccgccgatcagatggaggagaacgaggtggagagcagcagcgacgcggcccctgggcctggccggcccgaggagccctctgagagcggcctgggtgtgggcacctcagaagccgtgtccgccgacagcagcgacgccgcggccgccccggggcaggcagaggccgatgactctggcgtggggcaaagctcggaccgcggcagccgttctcaggaggaggtatctgagagcagctcgagcgcagaccccctgcctaatagctacctccctgattcatcgtctgtgtctcatgggccagtggcaggggtgacaggcggtcccccagcacttgtgcactctagtgcactcccagaccccaacatgctggtgtccgactgcacagcttcctcctcggacctgggctcggccatcgacaagatcatcgagtccaccatcgggcccgacctcatccagaactgcatcactgtgaccagtgctgaggatggcggggccgagaccacacggtacctgatcctacagggcccagatgatggagcccccatgacatcaccaatgtccagttccaccttggcccacagcctagcagccattgaggccctggcagatggccccacatccacatccacatgcctggaggcacagggtgggcccagctccccggtgcagctgcccccagcctccggtgccgaagagccggacctgcagagcctggaggccatgatggaggtggtggtggtgcagcagttcaaatgcaagatgtgccagtaccggagcagcaccaaggccacactgctgcgccacatgcgggaacgccacttccgtccagtagcagcagccgcagcagcagctggtaaaaaaggacgtctacggaagtggagcacctccaccaagagccaagaggaagagggaccagaggaggaggacgatgatgacattgtagacgctggagccattgatgacctggaggaggatagcgactataatccagctgaggatgagccccgaggccggcagcttcggctccagcgccccacccccagtaccccaaggccccgaaggagacctggccggccccggaagctgccccgcctggagatctcagacctcccagatggtgtggaaggagagcctctagtgagttcccagagtggacagagccctccagagccacaggatcccgaggctcccagctcctcaggcccaggacacctggtggccatgggcaaggtgagcaggacccctgtggaagctggtgtgagccagtcagatgcagagaacgcagccccctcctgcccggatgagcatgacactctgccccggcgccgaggtcgaccttccaggcgcttcctaggcaagaaataccgcaagtactattacaagtcgcccaaaccacttttgaggcccttcctgtgccgcatctgtggttctcgctttctgtcccacgaggacctgcgcttccacgtcaactcccatgaggctggcgatccccagctcttcaagtgcctgcagtgcagctatcgttcccgccgctggtcctcgctcaaggagcacatgttcaaccacgtgggcagcaagccctacaagtgtgacgagtgcagctacaccagtgtctaccggaaggacgtcattcggcacgccgctgtgcacagccgggaccggaagaagaggccagatccgactccaaagctgagctctttcccctgccctgtgtgtggccgtgtgtaccccatgcagaaaagactcacgcagcacatgaagacgcacagcactgagaagccccacatgtgtgacaagtgtggaaagtcctttaagaagcgctacaccttcaaaatgcacctgctcacgcacatccaggctgttgccaaccgcaggttcaagtgtgagttctgtgagtttgtttgtgaagacaagaaggcactgctgaaccaccagttgtcccacgtcagtgacaagcccttcaaatgcagcttttgtccctaccgcaccttccgagaggacttcttgctgtcccatgtggctgtcaagcacacaggggccaagcccttcgcctgtgagtactgccacttcagcacacggcacaagaagaacctgcgcctgcacgtacggtgccgacacgcaagcagcttcgaggaatgggggaggcgccaccctgaggagcccccctcccgccgtcgccccttcttctctctgcagcagattgaggagctgaagcagcagcacagtgcggcccctggaccacctcccagttccccaggacctcctgagatacccccagaggcgacaactttccagtcatctgaggctccctcattgctctgttctgacaccctgggcggcgccaccatcatctaccagcaaggagctgaggagtcgacagcgatggccacgcagacagccttggatcttctgctgaacatgagtgctcagcgggaactggggggcacagccctgcaggtggctgtggtgaagtcggaagatgtggaagcagggttagcatcccctggtgggcagccctcccctgaaggtgccactccacaggtggtcaccctccacgtggcagagccagggggcggtgcagcagccgagagccagctaggccctcctgacctaccgcagatcaccctggcacctggtccatttggtgggactggctacagtgtcatcacagcaccccctatggaggagggaacatcagctcctggcacaccttacagcgaggagcccgcaggagaggcagcccaggctgtggttgtgagtgacaccctaaaagaagctggcacccactacatcatggctactgatggtacccagttgcaccacattgagctcaccgcagatggctccatctccttcccaagtccagatgctctggcctctggtgccaaatggcccctgctgcagtgtgggggactgcccagagacggccctgagcccccatctccagccaagacccactgcgtaggggactcccagagctctgcctcctcacctcctgcaaccagcaaagccctgggcctggcagtgcccccgtcaccgccatctgcagccactgctgcatcaaagaagttttcctgcaagatctgtgccgaggccttccctggccgagctgagatggagagtcacaagcgggcccacgctgggcctggtgccttcaagtgccccgactgccccttcagtgcccgccagtggcccgaggtccgggcgcacatggcacagcactcaagcctacggccccaccagtgtagccagtgcagctttgcctccaagaacaagaaggacctgcgtcggcacatgctgactcacacaaaggagaagccttttgcatgccacctctgcgggcagcgtttcaaccgtaacgggcacctcaagttccacatccagcggctgcacagtcctgatgggaggaagtcaggaacccctacagcccgggcccctacccagaccccaacccagaccatcatcctgaacagtgatgacgaaacactggccaccctgcacactgcactccagtccagtcacggggtcctgggcccagagcggctacagcaggcactgagccaggaacacatcatcgttgcccaggaacagacagtgaccaatcaggaggaagccgcctacatccaagagatcaccacggcagatggccagaccgtacagcacctggtgacctccgacaaccaggtgcagtatatcatctcccaggatggtgtccagcacctgctcccccaggaatatgttgtggtccctgaaggccatcacatccaggtacaggagggccagatcacacacatccagtatgaacaaggagccccgttccttcaggagtcccagatccagtatgtgcctgtgtccccaggccagcagcttgtcacacaggctcaacttgaggctgcagcacactcagctgtcacagcagtggctgatgctgccatggcccaagcccagggcctgtttggtacagacgagacagtgcccgaacacattcaacagctgcagcaccagggcatcgagtacgacgtcatcaccctggccgatgactgagccccgagggcccaacacagatcatggatttgcggccagctctcctgggggtagggggccaccaggactcacctccctcttcatttaggatctccagatactggatagccagcatcctctcattcccagggagccagacctgtgctgttggggttaggggcagccatgggccccagccaggacatgctgggtgccccagcctgcaggcaggctttgggagagaaatttatttttgtttgggtggacccactggcctgtcagtctcaataaagggaccggagtccagtcctgaacagctta

SEQ ID NO: 211277 - DNA, 3881 bp, Artificial Sequence
  derived and/or modified sequence
cgcagcggaggaaagaggatggcgacctcgtcgatgccggagtcagagaggaacgtggctacgaaagcctcgggagcccccatgacatcaccaatgtccagttccaccttggcccacagcctagcagccattgaggccctggcagatggccccacatccacatccacatgcctggaggcacagggtgggcccagctccccggtgcagctgcccccagcctccggtgccgaagagccggacctgcagagcctggaggccatgatggaggtggtggtggtgcagcagttcaaatgcaagatgtgccagtaccggagcagcaccaaggccacactgctgcgccacatgcgggaacgccacttccgtccagtagcagcagccgcagcagcagctggtaaaaaaggacgtctacggaagtggagcacctccaccaagagccaagaggaagagggaccagaggaggaggacgatgatgacattgtagacgctggagccattgatgacctggaggaggatagcgactataatccagctgaggatgagccccgaggccggcagcttcggctccagcgccccacccccagtaccccaaggccccgaaggagacctggccggccccggaagctgccccgcctggagatctcagacctcccagatggtgtggaaggagagcctctagtgagttcccagagtggacagagccctccagagccacaggatcccgaggctcccagctcctcaggcccaggacacctggtggccatgggcaaggtgagcaggacccctgtggaagctggtgtgagccagtcagatgcagagaacgcagccccctcctgcccggatgagcatgacactctgccccggcgccgaggtcgaccttccaggcgcttcctaggcaagaaataccgcaagtactattacaagtcgcccaaaccacttttgaggcccttcctgtgccgcatctgtggttctcgctttctgtcccacgaggacctgcgcttccacgtcaactcccatgaggctggcgatccccagctcttcaagtgcctgcagtgcagctatcgttcccgccgctggtcctcgctcaaggagcacatgttcaaccacgtgggcagcaagccctacaagtgtgacgagtgcagctacaccagtgtctaccggaaggacgtcattcggcacgccgctgtgcacagccgggaccggaagaagaggccagatccgactccaaagctgagctctttcccctgccctgtgtgtggccgtgtgtaccccatgcagaaaagactcacgcagcacatgaagacgcacagcactgagaagccccacatgtgtgacaagtgtggaaagtcctttaagaagcgctacaccttcaaaatgcacctgctcacgcacatccaggctgttgccaaccgcaggttcaagtgtgagttctgtgagtttgtttgtgaagacaagaaggcactgctgaaccaccagttgtcccacgtcagtgacaagcccttcaaatgcagcttttgtccctaccgcaccttccgagaggacttcttgctgtcccatgtggctgtcaagcacacaggggccaagcccttcgcctgtgagtactgccacttcagcacacggcacaagaagaacctgcgcctgcacgtacggtgccgacacgcaagcagcttcgaggaatgggggaggcgccaccctgaggagcccccctcccgccgtcgccccttcttctctctgcagcagattgaggagctgaagcagcagcacagtgcggcccctggaccacctcccagttccccaggacctcctgagatacccccagaggcgacaactttccagtcatctgaggctccctcattgctctgttctgacaccctgggcggcgccaccatcatctaccagcaaggagctgaggagtcgacagcgatggccacgcagacagccttggatcttctgctgaacatgagtgctcagcgggaactggggggcacagccctgcaggtggctgtggtgaagtcggaagatgtggaagcagggttagcatcccctggtgggcagccctcccctgaaggtgccactccacaggtggtcaccctccacgtggcagagccagggggcggtgcagcagccgagagccagctaggccctcctgacctaccgcagatcaccctggcacctggtccatttggtgggactggctacagtgtcatcacagcaccccctatggaggagggaacatcagctcctggcacaccttacagcgaggagcccgcaggagaggcagcccaggctgtggttgtgagtgacaccctaaaagaagctggcacccactacatcatggctactgatggtacccagttgcaccacattgagctcaccgcagatggctccatctccttcccaagtccagatgctctggcctctggtgccaaatggcccctgctgcagtgtgggggactgcccagagacggccctgagcccccatctccagccaagacccactgcgtaggggactcccagagctctgcctcctcacctcctgcaaccagcaaagccctgggcctggcagtgcccccgtcaccgccatctgcagccactgctgcatcaaagaagttttcctgcaagatctgtgccgaggccttccctggccgagctgagatggagagtcacaagcgggcccacgctgggcctggtgccttcaagtgccccgactgccccttcagtgcccgccagtggcccgaggtccgggcgcacatggcacagcactcaagcctacggccccaccagtgtagccagtgcagctttgcctccaagaacaagaaggacctgcgtcggcacatgctgactcacacaaaggagaagccttttgcatgccacctctgcgggcagcgtttcaaccgtaacgggcacctcaagttccacatccagcggctgcacagtcctgatgggaggaagtcaggaacccctacagcccgggcccctacccagaccccaacccagaccatcatcctgaacagtgatgacgaaacactggccaccctgcacactgcactccagtccagtcacggggtcctgggcccagagcggctacagcaggcactgagccaggaacacatcatcgttgcccaggaacagacagtgaccaatcaggaggaagccgcctacatccaagagatcaccacggcagatggccagaccgtacagcacctggtgacctccgacaaccaggtgcagtatatcatctcccaggatggtgtccagcacctgctcccccaggaatatgttgtggtccctgaaggccatcacatccaggtacaggagggccagatcacacacatccagtatgaacaaggagccccgttccttcaggagtcccagatccagtatgtgcctgtgtccccaggccagcagcttgtcacacaggctcaacttgaggctgcagcacactcagctgtcacagcagtggctgatgctgccatggcccaagcccagggcctgtttggtacagacgagacagtgcccgaacacattcaacagctgcagcaccagggcatcgagtacgacgtcatcaccctggccgatgactgagccccgagggcccaacacagatcatggatttgcggccagctctcctgggggtagggggccaccaggactcacctccctcttcatttaggatctccagatactggatagccagcatcctctcattcccagggagccagacctgtgctgttggggttaggggcagccatgggccccagccaggacatgctgggtgccccagcctgcaggcaggctttgggagagaaatttatttttgtttgggtggacccactggcctgtcagtctcaataaagggaccggagtccagtcctgaacagctt

SEQ ID NO: 211278 - protein, 196 aa, Artificial Sequence
  derived and/or modified sequence
MGSRSSHAAVIPDGDSIRRETGFSQASLLRLHHRFRALDRNKKGYLSRMDLQQIGALAVNPLGDRIIESFFPDGSQRVDFPGFVRVLAHFRPVEDEDTETQDPKKPEPLNSRRNKLHYAFQLYDLDRDGKISRHEMLQVLRLMVGVQVTEEQLENIADRTVQEADEDGDGAVSFVEFTKSLEKMDVEQKMSIRILK

SEQ ID NO: 211279 - DNA, 591 bp, Artificial Sequence
  derived and/or modified sequence
atgggtagcagaagcagccatgctgctgtgatcccggacggcgatagtatcagaagagagacagggttcagccaggctagtctgctgagattgcatcatcgcttccgggccctggatcggaacaaaaaaggctatctgagtcgaatggacctgcagcagataggagcgctggccgtgaatccccttggggacaggataatcgagtccttttttccagatggatctcagcgcgttgattttccgggcttcgtgagagtcctggctcattttcggcctgtcgaggatgaggacaccgaaactcaagatcctaaaaagcctgagccactcaacagccgaagaaataaattgcactacgccttccagctgtatgatctcgaccgcgatggaaagatctctcgacacgaaatgttacaggtcctgagactgatggtcggggtgcaggtgaccgaggaacaactagagaacatagcggaccggactgtgcaggaggccgatgaggacggcgacggagcggtatctttcgtggagttcaccaagtcccttgaaaagatggacgtggaacaaaaaatgtccatccgcattttgaagtag

SEQ ID NO: 211280 - DNA, 591 bp, Artificial Sequence
  derived and/or modified sequence
atgggcagccgcagcagccacgccgctgtgatcccagatggagacagcatccggcgggagaccggcttcagccaggccagcctgctgcggctgcaccaccgcttccgggccctggacaggaacaagaagggctacctgagcaggatggacctgcagcagatcggggccctggccgtgaaccccctgggggaccgcatcatcgagagcttcttcccagatggcagccagagggtggacttccctggctttgtgcgggtgctggcccacttccggcctgtggaggatgaggacacagagacccaggaccccaagaagccagagcccctgaacagcagaagaaacaagctgcactacgccttccagctgtatgacctggacagagatggcaagatcagcagacatgagatgctgcaggtgctgcggctgatggtgggcgtgcaggtgacagaggagcagctggagaacattgctgacagaacagtgcaggaggctgatgaagatggagatggagctgtgtcctttgtggagttcaccaagagcctggagaagatggatgtggagcagaagatgagcatccgcatcctgaagtag

SEQ ID NO: 211281 - DNA, 591 bp, Artificial Sequence
  derived and/or modified sequence
atgggcagccggagcagccacgccgccgtgatccccgacggcgactcaatccgtagagagaccgggttcagccaggcgagcctcctgcgactgcatcaccgctttcgagctctcgatagaaacaagaagggttacctgagccgcatggaccttcaacagatcggtgcactggcagtgaaccctttgggggataggataatagagagctttttcccggacgggtctcaaagggtggacttccccgggttcgttagggttttagcccatttcaggcccgtggaggacgaagataccgagacacaagacccaaaaaagcccgaacccctgaactcacgacgaaacaaactacattatgccttccagctgtacgacttggatagggacggtaaaatcagccggcacgagatgctgcaggtgcttcgcctgatggttggagtccaagtgaccgaagagcaactggagaatatagccgaccgaactgtacaggaggcagacgaggatggagatggtgccgtgtcctttgtcgagtttaccaaatcgctggagaaaatggatgtggaacagaaaatgtccattagaatcttgaagtag

SEQ ID NO: 211282 - DNA, 591 bp, Artificial Sequence
  derived and/or modified sequence
atgggctctcggtctagccatgctgctgtgatcccagacggcgactccatccgacgagagacaggattctcccaggcctccctgttgcgattacaccaccggtttcgggctctagatcggaacaagaaagggtacttaagccgaatggacttacagcagattggggcattggccgttaacccgctcggagatagaattattgaatccttcttccctgacggctcccagagagtggatttcccaggattcgtgcgggtgttggcacacttcagacccgtcgaggatgaagacacagaaacacaagaccccaagaaaccagagcctctcaatagccgtagaaataaattacactatgcattccaactgtatgacctggatcgggatgggaagatcagccgacatgaaatgctacaagttctgcggctgatggttggagtgcaggtgacagaggaacagctggagaatatagctgatcgaaccgtgcaagaagccgacgaggatggggatggagctgtatcatttgttgaatttacaaaaagtctggaaaagatggatgtcgagcagaagatgtcaatcaggatacttaaatag

SEQ ID NO: 211283 - DNA, 2382 bp, Artificial Sequence
  derived and/or modified sequence
caggtctcccaggcttcctcagcgtcgacgccggggagcgccctggggttgggagcgcccggggcccgcgaaggaggaggtggctcaggtgtcagggcgcaccgtgggaaccggccccgggggaggcgtggaaacgcggggcctgggactcgaccagcctctcccgtgcggatcgcaaaatctcggagctgaaacagcccgttgttcgcagcctccctctgacccgccaccctgcacattgttttccattcgcccgggtcgcgggtgggaggagaggcacgccggggttctggagcttggccgcgcgccaggcttgtggccttcgtccccctggggccactggggcggccacgcctctccggcgggaggagagaacgcgtgggtccgggtggctgctccggcccttccgcctccagctcggccatggggtcgcgcagctcccacgccgcggtcattcccgacggggacagtattcggcgagagaccggcttctcccaagccagcctgctccgcctgcaccaccggttccgggcactggacaggaataagaagggctacctgagccgcatggatctccagcagataggggcgctcgccgtgaaccccctgggagaccgaattatagaaagcttcttccccgatgggagccagcgagtggatttcccaggctttgtcagggtcttggctcattttcgccctgtagaagatgaggacacagaaacccaagaccccaagaaacctgaacctctcaacagcagaaggaacaaacttcactatgcatttcagctctatgacctggatcgcgatgggaagatctccaggcatgagatgctgcaggttctccgtctgatggttggggtacaggtgacagaagagcagctggagaacatcgctgaccgcacggtgcaggaggctgatgaagatggggatggggctgtgtccttcgtggagttcaccaagtccttagagaagatggacgttgagcaaaaaatgagcatccggatcctgaagtgactccgtttgtgccttgggcttgctcctgcaaccagtatctccttggaattcatccaaagcccccatggacgcatggacgcagggcgacaataaactgtattttcgtttctaactctatttagggccaagagaagaaagctggaaggatgtgtactaaagtctagctcagcagtccccaacctttttggcatcagggacagtttttccacggatgggtgacaggggatggttttgggatgattcaagtgcattacatttattgtgcactttatttctattatgattacattgtaatatataatgaaataattatacaactcaccataatgtagaatcagcaggagccctgagcttgttttcctgcaattagacggtcccatatgggagtgatgggagacagtgacagatcatcaggcattagattctcataaggagtgcacaatctagatcctttggtgtgcagttcacagtaggatttgggctcctatgataatctaatgccactgctgatctgacaggaggcagagctcaggcggtaatgcaagcaatggggagtggctgtaaatatagatgaagcttcagctcgcctgccgctcaccttgtgctgtgcagcccggttcctaacagaccacagaccccacaccaggtctatctcatttggtctcagagctgtgaatcagccagcaatattttagttgcaaatcactgaaaacccaactcaaagtgacttaagtcagaaagaaattttatgaattcaggtaattaaaaagtccagaagtatctgcctttaggcacagctggatccaagggcacaaatgatgtcatcaggctccagttattctccatctcccagctcagctttttctgtctgtaagcctgattttcaggaaggctctttcctagtgatggagatgaccaccatcagctccaggcttctatcctgctaacccagtaacccagtgggaagagatttacttattccaataattccaagtggagagtgtcattgacccgtttggggtctcatctctacttctaggggaatgaaacactctgagtggccaggcctgtgtcatgtgctaattcctagagccagggaaataaggtctgaggattcaggatggggtgaaaggtggttgcttaaaggaaaatgaaatacaattagcagaataaggggaaacgagtggtctgctctgctcgggcaaaacaagagatgcccattactgtgagggacccttgaagtctggactcttaaatgggtttttgctgatttcctgggtgcatgctaggatgatggggcttgatgcagtagggaagagacgatgtaaaaataataaacaatatataccttcctagagtgtgaatgca

SEQ ID NO: 211284 - DNA, 591 bp, Artificial Sequence
  derived and/or modified sequence
atgggcagcagaagcagccacgccgccgtgatccccgacggcgacagcatcagaagagagaccggcttcagccaggccagcctgctgagactgcaccacagattcagagccctggacagaaacaagaagggctacctgagcagaatggacctgcagcagatcggcgccctggccgtgaaccccctgggcgacagaatcatcgagagcttcttccccgacggcagccagagagtggacttccccggcttcgtgagagtgctggcccacttcagacccgtggaggacgaggacaccgagacccaggaccccaagaagcccgagcccctgaacagcagaagaaacaagctgcactacgccttccagctgtacgacctggacagagacggcaagatcagcagacacgagatgctgcaggtgctgagactgatggtgggcgtgcaggtgaccgaggagcagctggagaacatcgccgacagaaccgtgcaggaggccgacgaggacggcgacggcgccgtgagcttcgtggagttcaccaagagcctggagaagatggacgtggagcagaagatgagcatcagaatcctgaagtag

SEQ ID NO: 211285 - protein, 507 aa, Artificial Sequence
  derived and/or modified sequence
MPWLLSAPKLVPAVANVRGLSGCMLCSQRRYSLQPVPERRIPNRYLGQPSPFTHPHLLRPGEVTPGLSQVEYALRRHKLMSLIQKEAQGQSGTDQTVVVLSNPTYYMSNDIPYTFHQDNNFLYLCGFQEPDSILVLQSLPGKQLPSHKAILFVPRRDPSRELWDGPRSGTDGAIALTGVDEAYTLEEFQHLLPKMKAETNMVWYDWMRPSHAQLHSDYMQPLTEAKAKSKNKVRGVQQLIQRLRLIKSPAEIERMQIAGKLTSQAFIETMFTSKAPVEEAFLYAKFEFECRARGADILAYPPVVAGGNRSNTLHYVKNNQLIKDGEMVLLDGGCESSCYVSDITRTWPVNGRFTAPQAELYEAVLEIQRDCLALCFPGTSLENIYSMMLTLIGQKLKDLGIMKNIKENNAFKAARKYCPHHVGHYLGMDVHDTPDMPRSLPLQPGMVITIEPGIYIPEDDKDAPEKFRGLGVRIEDDVVVTQDSPLILSADCPKEMNDIEQICSQAS

SEQ ID NO: 211286 - protein, 278 aa, Artificial Sequence
  derived and/or modified sequence
MPWLLSAPKLVPAVANVRGLSGCMLCSQRRYSLQPVPERRIPNRYLGQPSPFTHPHLLRPGEVTPGLSQVEYALRRHKLMSLIQKEAQGQSGTDQTVVVLSNPTYYMSNDIPYTFHQDNNFLYLCGFQEPDSILVLQSLPGKQLPSHKAILFVPRRDPSRELWDGPRSGTDGAIALTGVDEAYTLEEFQHLLPKMKAETNMVWYDWMRPSHAQLHSDYMQPLTEAKAKSKNKVRGVQQLIQRLRLIKSPAEIERMQIAGKLTSQRQGFSVLSRLVSNS

SEQ ID NO: 211287 - protein, 288 aa, Artificial Sequence
  derived and/or modified sequence
MPWLLSAPKLVPAVANVRGLSGCMLCSQRRYSLQPVPERRIPNRYLGQPSPFTHPHLLRPGEVTPGLSQVEYALRRHKLMSLIQKEAQGQSGTDQTVVVLSNPTYYMSNDIPYTFHQDNNFLYLCGFQEPDSILVLQSLPGKQLPSHKAILFVPRRDPSRELWDGPRSGTDGAIALTGVDEAYTLEEFQHLLPKMKAETNMVWYDWMRPSHAQLHSDYMQPLTEAKAKSKNKVRGVQQLIQRLRLIKSPAEIERMQIAGKLTSQKSVLLARHGGSRLYSHHFGRPRLS

SEQ ID NO: 211288 - protein, 484 aa, Artificial Sequence
  derived and/or modified sequence
MLCSQRRYSLQPVPERRIPNRYLGQPSPFTHPHLLRPGEVTPGLSQVEYALRRHKLMSLIQKEAQGQSGTDQTVVVLSNPTYYMSNDIPYTFHQDNNFLYLCGFQEPDSILVLQSLPGKQLPSHKAILFVPRRDPSRELWDGPRSGTDGAIALTGVDEAYTLEEFQHLLPKMKAETNMVWYDWMRPSHAQLHSDYMQPLTEAKAKSKNKVRGVQQLIQRLRLIKSPAEIERMQIAGKLTSQAFIETMFTSKAPVEEAFLYAKFEFECRARGADILAYPPVVAGGNRSNTLHYVKNNQLIKDGEMVLLDGGCESSCYVSDITRTWPVNGRFTAPQAELYEAVLEIQRDCLALCFPGTSLENIYSMMLTLIGQKLKDLGIMKNIKENNAFKAARKYCPHHVGHYLGMDVHDTPDMPRSLPLQPGMVITIEPGIYIPEDDKDAPEKFRGLGVRIEDDVVVTQDSPLILSADCPKEMNDIEQICSQAS

SEQ ID NO: 211289 - DNA, 1524 bp, Artificial Sequence
  derived and/or modified sequence
atgccctggctgctgagcgcccccaagctggtgcccgccgtggccaacgtgagaggcctgagcggctgcatgctgtgcagccagagaagatacagcctgcagcccgtgcccgagagaagaatccccaacagatacctgggccagcccagccccttcacccacccccacctgctgagacccggcgaggtgacccccggcctgagccaggtggagtacgccctgagaagacacaagctgatgagcctgatccagaaggaggcccagggccagagcggcaccgaccagaccgtggtggtgctgagcaaccccacctactacatgagcaacgacatcccctacaccttccaccaggacaacaacttcctgtacctgtgcggcttccaggagcccgacagcatcctggtgctgcagagcctgcccggcaagcagctgcccagccacaaggccatcctgttcgtgcccagaagagaccccagcagagagctgtgggacggccccagaagcggcaccgacggcgccatcgccctgaccggcgtggacgaggcctacaccctggaggagttccagcacctgctgcccaagatgaaggccgagaccaacatggtgtggtacgactggatgagacccagccacgcccagctgcacagcgactacatgcagcccctgaccgaggccaaggccaagagcaagaacaaggtgagaggcgtgcagcagctgatccagagactgagactgatcaagagccccgccgagatcgagagaatgcagatcgccggcaagctgaccagccaggccttcatcgagaccatgttcaccagcaaggcccccgtggaggaggccttcctgtacgccaagttcgagttcgagtgcagagccagaggcgccgacatcctggcctacccccccgtggtggccggcggcaacagaagcaacaccctgcactacgtgaagaacaaccagctgatcaaggacggcgagatggtgctgctggacggcggctgcgagagcagctgctacgtgagcgacatcaccagaacctggcccgtgaacggcagattcaccgccccccaggccgagctgtacgaggccgtgctggagatccagagagactgcctggccctgtgcttccccggcaccagcctggagaacatctacagcatgatgctgaccctgatcggccagaagctgaaggacctgggcatcatgaagaacatcaaggagaacaacgccttcaaggccgccagaaagtactgcccccaccacgtgggccactacctgggcatggacgtgcacgacacccccgacatgcccagaagcctgcccctgcagcccggcatggtgatcaccatcgagcccggcatctacatccccgaggacgacaaggacgcccccgagaagttcagaggcctgggcgtgagaatcgaggacgacgtggtggtgacccaggacagccccctgatcctgagcgccgactgccccaaggagatgaacgacatcgagcagatctgcagccaggccagctag

SEQ ID NO: 211290 - DNA, 837 bp, Artificial Sequence
  derived and/or modified sequence
atgccctggctgctgagcgcccccaagctggtgcccgccgtggccaacgtgagaggcctgagcggctgcatgctgtgcagccagagaagatacagcctgcagcccgtgcccgagagaagaatccccaacagatacctgggccagcccagccccttcacccacccccacctgctgagacccggcgaggtgacccccggcctgagccaggtggagtacgccctgagaagacacaagctgatgagcctgatccagaaggaggcccagggccagagcggcaccgaccagaccgtggtggtgctgagcaaccccacctactacatgagcaacgacatcccctacaccttccaccaggacaacaacttcctgtacctgtgcggcttccaggagcccgacagcatcctggtgctgcagagcctgcccggcaagcagctgcccagccacaaggccatcctgttcgtgcccagaagagaccccagcagagagctgtgggacggccccagaagcggcaccgacggcgccatcgccctgaccggcgtggacgaggcctacaccctggaggagttccagcacctgctgcccaagatgaaggccgagaccaacatggtgtggtacgactggatgagacccagccacgcccagctgcacagcgactacatgcagcccctgaccgaggccaaggccaagagcaagaacaaggtgagaggcgtgcagcagctgatccagagactgagactgatcaagagccccgccgagatcgagagaatgcagatcgccggcaagctgaccagccagagacagggcttcagcgtgctgagcagactggtgagcaacagctag

SEQ ID NO: 211291 - DNA, 867 bp, Artificial Sequence
  derived and/or modified sequence
atgccctggctgctgagcgcccccaagctggtgcccgccgtggccaacgtgagaggcctgagcggctgcatgctgtgcagccagagaagatacagcctgcagcccgtgcccgagagaagaatccccaacagatacctgggccagcccagccccttcacccacccccacctgctgagacccggcgaggtgacccccggcctgagccaggtggagtacgccctgagaagacacaagctgatgagcctgatccagaaggaggcccagggccagagcggcaccgaccagaccgtggtggtgctgagcaaccccacctactacatgagcaacgacatcccctacaccttccaccaggacaacaacttcctgtacctgtgcggcttccaggagcccgacagcatcctggtgctgcagagcctgcccggcaagcagctgcccagccacaaggccatcctgttcgtgcccagaagagaccccagcagagagctgtgggacggccccagaagcggcaccgacggcgccatcgccctgaccggcgtggacgaggcctacaccctggaggagttccagcacctgctgcccaagatgaaggccgagaccaacatggtgtggtacgactggatgagacccagccacgcccagctgcacagcgactacatgcagcccctgaccgaggccaaggccaagagcaagaacaaggtgagaggcgtgcagcagctgatccagagactgagactgatcaagagccccgccgagatcgagagaatgcagatcgccggcaagctgaccagccagaagagcgtgctgctggccagacacggcggcagcagactgtacagccaccacttcggcagacccagactgagctag

SEQ ID NO: 211292 - DNA, 1455 bp, Artificial Sequence
  derived and/or modified sequence
atgctgtgcagccagagaagatacagcctgcagcccgtgcccgagagaagaatccccaacagatacctgggccagcccagccccttcacccacccccacctgctgagacccggcgaggtgacccccggcctgagccaggtggagtacgccctgagaagacacaagctgatgagcctgatccagaaggaggcccagggccagagcggcaccgaccagaccgtggtggtgctgagcaaccccacctactacatgagcaacgacatcccctacaccttccaccaggacaacaacttcctgtacctgtgcggcttccaggagcccgacagcatcctggtgctgcagagcctgcccggcaagcagctgcccagccacaaggccatcctgttcgtgcccagaagagaccccagcagagagctgtgggacggccccagaagcggcaccgacggcgccatcgccctgaccggcgtggacgaggcctacaccctggaggagttccagcacctgctgcccaagatgaaggccgagaccaacatggtgtggtacgactggatgagacccagccacgcccagctgcacagcgactacatgcagcccctgaccgaggccaaggccaagagcaagaacaaggtgagaggcgtgcagcagctgatccagagactgagactgatcaagagccccgccgagatcgagagaatgcagatcgccggcaagctgaccagccaggccttcatcgagaccatgttcaccagcaaggcccccgtggaggaggccttcctgtacgccaagttcgagttcgagtgcagagccagaggcgccgacatcctggcctacccccccgtggtggccggcggcaacagaagcaacaccctgcactacgtgaagaacaaccagctgatcaaggacggcgagatggtgctgctggacggcggctgcgagagcagctgctacgtgagcgacatcaccagaacctggcccgtgaacggcagattcaccgccccccaggccgagctgtacgaggccgtgctggagatccagagagactgcctggccctgtgcttccccggcaccagcctggagaacatctacagcatgatgctgaccctgatcggccagaagctgaaggacctgggcatcatgaagaacatcaaggagaacaacgccttcaaggccgccagaaagtactgcccccaccacgtgggccactacctgggcatggacgtgcacgacacccccgacatgcccagaagcctgcccctgcagcccggcatggtgatcaccatcgagcccggcatctacatccccgaggacgacaaggacgcccccgagaagttcagaggcctgggcgtgagaatcgaggacgacgtggtggtgacccaggacagccccctgatcctgagcgccgactgccccaaggagatgaacgacatcgagcagatctgcagccaggccagctag

SEQ ID NO: 211293 - DNA, 1524 bp, Artificial Sequence
  derived and/or modified sequence
atgccatggttgctttccgcccccaaattagtgccggctgtggctaacgttagaggcctgagtggctgcatgctttgttcacagcgccggtacagcctccagcccgtgcctgagagacggataccaaatcgctacctcggccagcccagtccctttactcacccacatctgctgagaccgggagaggtaaccccaggcctaagccaggttgaatatgctctgcgccggcacaagctgatgtcgctgatccagaaggaggcgcagggccagagtggcactgaccagacagtggtggtgcttagtaaccctacgtactacatgagcaacgatatcccgtacacatttcaccaagacaacaacttcctttatctgtgtggcttccaggaacctgacagcatactcgtgctgcaaagtcttccgggcaagcagttgccatctcacaaagccatactctttgttccccgcagagatccaagtcgcgagctgtgggacggacccagaagtggtaccgacggggccattgcactgaccggcgtggacgaggcgtacactctagaggagttccaacacctcctgcctaaaatgaaggctgagaccaatatggtttggtacgattggatgagacctagtcacgcccagcttcactctgattacatgcagcccctgactgaggccaaggccaagtccaagaacaaggttagaggtgttcagcagctgattcagcgcctgaggctaatcaagagcccagccgagatcgagcgaatgcagatcgccggaaaacttacatctcaggccttcattgaaaccatgttcacttccaaggcgcctgtggaggaagccttcctttatgctaaatttgaatttgaatgtagagcgcgtggagctgatattctcgcctaccctcccgttgtggccgggggaaacagatccaataccttgcattatgtgaaaaacaatcagctcatcaaggacggtgagatggtgctgctggatggcggatgcgaatcatcctgttacgtgtccgacataacacgcacatggccagtcaacggcaggttcactgccccccaagccgagctgtacgaggctgtcctggagattcaacgcgactgtttggctctttgctttcctggcacatctctggagaacatctacagcatgatgctaacccttatcggtcagaagctgaaggacttgggtatcatgaagaacattaaagaaaataatgctttcaaggccgcccgcaaatattgtccacatcatgtgggacactatcttggtatggacgttcatgataccccggatatgcctcgatcactccccttacagcccgggatggtcataactattgaacctgggatttatattcctgaagatgacaaagacgctcctgagaagtttcgtggcctcggggtgagaatcgaagatgatgtggtcgtcacccaagatagcccgctaattctgtctgccgattgcccaaaggagatgaacgacattgaacaaatttgctcacaggccagctag

SEQ ID NO: 211294 - DNA, 837 bp, Artificial Sequence
  derived and/or modified sequence
atgccatggctgcttagtgcccccaagctcgtccccgctgttgccaatgtcagaggactctctggttgtatgctgtgcagccaaagacgatactcgctgcagccggttcccgaaagacgcatccccaaccgctatctgggccagccttcacctttcactcacccccacctgctgagacccggggaagtcacccctggactgtcacaggtggaatatgctttacgccggcacaaactgatgagcctgatccagaaggaggcccaaggccaatcgggtacggatcagactgtggtggttctttccaatccgacttactacatgagcaacgatattccttatactttccatcaggacaataacttcctatacctgtgtgggttccaggaacccgatagcatcctggtccttcaaagtctgcccggaaaacagttgccatctcacaaagctattctttttgttccacgccgagacccctcccgagaactctgggacggtccgcgctcaggcactgatggtgctatagcgcttaccggtgtcgatgaagcgtacaccctggaggagttccagcacctcttacctaaaatgaaggccgaaacaaacatggtgtggtacgattggatgagaccgtctcatgcccagcttcattctgactacatgcagccgctgacagaagcaaaggccaagagcaagaataaggtgcggggggtccagcagctgatccagcggctgcgtttaattaaaagcccagcagaaattgaaagaatgcagatcgcaggcaagctgacatctcagcgccaggggttctcagtactttcacgcctggtttcaaactcctag

SEQ ID NO: 211295 - DNA, 867 bp, Artificial Sequence
  derived and/or modified sequence
atgccttggctattgtccgctccaaagctcgtaccagccgtcgctaacgtccggggactgtccggatgcatgctctgtagccagcgcaggtattcgcttcaacctgttcccgagaggcggattccgaatcgttacctggggcagccttcccctttcacacatcctcacctgcttagaccgggggaggtgacacctggcctatcccaggtggaatacgcactgcggcgccataagctcatgtccctgatacagaaggaggcgcagggtcagagcgggactgaccagactgtcgtcgtgctttccaatccaacctattacatgagcaacgatatcccctatacattccaccaagacaataattttctgtacctgtgcggttttcaggagcccgacagcatcctggtgctgcagagcttgcctggcaaacaactgcctagccataaagccatcctcttcgttccaagaagagacccatcacgcgaactgtgggatggcccaagaagcgggacagatggggctatcgcgctgacaggagttgacgaggcatacactctggaggagtttcagcacctgctacccaagatgaaagccgagaccaatatggtttggtacgattggatgcgcccctcccacgctcagctccattccgactacatgcagccactcacagaggcaaaggccaaatccaagaataaagtacggggcgtccagcaactcattcagaggttacgacttatcaaatcccctgctgagatcgaacgcatgcaaattgcaggaaagctaacatctcaaaaaagcgtgctgttggctcgccacggcggctcacgcctgtattctcaccacttcggccgccccaggctgtcctag

SEQ ID NO: 211296 - DNA, 1455 bp, Artificial Sequence
  derived and/or modified sequence
atgctgtgctcccagcgcaggtatagtctgcagcctgtgcccgagcggagaatacctaatcggtacctcggacagccatccccattcacccaccctcatctgctgcgccccggggaggtgactcccggtctatcccaagtggaatatgccctgcgacgccataagctgatgagtctgatccagaaggaggcacaaggtcagtccggcaccgaccagacagtggtcgttctctctaatccaacatattatatgtcaaacgatattccttatactttccatcaggataataacttcctttatctctgtggttttcaggaacccgacagtatcctggttctccagtctctgcccgggaagcaactcccgtcgcacaaggctatactgtttgtcccccgcagggacccatctcgggagctgtgggacggtccccggtctggaacagacggcgctatcgcactgaccggagtagacgaagcttacacactggaagaatttcagcatctacttccaaaaatgaaggctgaaaccaatatggtgtggtacgactggatgcgcccaagccatgcacagctgcattcagactacatgcagccacttacagaggctaaagcaaaatcgaaaaacaaggtgaggggggtgcaacagttgattcagcggctgcggctgatcaagtccccagcagagatcgagcggatgcagattgcagggaagctcacttcccaggcttttatcgagacaatgtttacctctaaagccccagttgaggaggcctttctgtacgcaaagttcgaattcgaatgtcgtgcccgcggcgcggacatattagcctaccccccggtcgtcgccgggggcaaccggtccaacaccctgcattatgtgaaaaacaatcaactgatcaaggatggggagatggtgcttctggatggaggatgcgaaagctcttgttacgtctccgacattaccagaacctggcctgtaaacgggagatttactgcaccacaagccgaactttacgaagccgtcctggagatccaacgcgactgcctcgccttatgcttcccaggcacaagccttgagaacatctattctatgatgctgacactaataggccagaaactgaaggatctgggaattatgaagaacattaaggagaataacgccttcaaagcggctagaaaatattgcccacaccacgtcggtcactatctggggatggacgtccacgatacccccgacatgcccagatccctgccactgcagcccggaatggtgattactattgagcctggtatctacattccagaggacgataaggatgctccggagaagttcaggggattgggcgttaggattgaggatgacgtggtggtgactcaggacagcccacttatactgtccgccgattgccctaaggagatgaatgacatcgagcagatttgttcccaggcgagctag

SEQ ID NO: 211297 - DNA, 1524 bp, Artificial Sequence
  derived and/or modified sequence
atgccctggctgctgagcgcccccaagctggtgcctgctgtggccaacgtgcggggcctgagcggctgcatgctgtgcagccagaggcgctacagcctgcagcctgtgcctgagcggcgcatccccaaccgctacctgggccagcccagccccttcacccacccccacctgctgcggcctggagaggtgaccccaggcctgagccaggtggagtatgccctgcggcggcacaagctgatgagcctcatccagaaggaggcccagggccagagcggcacagaccagacagtggtggtgctgagcaaccccacctactacatgagcaatgacatcccctacaccttccaccaggacaacaacttcctgtacctgtgtggcttccaggagccagacagcatcctggtgctgcagagcctgcccgggaagcagctgcccagccacaaggccatcctgtttgtgccccggcgggaccccagccgggagctgtgggatggccccaggagcggcacagatggagccatcgccctgactggagtggatgaggcctacaccctggaggagttccagcacctgctgcccaagatgaaggccgagaccaacatggtgtggtatgactggatgaggcccagccacgcccagctgcacagcgactacatgcagcccctgacagaggccaaggccaagagcaagaacaaggtgcggggcgtgcagcagctgatccagaggctgcggctcatcaagagccctgctgagattgaaagaatgcagattgctgggaagctgaccagccaggccttcatcgagaccatgttcaccagcaaggcccctgtggaggaggccttcctgtatgccaagtttgaatttgaatgtcgggcccggggagctgacatcctggcctacccacctgtggtggccggcggcaacagaagcaacaccctgcactacgtgaagaacaaccagctgatcaaggatggagagatggtgctgctggatggcggctgtgagagcagctgctacgtgtctgacatcaccaggacctggcctgtgaatggccgcttcaccgccccccaggccgagctgtatgaagctgtgctggagatccagagggactgcctggccctgtgcttccctggcaccagcctggagaacatctacagcatgatgctgaccctcatcggccagaagctgaaggacctgggcatcatgaagaacatcaaggaaaataatgccttcaaggccgccaggaagtactgcccccaccacgtgggccactacctgggcatggatgtgcatgacaccccagacatgcccaggagcctgcccctgcagcccggcatggtgatcaccatcgagcccggcatctacatcccagaagatgacaaggatgcccctgagaagttccggggcctgggcgtgagaattgaagatgatgtggtggtgacccaggacagccccctcatcctgtctgctgactgccccaaggagatgaatgacatcgagcagatctgcagccaggccagctag

SEQ ID NO: 211298 - DNA, 837 bp, Artificial Sequence
  derived and/or modified sequence
atgccctggctgctgagcgcccccaagctggtgcctgctgtggccaacgtgcggggcctgagcggctgcatgctgtgcagccagaggcgctacagcctgcagcctgtgcctgagcggcgcatccccaaccgctacctgggccagcccagccccttcacccacccccacctgctgcggcctggagaggtgaccccaggcctgagccaggtggagtatgccctgcggcggcacaagctgatgagcctcatccagaaggaggcccagggccagagcggcacagaccagacagtggtggtgctgagcaaccccacctactacatgagcaatgacatcccctacaccttccaccaggacaacaacttcctgtacctgtgtggcttccaggagccagacagcatcctggtgctgcagagcctgcccgggaagcagctgcccagccacaaggccatcctgtttgtgccccggcgggaccccagccgggagctgtgggatggccccaggagcggcacagatggagccatcgccctgactggagtggatgaggcctacaccctggaggagttccagcacctgctgcccaagatgaaggccgagaccaacatggtgtggtatgactggatgaggcccagccacgcccagctgcacagcgactacatgcagcccctgacagaggccaaggccaagagcaagaacaaggtgcggggcgtgcagcagctgatccagaggctgcggctcatcaagagccctgctgagattgaaagaatgcagattgctgggaagctgaccagccagaggcagggcttctctgtgctgagccggctggtgagcaacagctag

SEQ ID NO: 211299 - DNA, 867 bp, Artificial Sequence
  derived and/or modified sequence
atgccctggctgctgagcgcccccaagctggtgcctgctgtggccaacgtgcggggcctgagcggctgcatgctgtgcagccagaggcgctacagcctgcagcctgtgcctgagcggcgcatccccaaccgctacctgggccagcccagccccttcacccacccccacctgctgcggcctggagaggtgaccccaggcctgagccaggtggagtatgccctgcggcggcacaagctgatgagcctcatccagaaggaggcccagggccagagcggcacagaccagacagtggtggtgctgagcaaccccacctactacatgagcaatgacatcccctacaccttccaccaggacaacaacttcctgtacctgtgtggcttccaggagccagacagcatcctggtgctgcagagcctgcccgggaagcagctgcccagccacaaggccatcctgtttgtgccccggcgggaccccagccgggagctgtgggatggccccaggagcggcacagatggagccatcgccctgactggagtggatgaggcctacaccctggaggagttccagcacctgctgcccaagatgaaggccgagaccaacatggtgtggtatgactggatgaggcccagccacgcccagctgcacagcgactacatgcagcccctgacagaggccaaggccaagagcaagaacaaggtgcggggcgtgcagcagctgatccagaggctgcggctcatcaagagccctgctgagattgaaagaatgcagattgctgggaagctgaccagccagaagtctgtgctgctggcccggcacggcggcagccggctgtacagccaccacttcggccggccccggctgtcctag

SEQ ID NO: 211300 - DNA, 1455 bp, Artificial Sequence
  derived and/or modified sequence
atgctgtgcagccagaggcgctacagcctgcagcctgtgcctgagcggcgcatccccaaccgctacctgggccagcccagccccttcacccacccccacctgctgcggcctggagaggtgaccccaggcctgagccaggtggagtatgccctgcggcggcacaagctgatgagcctcatccagaaggaggcccagggccagagcggcacagaccagacagtggtggtgctgagcaaccccacctactacatgagcaatgacatcccctacaccttccaccaggacaacaacttcctgtacctgtgtggcttccaggagccagacagcatcctggtgctgcagagcctgcccgggaagcagctgcccagccacaaggccatcctgtttgtgccccggcgggaccccagccgggagctgtgggatggccccaggtctggaacagatggagccatcgccctgactggagtggatgaggcctacaccctggaggagttccagcacctgctgcccaagatgaaggccgagaccaacatggtgtggtatgactggatgaggcccagccacgcccagctgcacagcgactacatgcagcccctgacagaggccaaggccaagagcaagaacaaggtgcggggcgtgcagcagctgatccagaggctgcggctcatcaagagccctgctgagattgaaagaatgcagattgctgggaagctgaccagccaggccttcatcgagaccatgttcaccagcaaggcccctgtggaggaggccttcctgtatgccaagtttgaatttgagtgccgggcccggggagctgacatcctggcctacccacctgtggtggccggcggcaacagaagcaacaccctgcactacgtgaagaacaaccagctgatcaaggatggagagatggtgctgctggatggcggctgtgagagcagctgctacgtgtctgacatcaccaggacctggcctgtgaatggccgcttcaccgccccccaggccgagctgtatgaggccgtgctggagatccagagggactgcctggccctgtgcttccctggcaccagcctggagaacatctacagcatgatgctgaccctgattggccagaagctgaaggacctgggcatcatgaagaacatcaaggagaacaatgccttcaaggccgccaggaagtactgcccccaccacgtgggccactacctgggcatggatgtgcatgacaccccagacatgcccaggagcctgcccctgcagcccggcatggtgatcaccatcgagcccggcatctacatcccagaagatgacaaggatgcccctgagaagttccggggcctgggcgtgagaattgaagatgatgtggtggtgacccaggacagccccctcatcctgtctgctgactgccccaaggagatgaatgacatcgagcagatctgcagccaggccagctag

SEQ ID NO: 211301 - DNA, 1524 bp, Artificial Sequence
  derived and/or modified sequence
atgccctggctgctgagcgcccccaagctggtgcccgccgtggccaatgtcagaggactttctggttgcatgctgtgctcccagcgccgctactccctccagccggttcctgagagaagaattcctaatagatatctgggccagccctcacccttcactcatccccatctgttgcgaccgggtgaggtgacccccgggctatcccaggtggagtacgctcttcgacggcacaagctaatgtcactcatccaaaaggaggcgcaggggcagtccggaaccgatcaaacagtcgtggtgctctcgaatcctacttattacatgtctaacgatatcccatacacatttcatcaggataataatttcttgtatctgtgtggatttcaggagccagactctatcctggtcctgcagtccctgcccggaaaacagctccctagtcataaggccatcttatttgtgccacggcgggatccgtccagagaactttgggatggcccaaggtccggaacagacggcgccattgcattgacgggtgtcgatgaggcatacactctcgaggaatttcagcatcttctccctaagatgaaggctgagactaacatggtgtggtatgattggatgagaccatcccatgcacagctacattccgattacatgcagccgcttacagaagctaaggccaaatccaagaataaagttcggggcgttcagcagctcatacagagactgcgcttgatcaaatcaccagcggagattgaacgcatgcagatcgcaggaaagctcacgtctcaagctttcatagagaccatgttcacctctaaagcacctgtcgaggaggcctttttgtatgccaagttcgagttcgagtgtcgggcccgaggagctgatatcctggcctatccaccagtggtagcaggaggtaaccgctccaataccctacactacgtgaagaacaatcagcttatcaaggacggggagatggtcttgctcgacggcggttgtgaaagcagctgctatgtttcagatataacacgtacttggcccgttaatggaaggttcaccgctccccaggctgagctgtacgaggcagtcctggagatccagcgcgattgcctcgccctgtgttttcccggcactagcctggagaatatctatagcatgatgctgactctgatcggtcagaaactgaaagatctgggcattatgaagaacatcaaggagaataacgctttcaaagcggctagaaagtactgcccccatcacgttggtcactacctggggatggacgtgcacgatactcccgacatgccccgttccctgccacttcagccaggaatggtcatcaccatagagcctggcatatatatccccgaagatgataaagatgcgcccgaaaagtttaggggtctcggcgtgagaattgaggacgacgttgtcgtaacacaggattcccctctgatattaagtgcagattgtcctaaagaaatgaacgacattgaacagatctgcagtcaggcatcttag

SEQ ID NO: 211302 - DNA, 837 bp, Artificial Sequence
  derived and/or modified sequence
atgccctggctgctgagcgcccccaagctggtgcccgccgtggccaacgtgagggggctcagcggctgcatgctgtgtagccagcggaggtattcactccagcctgtgcctgagcgaagaatccccaatcggtacctcggccagccctctccttttacacaccctcatttattaagaccaggcgaggtaactcctggcctttctcaggttgagtacgccctgaggcggcataaactgatgtccctgattcagaaggaggcacaggggcagagcgggaccgatcagacggtagtggttctaagtaacccaacgtattatatgagcaatgacatcccttacacatttcaccaagacaataactttctctacctttgcggattccaggaacctgactctattctcgttcttcagtccctgcccggcaaacagcttccttcccataaagcaatcctgttcgtgcccagacgagatccaagcagagagctgtgggacggtccccgtagcgggaccgatggtgccatcgcgttaaccggtgtcgacgaggcctacacactggaggagttccaacatttgctgcctaagatgaaagccgagaccaacatggtatggtatgattggatgaggccctcacacgcccagttgcacagcgattatatgcagccactgaccgaagcaaaggccaaatctaagaacaaagtgcgcggggtgcagcagttgatccagcgacttaggctgattaagtcaccagcggagattgaaagaatgcagatcgcaggaaagttgacgtcacagagacagggctttagcgtgttgtcgcggctggtgtcaaactcatag

SEQ ID NO: 211303 - DNA, 867 bp, Artificial Sequence
  derived and/or modified sequence
atgccctggctgctgagcgcccccaagctggtgcccgccgtggccaatgtgcggggattgtccggatgcatgctgtgctctcagaggcgatacagcctgcagcccgtgccggagcgtagaatcccaaaccgttacctcgggcagccttctccctttacacatcctcacctgttgcgccccggcgaggtcactcccggtttgagccaggttgaatacgcacttcggcgtcataagcttatgagcttgattcaaaaagaagctcaaggccaatccgggacagatcagactgtggtggtgctgagcaaccctacatactacatgtccaatgatatcccctacacgttccaccaggataacaattttctgtatttgtgtgggtttcaagagcctgattcgatcctggttttgcagtctcttccaggcaagcagcttccaagccacaaggcaatcctgtttgttccacgtcgcgacccatctcgcgagctgtgggacgggcctaggtcgggtaccgatggagccattgccctcactggggtggacgaggcctacaccctagaagagtttcagcacctactacctaaaatgaaggccgagacgaacatggtgtggtacgactggatgcggcccagccacgcccagttacatagcgactacatgcagcccctgacggaagcaaaggctaaatctaagaacaaagtccggggcgtccaacagttgattcaaaggttgcgcctgataaagagtcctgcagagattgagcggatgcagattgctggcaaactcacctcccagaagtccgtccttctggctcgccatggcggatccagactctactcacatcattttggccggccaaggctcagttag

SEQ ID NO: 211304 - DNA, 1455 bp, Artificial Sequence
  derived and/or modified sequence
atgctgtgcagccagcggcggtacagcctgcagcccgtgcccgagcggcgaattccaaaccgatacttgggccagccatcacccttcacgcaccctcacttattacggcctggggaagtcactcccggcctcagccaggttgagtatgcacttaggcggcacaagctcatgtccctcatccagaaggaggcacagggccagagtggcaccgatcagaccgttgtagtcttgtccaatcccacatattatatgagcaacgacataccatataccttccaccaggataacaacttcctgtacctgtgcggctttcaggagcccgattctatcctagttcttcagagtttacctggcaagcagcttccctctcataaagcgattctgttcgtcccacggcgggatccttctcgcgagttgtgggatggaccgcgcagcggcactgacggtgctatcgcgctaacaggagtagatgaagcatataccttagaggagttccagcatttattgcccaagatgaaggccgaaaccaatatggtttggtatgattggatgagaccatctcacgcacaactccactctgattacatgcagcccctcaccgaggctaaggctaaaagcaaaaacaaggttcggggagttcagcagctgattcagaggcttcgactgattaagtctcctgcagagattgaaagaatgcaaatcgcaggaaagctgacatcacaggcattcattgagactatgtttaccagcaaggctcctgtggaggaggctttcttatacgcaaagtttgaattcgagtgtcgtgcaaggggagcagacatccttgcttaccctcctgtggtcgctggaggaaatcggtctaacactttgcattacgtgaaaaacaaccaactcatcaaggatggagaaatggtcctgttagacgggggatgcgagtccagctgttatgttagtgacattaccagaacctggccagtgaatggccggttcactgctccacaggcagaattgtatgaagctgtactggagatccagcgagattgcctcgcactgtgctttcctggtacttccctggaaaacatctactccatgatgctcacgttgatagggcagaaactgaaggacctgggaattatgaagaacattaaagagaacaacgcctttaaggccgcgagaaagtattgcccccatcacgtcggccactacctgggtatggacgtccatgatacccccgatatgccacgtagtcttcctctacaacccggaatggtgatcacaatcgagcctgggatatacataccagaggacgataaagacgcccccgaaaaattcagagggctaggagtgagaatcgaagacgatgttgtcgttactcaggactcgccactgatcctctcagcggattgtcccaaggagatgaacgacattgagcagatatgcagccaggcttcgtag

SEQ ID NO: 211305 - DNA, 1524 bp, Artificial Sequence
  derived and/or modified sequence
atgccctggcttctgtccgccccaaaactcgtgcccgcagtcgctaatgtgcggggactgtcgggttgcatgctttgctctcagcgcagatattcactccagcctgtccccgaacggaggatccctaataggtacctcggccagcccagtcccttcacccatccccatctgctgagaccgggagaggtgactcccggactgagtcaggtggagtacgctctacggcgtcataaactgatgtccctcatccaaaaagaagctcaggggcagagcgggacggatcaaactgtagttgtgctcagcaaccctacatactatatgtcaaatgacattccctacacctttcatcaggacaataatttcctttacctgtgcgggttccaggagcccgatagcattttggtacttcagtcattaccaggtaagcagctcccaagccataaggcaatcctcttcgtcccaaggcgagacccttccagagaactgtgggacggcccacgctccgggaccgatggagcaattgctctcactggtgtagatgaagcatacacactggaggaatttcagcacttactccctaagatgaaagccgaaacgaatatggtttggtatgactggatgcggcctagccatgcacagcttcactccgactatatgcagccgctgaccgaggccaaggctaaaagtaagaataaggtacggggtgttcagcagctcatccagcgcctccgcctgatcaaaagtcctgcagagatcgagagaatgcagattgcaggcaagctgaccagccaggcttttatagagacaatgtttacctctaaagccccagtagaggaggcttttctgtacgctaaatttgagtttgagtgcagagcacgcggagcagatatcctggcctatccgcctgttgtagccggaggcaacagaagcaacaccctgcactacgtgaagaacaatcagctgattaaggatggagagatggtgctgctggatggcggatgcgagagctcttgctatgtttccgatattacccggacgtggcccgtaaatgggagattcactgcccctcaggcagagttgtatgaagccgtactggaaatacaaagggattgcctagccctgtgcttcccaggcaccagcctcgagaatatctactccatgatgctgacactgattggccagaaactcaaggatctgggtattatgaaaaatatcaaagaaaacaatgcattcaaagcagcccgaaagtattgccctcaccacgtgggacactatttaggcatggacgttcacgatacaccagacatgcctagaagcttgcccctccagcctggaatggttatcacaattgagccaggcatttacattcccgaagatgacaaagatgctcccgaaaaattcagaggcctaggggtgagaatagaggacgatgtggtggtcacccaggactcccctctgatattgagcgctgattgtcctaaggagatgaacgacattgaacagatttgctcccaagcttcttag

SEQ ID NO: 211306 - DNA, 837 bp, Artificial Sequence
  derived and/or modified sequence
atgccctggttgttgtccgcccctaagctggtgcctgcagtggccaatgtgcgcggactgtccggatgtatgctctgctcccagagacgatattccctccaacccgtgccagagaggcggatacccaaccgttatttagggcagccctcacctttcacccatccccacctgctgaggcccggagaggtgacacctggcctatcacaggtggagtacgctctgaggagacacaaactgatgtccctgattcagaaggaggcccagggacaatctgggacagatcagactgtggtggtactctccaatcctacatattatatgtcgaacgacattccatataccttccaccaggacaataactttctgtacctctgcggctttcaggagcccgattccatactggtgctgcagtctctccccggaaaacagctgccctcccataaggccatcttgttcgtgccaagacgggacccctcgcgtgaactgtgggacgggcctagatccggcacggacggtgctatcgctttgactggagtggatgaagcgtatacccttgaggagtttcaacatttgctgccaaaaatgaaagccgagaccaacatggtctggtatgactggatgcgcccaagccacgcacaacttcattccgattacatgcagccactgaccgaggctaaggccaagagcaagaacaaggtgcggggagtgcaacagttgattcaacggctgagacttatcaaaagtccagcagagattgagaggatgcagattgccggaaagctgaccagtcaacgccagggctttagcgtgctttcacggctggtttccaactcctag

SEQ ID NO: 211307 - DNA, 867 bp, Artificial Sequence
  derived and/or modified sequence
atgccatggctgctcagtgctccaaaactggtgcctgctgttgcaaacgtgagagggttgagcggatgtatgctgtgttctcaacggcgttattccctgcaaccagtcccagagagaagaatccccaaccgttaccttggccagccaagccccttcacccacccacatttgctgaggccaggtgaagtgacaccaggcttaagccaggtcgagtatgcactgaggaggcataaactgatgtcgctgatccaaaaagaagcgcaggggcaaagtggtacagatcagactgttgtcgtgctctctaacccaacttattatatgtctaacgatatcccatacacatttcatcaggataacaatttcctgtacctatgtggtttccaggagccagattctatacttgtgcttcagtcactccccggaaagcagctgcccagccacaaggctatcctattcgtgcccaggcgggacccatctcgcgaattatgggatggcccaaggagcggaaccgatggcgctattgctctgaccggagtggatgaggcctacaccctggaggaattccagcatcttctaccaaagatgaaggccgagactaatatggtgtggtacgattggatgaggccaagccatgcacagcttcatagtgactacatgcaacctctgaccgaggccaaggctaagagcaagaacaaggttagaggtgtgcaacaattaatccagcgacttcgcctcatcaagtcacccgcagagatcgaacggatgcagatcgccggtaagctcacgagccagaagtccgttctgttagccagacacgggggttcacgcctctattcgcaccactttgggagacccaggctgagttag

SEQ ID NO: 211308 - DNA, 1455 bp, Artificial Sequence
  derived and/or modified sequence
atgctttgctctcagcgcaggtactccctccagccagtgccagagaggcgaattccaaatcggtacttagggcagccgagcccttttactcaccctcacctgctgcggcctggggaagtcacacctgggcttagccaagtggaatatgcactgcggagacataaactgatgtccctgatccagaaagaggcccaaggacaatctggcacagatcagaccgtcgtggtgctgtcgaatccgacatactacatgagcaacgacatcccatatactttccaccaggataataacttcttgtacctgtgtggcttccaggagcccgacagcatcttggtgctgcagagcctgcccggaaaacagctgccatctcacaaagctatcctcttcgtgcctcgccgagacccttccagggaactgtgggatggcccaaggagtggaaccgatggcgctatcgctctcactggggttgacgaggcttatacgctggaagagttccagcacctgcttcccaaaatgaaagctgaaaccaacatggtttggtacgactggatgcgacctagtcatgcccagctccacagcgattatatgcagcccctcaccgaggcaaaagcgaaaagtaagaacaaggttcgcggtgttcagcagctcatacagcgcctgagattgattaaaagtccagcagaaatcgagcggatgcaaattgcaggcaaactcacctcccaggctttcattgagactatgtttacctctaaggcgcctgtcgaagaggctttcctgtacgctaaatttgagtttgagtgcagagctagaggagccgacattcttgcctacccccctgtcgttgccggtggaaaccggtccaatacattgcattacgtcaaaaataatcaactaatcaaggacggagagatggtgctcctggatgggggttgcgaatctagttgctacgtaagcgacatcacacgaacgtggccagtgaacggccgttttactgccccacaggccgagctctacgaggccgtcctcgagattcaacgggattgtcttgccttgtgctttccaggcacttcccttgaaaacatttactccatgatgctgacccttattggtcagaagctgaaggatctgggaataatgaagaacatcaaggaaaacaacgcattcaaagccgcaagaaaatattgtccgcaccatgttggccattacctgggcatggatgtgcacgataccccagatatgcccagatccctgcctctgcagcctgggatggtcatcaccatagaacctggaatctatatcccggaagacgacaaagacgcgcctgaaaaatttcgtggacttggagtcaggatcgaggacgatgtggtagtcacccaagatagccccctcatcctgtctgcagattgcccaaaagagatgaatgacatcgaacagatctgcagccaagcgtcatag

SEQ ID NO: 211309 - DNA, 7988 bp, Artificial Sequence
  derived and/or modified sequence
ggtttcctggcgacgcggccctgcaggcggttgcgttccccgtcgttaccctctttctcttcccgacgcgtgagttaggccgtaatgccttggctgctctcagcccccaagctggttcccgctgtagcaaacgtccgcggcctctcaggatgtatgttgtgttcacagcgaaggtactcccttcagcctgtcccagaaaggaggattccaaaccgatacttaggccagcccagcccctttacacacccacacctcctcagaccaggggaggtaactccaggactatctcaggtggaatatgcacttcgcagacacaaactaatgtctctgatccagaaggaagctcaagggcagagtgggacagaccagacagtggttgtgctctccaaccctacatactacatgagcaacgatattccctatactttccaccaagacaacaatttcctgtacctatgtggattccaagagcctgatagcattcttgtccttcagagcctccctggcaaacaattaccatcacacaaagccatactttttgtgcctcggcgagatcccagtcgagaactttgggatggtccgcgatctggcactgatggagcaatagctctaactggagtagacgaagcctatacgctagaagaatttcaacatcttctaccaaaaatgaaagctgagacgaacatggtttggtatgactggatgaggccctcacatgcacagcttcactctgactatatgcagcccctgactgaggccaaagccaagagcaagaacaaggttcggggtgttcagcagctgatacagcgcctccggctgatcaagtctcctgcagaaattgaacgaatgcagattgctgggaagctgacatcacaggctttcatagaaaccatgttcaccagtaaagcccctgtggaagaagcctttctttatgctaagtttgaatttgaatgccgggctcgtggcgcagacattttagcctatccacctgtggtggctggtggtaatcggtcaaacactttgcactatgtgaaaaataatcaactcatcaaggatggggaaatggtgcttctggatggaggttgtgagtcttcctgctatgtgagtgacatcacacgtacgtggccagtcaatggcaggttcaccgcacctcaggcagaactctatgaagccgttctagagatccaaagagattgtttggccctctgcttccctgggacaagcttggagaacatctacagcatgatgctgaccctgataggacagaagcttaaagacttggggatcatgaagaacattaaggaaaataatgccttcaaggctgctcgaaaatactgtcctcatcatgttggccactacctcgggatggatgtccatgacactccagacatgccccgttccctccctctgcagcctgggatggtaatcacaattgagcccggcatttatattccagaggatgacaaagatgccccagagaagtttcggggtcttggtgtacgaattgaggatgatgtagtggtgactcaggactcacctctcatcctttctgcagactgtcccaaagagatgaatgacattgaacagatatgcagccaggcttcttgaccttcactgcggcccacatgcacctcaggttcaaaatgggtgtcttctggcagccctgcacgtgtgctttctgagtgtctctgtgtgtgcattaatatatgcattccatttgggagcatagcagctgtgtgaatgtatgtaattgtgtgtggggggttttttgttttaagtagttagaagtctgggaaaatgaatttttgaatagtatgttactgcagctttggtaacattaattctatagaattaatgatcagagcaagtttaatttttaaacataaaggtcttggttacacatgtccatgcattccagttaacacatttaaacatatagaaaattcacttcttctttcaagtccttccctttctatacttttgctgagatcaacccaatatcataagaagtttgtgtgatgcctgtatttttagctaattaccaaggtctctgcctatgcaaaaattcatctttcggtgattgtgggcggccaatacataccttctgtaactcctccctacctattctagatcctgcatatctactggagccatatgagccctcaggggcactggtgtcctgcagtcttactagtcagccacagtccaggttccagcaacactagctacctaccaaacaaaacacttctgagcttttcttgccatttggttgcctgggacctggaaagtgtttagattcttgataaagatggaaatggaagagaaagaaaattatatatgtatatactaaagatccagacatcagggctgggcacagcggttccgcctgtaatcccagcactttgggaggtccaggcaggtggatctcttgagaccaggaggtcaagaccagcctggccaacgtggtgaaacactgtctctactaaaaatacaaaaatgagctgggtgtgatgatacatgcctgtaatcctggctacttgggaggctgaggcatgagaattgcttgaacctgggaggtggaggttgcagtgagctgagctcatgcgactgcactccagcctgggtgactgagcaagactctgcctcaaaaaaacaaataaataaataaaatcctgacatcctgccatcttttctcttcaatttaaagttgatttcttaatgatgacttcaaaaattaataaaaagaaaagaaaaaaatgatttctggccgggcgtggtggctcaagcctgtaatcccagcactttgggaggccgaggtgggcggatcacgaggtcaggagattgagacctcctggctaacacggtgaaaccccgtctttactaaaaatacaaaaaaaattagctgggcgtggtggcggatgcctgtagtcccagctactcaggaggctgaggcaggagaatggcgtgaacccagaaggcagagcttgcagtgagccaagatcgcgccactgcactccagcctgggtgacagagcgagactccgtctcaaaaaaaaaaaaaaaaaagaaaaaaaaaagaaagatttctttcgcagatatccctgctccctctatagattcttaatgcactgaccctcacaggttacccttttagctgttgtgctgcgcaggagcagatcctctacttacgtaccctgtcagagtcacagtagtagcgcccagttttcagagaagtacccctgttatcattctgtgatttcctctagtgctaatagaaacaaaatatggaatctaccaagtacccgtaaatatcctatgattcttatctttctttgatactagcactgggagtgcagtggtaaagagtcatacttcttttttttttttttttttggagacagagtctcgctctgtcgcctgggctggatggagtgcagtggcgtaatctcagctcactacaacctccaccacctgggttcaggcaattctcctgcctcagcctcccaagtaactgggactacaggtgcacgctgccatgcccagctaattttttgtattttagtagagacagggtttcaccctgttgcccaggccggtctcaaactcctgagctccggcaatccgcccacctcagcctcccaaagtgctaggattacaggcatgagccactgcgcccggtgtaagagtcatatttttttaaacacaaacattggatacaattatacagcaactcagtttgcaagatgaacagggctagattaccacagatagcttatttaggagcgtctgtgatagagggaagctttaagaaccagtgtgttcacctcctttaaacctggatatgaggtcaagatgtataaaacatgccaattgttagaacacaaatttgagggtttcttaaaaaaacaatttgtattagggaagcacaagctaggggattaacaatctctgtaatgctggaagtttgcctatcttatcagggaaacccagggtacagagtgaaaagcagacaggcagtgacttcctcaagagacagataatgtgaaaacaaaagtgatacaaatcatatcctgacagtgctagcctaggaatgcctggctttgcgcaccttatctaagcagctctcagaatggaggctgcacagctggagtctccatcccccatacccaccttcccacctccctccaatttctcaatccagagctttttaaaaaaaggggagggaaataactccacagctctggctgctcacttcccaggctctgtgcccccaacagccctttccttggattgtgtttcctttgttcatttgtaatccaggaataaggaatttccttttcttcttgtatcattttcttttcttttctttttttttttttttttgagacggagtctcacactgtcaccggggctggtgtgcaatagcgagacctcagctccctgcaacctccatctcccaggttcaagcgattctcctgcctcagcctcccgaatagctaggaatacaggcgcctgccaccacacccggctatttttttgtattttaaatagagacgaggtttcactgtgttggccaggctggtctcgaactcctgacctcatgatctgcccgcctcggcctccctaagtgctgcgattacagacgtgagccaccgcacctcctgtatcattttctatggtctaaacttttctagctaaaagcctaggtagcttgtatgtatagcagcatacttggacatgaaacacacttctggttagattccagtcaagttctataggtgttattggtaggcagaaaggctgttgtagaattcttctggtgattttcagtccctgacccaggtatattgtcctttgagtcccagattaactaactatagcagctaagcatttgaatcagacttctcatagcaatgttatgggctgtctgatatattcaggatttgttgagcagataagctgtgtgtgatcttactcattctcagccatgccgcagacatacccatttccctttagtaattttttaatacagagaatgctattaactgttactggatatcaaataattttatttttctaatagtattttccaaatatttcttaaaattcttaaaatttaggttaaagtttgctggtctcttacatttaataaagctgggacttgaagacttaccatagttttcaactgcctttgcaagttcataaacttctaagggtaaaaagtgaataagataaattcagagttttaaggtaaaggctttatattagctttttttttttttaaaggttttttgtggggtttttttgttttttttttttttgagatggagtctcgctctgtcacccaggctggagtgcagtggcacgatcttggctcactgcaacctccatctcccgggttcaggcaattcttctgcctcagcctcctgagtagctgggactacaggcgcgtgccaccatgcccggctagtttattgtatttttagtagagatggggttttactgtgttagccaggatggtctcaatctcctgacctcataatctgcccacctcagcctcccaaagtgctgggattacaggcgtgagccactgcacccagcctttttaaagtttttaattgacatataattgtacgtatttacagggtaaataatgatgttttgatacatatataatgatcagatcagaacaattagcatatccatcacattgaacatttatcatttatttgtgttgagcctttagttcttttttttttttgagatagagtctcactctgtcacccaggctggagtacagtggtgtgatcttggctcactgcaacctccacccaccggcttcaaccaattctcctgcctcagcctccctagtaactgggattacaggcacctgccaccacacccaatttttgtatttttagtagagacggggtttcaccatcttggccaggccaggctggtcttgatctcctgaccttgtgatccacccacctcagcttcccaaactgctgggattacaggcatgagccacggcccccagccagagacagtcttgctttgtcgccaggctggagtgtagtggcgccatcttggctcactgcaacctccaactccctggttcaagcagttctcctgcctcagcctcccaagtagctgggattacaggcacgcaccaccatgcccagctaatttttgtatttttagtagagacagggtttcaccatgttggccaggatggtcttgatctcctgacctcgtgatctgcccactttggcctcccaaagtgctgggattacaggtgtgagccaccgtgcccagccgagcctttagttctaagtataataaataatatatataccaggcattcctattaaaaatcttaacttaaaaaaaattactcaaatgttactactggaatttttctccctgaattgaagatacatggttagatcattaacaataccacctaaatgaaggaaacatatctggatatccagtgtcacatacttttatgtatttatttcaggaattactattttgtcaccataattaggaaacagactgtgttctttatttgaaacacaacagtataaatactatagtaaagttgggtgcagtggatcacagctataatcccagcactttgggagaccaaggagggatggtcacttgagcccaggagtttgagaccagcctaggcaacatagagagaccttgtctcaacaaaaaaatttaaagttagccaggtgtggtggtttgcacctatagtcccagctactcaggaggctgaggtgggaggatcgcttgagcttaggaggtcaaggctgcagtgagccatgattgtgccacttcaccctgggcaacagagaaagaccctgtctcaataaaaaagaagagaaaaactggagtgagaactctcctcctctcataatcatagtatccacgttaggaaaatgcttctgagagtaacttaaagtactgtgtgtgcatcttccttcaaaaccttgcttttttctccgtttttgtaaggtgagaaagggaaaaaccttcaccgtagaaatactgtcttgagattaagatacaaataaaacatgttaaacctccatctaaagacattgcaacttattaaaacagaaaaatgtacctttgttatgtctttccaaatatccacacccacaccctgttcagctttgttaataatacagagatcagaaatgtgaagcacaaatgctgcttctccccctcctgttcccatgtcagagatggagaagaaagcacagtgagctgttcaccagtccagcggtgacctcggagtcctttgtaacagtgtttccaataacttctgccaataaaacagaatttgagttagaacctatctgctgtccctcaactagtgtctgatagctgagaatgtaattcgtttgtgtgtctattagaaaattaggcaggcaccacagacagtagcaacataaaggaacctgcttagaagaggtttttatggtgtgattgtgtttttttttttttaatttttgtttcctgaagtagaatccatagctcaaaacaagttttaagcctgagaaaatataatttgaggtgttttttatgctcctaatgaaaagatgaatgaatgcatcattaaaccttaacagtagagcagaatttcactgttacaaaccacatgggttctcctggttgtgctgctgttctctacctgtgtgtcactgagtttgagcatcattattgtttgaatcagaggacccactggaatcaaggcttcttggaattgcgcaagaatctgagaaaacttcaatctttaccagcatttcttaatgctttccatgacttttgtgcaattatataagttcagtttagacaaaatgctgttactttttaaggcattactaataactgaaaatagttacgtcattgcccatcaagggaaaagcacttgtaactgtcatttaaaaaaaataaaactataaaacaata

SEQ ID NO: 211310 - DNA, 929 bp, Artificial Sequence
  derived and/or modified sequence
gctggcccggtttcctggcgacgcggccctgcaggcggttgcgttccccgtcgttaccctctttctcttcccgacgcgtgagttaggccgtaatgccttggctgctctcagcccccaagctggttcccgctgtagcaaacgtccgcggcctctcaggatgtatgttgtgttcacagcgaaggtactcccttcagcctgtcccagaaaggaggattccaaaccgatacttaggccagcccagcccctttacacacccacacctcctcagaccaggggaggtaactccaggactatctcaggtggaatatgcacttcgcagacacaaactaatgtctctgatccagaaggaagctcaagggcagagtgggacagaccagacagtggttgtgctctccaaccctacatactacatgagcaacgatattccctatactttccaccaagacaacaatttcctgtacctatgtggattccaagagcctgatagcattcttgtccttcagagcctccctggcaaacaattaccatcacacaaagccatactttttgtgcctcggcgagatcccagtcgagaactttgggatggtccgcgatctggcactgatggagcaatagctctaactggagtagacgaagcctatacgctagaagaatttcaacatcttctaccaaaaatgaaagctgagacgaacatggtttggtatgactggatgaggccctcacatgcacagcttcactctgactatatgcagcccctgactgaggccaaagccaagagcaagaacaaggttcggggtgttcagcagctgatacagcgcctccggctgatcaagtctcctgcagaaattgaacgaatgcagattgctgggaagctgacatcacagagacagggtttctcagtgttgtccaggctagtctcgaactcctga

SEQ ID NO: 211311 - DNA, 1042 bp, Artificial Sequence
  derived and/or modified sequence
ggtgcggctggcccggtttcctggcgacgcggccctgcaggcggttgcgttccccgtcgttaccctctttctcttcccgacgcgtgagttaggccgtaatgccttggctgctctcagcccccaagctggttcccgctgtagcaaacgtccgcggcctctcaggatgtatgttgtgttcacagcgaaggtactcccttcagcctgtcccagaaaggaggattccaaaccgatacttaggccagcccagcccctttacacacccacacctcctcagaccaggggaggtaactccaggactatctcaggtggaatatgcacttcgcagacacaaactaatgtctctgatccagaaggaagctcaagggcagagtgggacagaccagacagtggttgtgctctccaaccctacatactacatgagcaacgatattccctatactttccaccaagacaacaatttcctgtacctatgtggattccaagagcctgatagcattcttgtccttcagagcctccctggcaaacaattaccatcacacaaagccatactttttgtgcctcggcgagatcccagtcgagaactttgggatggtccgcgatctggcactgatggagcaatagctctaactggagtagacgaagcctatacgctagaagaatttcaacatcttctaccaaaaatgaaagctgagacgaacatggtttggtatgactggatgaggccctcacatgcacagcttcactctgactatatgcagcccctgactgaggccaaagccaagagcaagaacaaggttcggggtgttcagcagctgatacagcgcctccggctgatcaagtctcctgcagaaattgaacgaatgcagattgctgggaagctgacatcacagaaatccgtattattggcccggcacggtggctcacgcctgtattcccatcactttgggaggccaaggctttcatagaaaccatgttcaccagtaaagcccctgtggaagaagcctttctttatgctaagtttgaatttgaatgccgggctcgt

SEQ ID NO: 211312 - DNA, 2249 bp, Artificial Sequence
  derived and/or modified sequence
accagaccatcctgaatcctctggactgtttcccctgtatgtttccctggaagcttcaggcagtgcctcataagccaatggaatctgttgctaatagccacagcatatcccttgcataatatgacctctagattactgcgccttaattgcttcccagctcttctatgctttggtttagaaaaatgaagtactgacttacgggtgaagaaagtattcaaacagttgacatatttatttcagtcaagaaacagttcagagggagatacaaacaagtaacttagttacaatataatagttatgatgagaggaagtactggatgctaaacaattatatgagagacagctcaggctgggggtgtcaatgaaagcctcttggaggaagtagcctgatatgttaactttctgcatgccagtggatgtatgttgtgttcacagcgaaggtactcccttcagcctgtcccagaaaggaggattccaaaccgatacttaggccagcccagcccctttacacacccacacctcctcagaccaggggaggtaactccaggactatctcaggtggaatatgcacttcgcagacacaaactaatgtctctgatccagaaggaagctcaagggcagagtgggacagaccagacagtggttgtgctctccaaccctacatactacatgagcaacgatattccctatactttccaccaagacaacaatttcctgtacctatgtggattccaagagcctgatagcattcttgtccttcagagcctccctggcaaacaattaccatcacacaaagccatactttttgtgcctcggcgagatcccagtcgagaactttgggatggtccgcgatctggcactgatggagcaatagctctaactggagtagacgaagcctatacgctagaagaatttcaacatcttctaccaaaaatgaaagctgagacgaacatggtttggtatgactggatgaggccctcacatgcacagcttcactctgactatatgcagcccctgactgaggccaaagccaagagcaagaacaaggttcggggtgttcagcagctgatacagcgcctccggctgatcaagtctcctgcagaaattgaacgaatgcagattgctgggaagctgacatcacaggctttcatagaaaccatgttcaccagtaaagcccctgtggaagaagcctttctttatgctaagtttgaatttgaatgccgggctcgtggcgcagacattttagcctatccacctgtggtggctggtggtaatcggtcaaacactttgcactatgtgaaaaataatcaactcatcaaggatggggaaatggtgcttctggatggaggttgtgagtcttcctgctatgtgagtgacatcacacgtacgtggccagtcaatggcaggttcaccgcacctcaggcagaactctatgaagccgttctagagatccaaagagattgtttggccctctgcttccctgggacaagcttggagaacatctacagcatgatgctgaccctgataggacagaagcttaaagacttggggatcatgaagaacattaaggaaaataatgccttcaaggctgctcgaaaatactgtcctcatcatgttggccactacctcgggatggatgtccatgacactccagacatgccccgttccctccctctgcagcctgggatggtaatcacaattgagcccggcatttatattccagaggatgacaaagatgccccagagaagtttcggggtcttggtgtacgaattgaggatgatgtagtggtgactcaggactcacctctcatcctttctgcagactgtcccaaagagatgaatgacattgaacagatatgcagccaggcttcttgaccttcactgcggcccacatgcacctcagtggaatgcagtagccctctgggcctgggatattgtggttgataactgtgccatctgcaggaaccacattatggatctttagacgggatctcgctttgttgcccaggctggtctcgaactggcttcaagtgatcctcccactttggccttccaaaatgttgcgattataggcgtgagccactgtggctggcctgaaattttctagtatccacattcataaagtaaaaagaaaataaaaaggcatagaatgtcaagctaaccaggcgtccgctacttcagaagagtgtactgtcgcatggggagtctgtaaccatgcttttcacttccactgcatctctcgctggctc

SEQ ID NO: 211313 - protein, 610 aa, Artificial Sequence
  derived and/or modified sequence
MPSARGKSKSKAPITFGDLAIYFSQEEWEWLSPIQKDLYEDVMLENYRNLVSLGLSFRRPNVITLLEKGKAPWMVEPVRRRRAPDSGSKCETKKLPPNQCNKSGQSICQKLVSAQQKAPTRKSGCNKNSVLVKPKKGHSGKKPLKCNDCGKTFSRSFSLKLHQNIHTGEKPFECSNCRKAFRQISSILLHQRIHSGKKSHECNKCGESFNQRTTLILHMRIHDGKEILDCGKALSQCQSFNIHQKIHVVGNVCQCRKCGKAFNQMSSLLLHKKIHNGKKTHKYNKCGRGFKKKSVFVVHKRIHAGEKIPENAKALSQSLQQRSHHLENPFKCRKCGKLFNRISPLMLHQRIHTSEKPYKCDKCDKFFRRLSTLILHLRIHNGEKLYRCNKCEKVCNRHSSLIQHQKVHTKKKKLFECKECGKMFSGTANLKIHQNIHSEEKPFKCNKCSKVFGRQSFLIEHQRIHTGEKPYQCEECGKAFSHRISLTRHKRIHTEDRPYECDQCGKAFSQSAHLAQHERIHTGEKPYTCKTCGKAFSQRTSLILHERSHTGEKPYECNECGKAFSSGSDLIRHQRSHSSEKPYECSKCGKAYSRSSSLIRHQNTHSEEKA

SEQ ID NO: 211314 - protein, 738 aa, Artificial Sequence
  derived and/or modified sequence
MRTLVNALSGGGQEIKPEGKCAHNGMCFRCEEVAPDTCEAYPYPGLVVSVAGKEGPNPDHKRGFLDLAQEGIQALPYQLSAHLSVWTLKGEERMPSARGKSKSKAPITFGDLAIYFSQEEWEWLSPIQKDLYEDVMLENYRNLVSLGLSFRRPNVITLLEKGKAPWMVEPVRRRRAPELVTVALFSSFGEVMFSRMVLMLMDVCQYLVIDELDSGSKCETKKLPPNQCNKSGQSICQKLVSAQQKAPTRKSGCNKNSVLVKPKKGHSGKKPLKCNDCGKTFSRSFSLKLHQNIHTGEKPFECSNCRKAFRQISSILLHQRIHSGKKSHECNKCGESFNQRTTLILHMRIHDGKEILDCGKALSQCQSFNIHQKIHVVGNVCQCRKCGKAFNQMSSLLLHKKIHNGKKTHKYNKCGRGFKKKSVFVVHKRIHAGEKIPENAKALSQSLQQRSHHLENPFKCRKCGKLFNRISPLMLHQRIHTSEKPYKCDKCDKFFRRLSTLILHLRIHNGEKLYRCNKCEKVCNRHSSLIQHQKVHTKKKKLFECKECGKMFSGTANLKIHQNIHSEEKPFKCNKCSKVFGRQSFLIEHQRIHTGEKPYQCEECGKAFSHRISLTRHKRIHTEDRPYECDQCGKAFSQSAHLAQHERIHTGEKPYTCKTCGKAFSQRTSLILHERSHTGEKPYECNECGKAFSSGSDLIRHQRSHSSEKPYECSKCGKAYSRSSSLIRHQNTHSEEKA

SEQ ID NO: 211315 - protein, 324 aa, Artificial Sequence
  derived and/or modified sequence
KNSVLVKPKKGHSGKKPLKCNDCGKTFSRSFSLKLHQNIHTGEKPFECSNCRKAFRQISSILLHQRIHSGKKSHECNKCGESFNQRTTLILHMRIHDGKNPFKCRKCGKLFNRISPLMLHQRIHTSEKPYKCEECGKMFSGTANLKIHQNIHSEEKPFKCNKCSKVFGRQSFLIEHQRIHTGEKPYQCEECGKAFSHRISLTRHKRIHTEDRPYECDQCGKAFSQSAHLAQHERIHTGEKPYTCKTCGKAFSQRTSLILHERSHTGEKPYECNECGKAFSSGSDLIRHQRSHSSEKPYECSKCGKAYSRSSSLIRHQNTHSEEK

SEQ ID NO: 211316 - protein, 392 aa, Artificial Sequence [sequence omitted]

SEQ ID NO: 211317 - DNA, 1833 bp, Artificial Sequence
  derived and/or modified sequence
atgcccagcgccagaggcaagagcaagagcaaggcccccatcaccttcggcgacctggccatctacttcagccaggaggagtgggagtggctgagccccatccagaaggacctgtacgaggacgtgatgctggagaactacagaaacctggtgagcctgggcctgagcttcagaagacccaacgtgatcaccctgctggagaagggcaaggccccctggatggtggagcccgtgagaagaagaagagcccccgacagcggcagcaagtgcgagaccaagaagctgccccccaaccagtgcaacaagagcggccagagcatctgccagaagctggtgagcgcccagcagaaggcccccaccagaaagagcggctgcaacaagaacagcgtgctggtgaagcccaagaagggccacagcggcaagaagcccctgaagtgcaacgactgcggcaagaccttcagcagaagcttcagcctgaagctgcaccagaacatccacaccggcgagaagcccttcgagtgcagcaactgcagaaaggccttcagacagatcagcagcatcctgctgcaccagagaatccacagcggcaagaagagccacgagtgcaacaagtgcggcgagagcttcaaccagagaaccaccctgatcctgcacatgagaatccacgacggcaaggagatcctggactgcggcaaggccctgagccagtgccagagcttcaacatccaccagaagatccacgtggtgggcaacgtgtgccagtgcagaaagtgcggcaaggccttcaaccagatgagcagcctgctgctgcacaagaagatccacaacggcaagaagacccacaagtacaacaagtgcggcagaggcttcaagaagaagagcgtgttcgtggtgcacaagagaatccacgccggcgagaagatccccgagaacgccaaggccctgagccagagcctgcagcagagaagccaccacctggagaaccccttcaagtgcagaaagtgcggcaagctgttcaacagaatcagccccctgatgctgcaccagagaatccacaccagcgagaagccctacaagtgcgacaagtgcgacaagttcttcagaagactgagcaccctgatcctgcacctgagaatccacaacggcgagaagctgtacagatgcaacaagtgcgagaaggtgtgcaacagacacagcagcctgatccagcaccagaaggtgcacaccaagaagaagaagctgttcgagtgcaaggagtgcggcaagatgttcagcggcaccgccaacctgaagatccaccagaacatccacagcgaggagaagcccttcaagtgcaacaagtgcagcaaggtgttcggcagacagagcttcctgatcgagcaccagagaatccacaccggcgagaagccctaccagtgcgaggagtgcggcaaggccttcagccacagaatcagcctgaccagacacaagagaatccacaccgaggacagaccctacgagtgcgaccagtgcggcaaggccttcagccagagcgcccacctggcccagcacgagagaatccacaccggcgagaagccctacacctgcaagacctgcggcaaggccttcagccagagaaccagcctgatcctgcacgagagaagccacaccggcgagaagccctacgagtgcaacgagtgcggcaaggccttcagcagcggcagcgacctgatcagacaccagagaagccacagcagcgagaagccctacgagtgcagcaagtgcggcaaggcctacagcagaagcagcagcctgatcagacaccagaacacccacagcgaggagaaggcctag

SEQ ID NO: 211318 - DNA, 2217 bp, Artificial Sequence
  derived and/or modified sequence
atgagaaccctggtgaacgccctgagcggcggcggccaggagatcaagcccgagggcaagtgcgcccacaacggcatgtgcttcagatgcgaggaggtggcccccgacacctgcgaggcctacccctaccccggcctggtggtgagcgtggccggcaaggagggccccaaccccgaccacaagagaggcttcctggacctggcccaggagggcatccaggccctgccctaccagctgagcgcccacctgagcgtgtggaccctgaagggcgaggagagaatgcccagcgccagaggcaagagcaagagcaaggcccccatcaccttcggcgacctggccatctacttcagccaggaggagtgggagtggctgagccccatccagaaggacctgtacgaggacgtgatgctggagaactacagaaacctggtgagcctgggcctgagcttcagaagacccaacgtgatcaccctgctggagaagggcaaggccccctggatggtggagcccgtgagaagaagaagagcccccgagctggtgaccgtggccctgttcagcagcttcggcgaggtgatgttcagcagaatggtgctgatgctgatggacgtgtgccagtacctggtgatcgacgagctggacagcggcagcaagtgcgagaccaagaagctgccccccaaccagtgcaacaagagcggccagagcatctgccagaagctggtgagcgcccagcagaaggcccccaccagaaagagcggctgcaacaagaacagcgtgctggtgaagcccaagaagggccacagcggcaagaagcccctgaagtgcaacgactgcggcaagaccttcagcagaagcttcagcctgaagctgcaccagaacatccacaccggcgagaagcccttcgagtgcagcaactgcagaaaggccttcagacagatcagcagcatcctgctgcaccagagaatccacagcggcaagaagagccacgagtgcaacaagtgcggcgagagcttcaaccagagaaccaccctgatcctgcacatgagaatccacgacggcaaggagatcctggactgcggcaaggccctgagccagtgccagagcttcaacatccaccagaagatccacgtggtgggcaacgtgtgccagtgcagaaagtgcggcaaggccttcaaccagatgagcagcctgctgctgcacaagaagatccacaacggcaagaagacccacaagtacaacaagtgcggcagaggcttcaagaagaagagcgtgttcgtggtgcacaagagaatccacgccggcgagaagatccccgagaacgccaaggccctgagccagagcctgcagcagagaagccaccacctggagaaccccttcaagtgcagaaagtgcggcaagctgttcaacagaatcagccccctgatgctgcaccagagaatccacaccagcgagaagccctacaagtgcgacaagtgcgacaagttcttcagaagactgagcaccctgatcctgcacctgagaatccacaacggcgagaagctgtacagatgcaacaagtgcgagaaggtgtgcaacagacacagcagcctgatccagcaccagaaggtgcacaccaagaagaagaagctgttcgagtgcaaggagtgcggcaagatgttcagcggcaccgccaacctgaagatccaccagaacatccacagcgaggagaagcccttcaagtgcaacaagtgcagcaaggtgttcggcagacagagcttcctgatcgagcaccagagaatccacaccggcgagaagccctaccagtgcgaggagtgcggcaaggccttcagccacagaatcagcctgaccagacacaagagaatccacaccgaggacagaccctacgagtgcgaccagtgcggcaaggccttcagccagagcgcccacctggcccagcacgagagaatccacaccggcgagaagccctacacctgcaagacctgcggcaaggccttcagccagagaaccagcctgatcctgcacgagagaagccacaccggcgagaagccctacgagtgcaacgagtgcggcaaggccttcagcagcggcagcgacctgatcagacaccagagaagccacagcagcgagaagccctacgagtgcagcaagtgcggcaaggcctacagcagaagcagcagcctgatcagacaccagaacacccacagcgaggagaaggcctag

SEQ ID NO: 211319 - DNA, 1833 bp, Artificial Sequence
  derived and/or modified sequence
atgccctcggccagagggaagagtaagtcaaaagccccaatcacatttggcgaccttgccatctacttttcccaggaagagtgggaatggctgtcgcccatacaaaaggatctttatgaagatgtgatgctggaaaattatcgcaacctggtgagtttaggtctgtcttttcggaggccgaacgtgatcactctcctggaaaaggggaaggcaccatggatggtggaaccagtacggaggcggcgtgccccagactcggggtccaagtgcgaaacaaaaaaactgccccccaaccagtgtaacaagagtgggcagtcgatatgccaaaagttggtgtcagctcagcagaaagctcccactcggaagtccggatgtaacaagaattccgtgctcgtaaagccgaaaaaaggacacagtggcaagaagccactgaagtgtaacgattgtgggaagacattctctcgttccttttctctgaagctgcatcagaacatccatacaggcgaaaagccatttgaatgttctaattgccgaaaggcatttcgccagataagcagtattttgctacaccagcgtattcattccggcaaaaaatcccatgagtgtaataaatgtggcgaaagttttaatcaaagaaccacactgatactgcacatgcgaatacacgatgggaaggagattctggattgcgggaaagcattgtcccaatgtcagtcttttaacatccaccagaagatccacgtggtgggcaatgtctgccagtgtcgcaagtgtggcaaggcatttaaccaaatgtcgtccctgctacttcacaagaaaattcataacggcaagaaaacacacaaatataataaatgcgggagaggatttaaaaagaagtcagtcttcgtcgtccataagcgtatacacgcgggggaaaaaattccggagaatgctaaagccctgagtcagagccttcagcagaggtctcatcacctcgaaaacccctttaaatgcagaaagtgtggaaaacttttcaatcggatctctccattaatgctacaccaacggatccacaccagcgaaaaaccatacaaatgtgataagtgcgataagttcttcagaagacttagcaccctgatccttcatctgaggattcacaacggcgagaaactctaccgctgtaataagtgtgagaaggtgtgcaacagacactcctctctgattcaacatcaaaaggtgcacacgaaaaagaaaaaactctttgagtgtaaggagtgtggcaagatgttttctggaactgctaatctgaagatccatcaaaacatccactccgaggaaaaaccattcaaatgtaataaatgctccaaagtgttcggccgacagtcatttctcattgagcatcagagaattcacactggtgagaagccatatcagtgtgaggaatgtggaaaagccttttcccacagaatttcactcacaaggcataagcgcattcacaccgaggatcggccatacgaatgtgaccagtgtggaaaagccttctctcagtcagcccatctggcgcagcacgaaaggattcacacaggagaaaaaccttatacatgcaaaacctgcggcaaagccttctctcagcgaactagcctcatcttacacgagcggagccatacgggagagaaaccctacgagtgcaacgaatgcgggaaagccttttctagcggttcagacttgatcaggcaccaacgctcccactcaagtgagaagccctatgaatgctcaaaatgtgggaaggcttattctagatccagcagcctgattcggcatcaaaacacccatagcgaggagaaggcgtag

SEQ ID NO: 211320 - DNA, 2217 bp, Artificial Sequence
  derived and/or modified sequence
atgaggactcttgtcaatgctcttagtggcggcgggcaggagattaagcccgaagggaaatgcgctcataatggaatgtgttttagatgtgaggaggtggccccagatacttgcgaggcttacccatacccaggtcttgttgtgtcggtggcgggcaaggaggggccgaatcctgaccacaaacgcgggtttctcgacctcgctcaggagggcatccaggccctcccataccagctgtcagcacatctttcggtctggactttaaagggagaggagcgaatgcctagtgcccgaggtaaatcaaaaagcaaggcacccattacctttggggatttggccatatatttctcgcaagaagagtgggagtggttatcccctattcagaaagatttatacgaggacgtaatgcttgaaaattatcgtaaccttgtttctctgggcctgagttttcggagacctaatgttataactttgctggaaaaaggcaaggctccttggatggtcgagcctgtgcgcagacggagagcccctgaacttgtcaccgtggccctcttttcctcgttcggtgaggtcatgttcagccggatggtgcttatgctgatggatgtgtgccagtacctggtgatagacgaattggacagcggcagcaaatgcgagaccaaaaagttgccccctaatcaatgtaataagagcggtcagagtatttgtcaaaagctggtgtccgcccagcagaaggcgcccacaagaaagagtggttgtaataaaaatagcgtgcttgtcaaaccaaaaaaggggcactccggcaaaaaaccgctaaaatgcaacgactgtggaaagacctttagcagaagcttcagcctcaaactgcatcaaaatatacatacgggggaaaagccgtttgaatgctctaactgccgcaaggccttccggcagatatcatccatcttgctccatcagaggatccatagtggtaagaagtcacatgagtgcaacaagtgcggagaatcctttaaccagcgtaccactcttatcttacacatgcgcattcacgatgggaaagagatactggactgcggcaaggctttgtcccagtgccagagcttcaatatacatcagaagattcacgtagttggaaatgtgtgtcagtgcagaaagtgcggcaaggcttttaaccagatgtcaagcttattgctgcataagaagattcacaacggaaagaagacccacaaatacaacaagtgtggacgcggatttaagaagaagtccgtatttgtggtgcacaaacggatccacgctggcgagaaaattcctgagaacgccaaggctctaagccagtctctccagcagcgatcccaccacctggagaacccctttaagtgcaggaagtgcggtaaactgttcaatcgtatctccccactgatgcttcaccagcggattcatacaagtgagaaaccttacaagtgcgataagtgtgacaagttcttccgcaggttatccaccttaattctgcatctgcgtattcacaatggcgagaagctttacaggtgcaacaaatgcgagaaagtatgcaaccgtcacagttcactgatacagcaccagaaggtacacaccaagaagaagaaacttttcgagtgtaaggagtgtggtaaaatgttttctggcactgcgaatctcaaaattcaccagaatatccacagcgaagagaaaccgtttaaatgcaacaagtgctccaaagtgttcggccgacaatcctttctgatagaacatcagcggatccacacaggagagaaaccttaccagtgcgaggaatgtgggaaagctttttcccatagaatcagcctcactcgacacaaaaggattcataccgaagacagaccttacgaatgcgatcagtgcggcaaggcatttagtcagagcgcgcacctcgcacagcatgaacggatccatacgggggagaaaccctatacctgcaagacatgcggcaaggcattctcccagagaacctctctgattctgcacgagcgaagccacacaggcgaaaaaccttacgagtgcaacgagtgtggtaaggcattctcaagcggctccgatctcatcagacatcaacggagccattcctctgagaagccttacgaatgttctaagtgcggtaaggcctactcaagatcgtcctccctgattaggcaccaaaacacccattccgaagagaaggcctag

SEQ ID NO: 211321 - DNA, 1833 bp, Artificial Sequence
  derived and/or modified sequence
atgccgagcgcaagaggaaaatctaaaagtaaagctccaatcacctttggcgatttagccatctacttttcacaggaagagtgggagtggctttcccctattcagaaagacctgtacgaggatgttatgttagagaactatcggaatctcgtgagtctggggctgtctttccggagacccaacgttattaccctgctggagaaaggaaaggctccctggatggtcgaaccagtgcgtagaagacgagccccagatagcggatcgaaatgcgaaacaaaaaaactgccccctaatcagtgtaacaagtccggccagtcaatatgtcagaaactggtgagtgctcagcaaaaggccccaacccggaagagcgggtgcaataagaatagcgtcctggtaaagccgaagaaggggcactctgggaagaaaccactcaagtgcaatgattgtggaaaaacattttcgcgatctttttctctcaagttgcaccaaaatatccatacaggcgagaagcctttcgaatgctcaaactgcaggaaggcctttcgacagatctcgtctattctactgcaccagagaattcactctgggaagaagagtcatgaatgtaacaagtgtggcgagtctttcaatcaaagaactacactaattctgcacatgaggattcacgatggcaaggaaatcctggactgcgggaaagccctctctcagtgtcagtcttttaacatccaccagaaaatccacgtcgtcgggaacgtgtgtcagtgtaggaaatgtggaaaagcttttaatcagatgtcttctctactgttacacaagaagattcataacgggaagaaaactcataaatacaataagtgtggcagagggtttaaaaagaaaagcgttttcgtcgtgcacaaaaggattcacgctggggaaaaaattccggaaaacgccaaagctttaagccaatcactccagcagcggagtcaccacctggaaaatccctttaagtgcagaaaatgcggcaagctattcaacagaatctctccgctaatgctgcaccaaagaatccacacatctgaaaagccttataagtgcgacaaatgtgataagtttttccgtagattgagtacactaatcctgcatctgcggatccacaacggcgagaagctgtatagatgtaacaagtgtgagaaggtatgtaaccgccactcttctctcatccaacaccagaaagtgcacactaagaaaaagaagctcttcgaatgtaaggagtgtggtaaaatgttcagtggaaccgctaatctgaagatccatcagaatatacactctgaggaaaagcccttcaagtgcaacaagtgctccaaggttttcggccggcagtcttttttgatcgaacaccagcggattcatacgggcgaaaaaccttaccagtgtgaagaatgtggaaaagccttctctcatagaatatcgctcacccgccacaagcggattcacactgaggacagaccttacgagtgtgatcagtgtgggaaggcctttagccaatccgctcacttggctcagcatgaacggattcacacaggcgagaagccctacacttgtaagacgtgcggtaaggcgttttcacagcgcacttccctgattcttcacgaacggagtcacacaggcgaaaagccttatgagtgcaatgaatgcggaaaagcattcagctctggttccgacctgattaggcatcagcgatctcactcaagcgaaaagccatacgaatgtagcaaatgcggtaaggcatactcccgctcgtccagtctgattcggcaccagaacacacactcagaggagaaggcatag

SEQ ID NO: 211322 - DNA, 1833 bp, Artificial Sequence
  derived and/or modified sequence
atgcccagcgcccggggcaagagcaagagcaaggcccccatcaccttcggggacctggccatctacttcagccaggaggagtgggagtggctgagccccatccagaaggacctgtatgaagatgtgatgctggagaactacagaaacctggtgtccctgggcctgtccttccggcggcccaacgtcatcaccctgctggagaagggcaaggccccctggatggtggagcctgtgagaagaagaagagccccagacagcggcagcaaatgtgagaccaagaagctgccccccaaccagtgcaacaagagcggccagagcatctgccagaagctggtgtctgcccagcagaaggcccccaccaggaagagcggctgcaacaagaacagcgtgctggtgaagcccaagaagggccacagcggcaagaagcccctgaagtgcaatgactgtgggaagaccttcagccgctccttcagcctgaagctgcaccagaacatccacactggagagaagccctttgaatgtagcaactgcaggaaggccttccggcagatcagcagcatcctgctgcaccagaggatccacagcggcaagaagagccatgagtgcaacaagtgtggggagagcttcaaccagaggaccaccctcatcctgcacatgagaattcatgatggcaaggagatcctggactgtgggaaggccctgagccagtgccagagcttcaacatccaccagaagatccacgtggtgggcaatgtgtgccagtgcaggaaatgtgggaaggccttcaaccagatgagcagcctgctgctgcacaagaagatccacaacgggaagaagacccacaagtacaacaagtgtggccggggcttcaagaagaagtctgtgtttgtggtgcacaagagaattcatgctggggagaagatcccagaaaatgccaaggccctgagccagagcctgcagcagaggagccaccacctggagaaccccttcaagtgcaggaaatgtgggaagctgttcaaccgcatcagccccctgatgctgcaccagaggatccacaccagcgagaagccctacaagtgtgacaagtgtgacaagttcttccggcggctgagcaccctcatcctgcacctgcgcatccacaatggagagaagctgtaccgctgcaacaagtgtgagaaggtgtgcaacagacacagcagcctcatccagcaccagaaggtgcacaccaagaagaagaagctgtttgagtgcaaggaatgtgggaagatgttttctggaacagccaacctgaagatccaccagaacatccacagcgaggagaagcccttcaagtgcaacaagtgcagcaaggtgtttggccggcagagcttcctgattgagcaccagaggatccacactggagagaagccctaccagtgtgaagaatgtgggaaggccttcagccaccgcatcagcctgaccaggcacaagaggatccacacagaagatcggccctatgaatgtgaccagtgtgggaaggccttcagccagagcgcccacctggcccagcacgagcgcatccacactggagagaagccctacacctgcaagacctgtgggaaggccttcagccagaggaccagcctcatcctgcacgagaggagccacactggagagaagccctatgagtgcaatgaatgtgggaaggccttcagcagcggcagtgacctgatccgccaccagaggagccacagcagcgagaagccctatgagtgcagcaaatgtgggaaggcctacagccgcagcagcagcctcatccgccaccagaacacccacagcgaggagaaggcctag

SEQ ID NO: 211323 - DNA, 2217 bp, Artificial Sequence
  derived and/or modified sequence
atgaggaccctggtgaatgccctgagcggcggcggccaggagatcaagccagagggcaaatgtgcccacaacggcatgtgcttccgctgtgaggaggtggccccagacacctgtgaggcctacccctacccaggcctggtggtgtctgtggccggcaaggagggccccaacccagaccacaagaggggcttcctggacctggcccaggagggcatccaggccctgccctaccagctgagcgcccacctgtctgtgtggaccctgaagggggaggagaggatgcccagcgcccggggcaagagcaagagcaaggcccccatcacctttggagacctggccatctacttcagccaggaggagtgggagtggctgagccccatccagaaggacctgtatgaagatgtgatgctggagaactacagaaacctggtgtccctgggcctgtccttcagaagacccaacgtcatcaccctgctggagaagggcaaggccccctggatggtggagcctgtgagaagaagaagagcccctgagctggtgacagtggccctcttcagcagctttggagaggtgatgttcagcaggatggtgctgatgctgatggatgtgtgccagtacctggtgattgatgagctggacagcggcagcaaatgtgagaccaagaagctgccccccaaccagtgcaacaagagcggccagagcatctgccagaagctggtgtctgcccagcagaaggcccccaccaggaagagcggctgcaacaagaacagcgtgctggtgaagcccaagaagggccacagcggcaagaagcccctgaagtgcaatgactgtgggaagaccttcagccgctccttcagcctgaagctgcaccagaacatccacactggagagaagccctttgaatgtagcaactgcaggaaggccttccggcagatcagcagcatcctgctgcaccagaggatccacagcggcaagaagagccatgagtgcaacaagtgtggggagagcttcaaccagaggaccaccctcatcctgcacatgagaattcatgatggcaaggagatcctggactgtgggaaggccctgagccagtgccagagcttcaacatccaccagaagatccacgtggtgggcaatgtgtgccagtgcaggaaatgtgggaaggccttcaaccagatgagcagcctgctgctgcacaagaagatccacaacgggaagaagacccacaagtacaacaagtgtggccggggcttcaagaagaagtctgtgtttgtggtgcacaagagaattcatgctggggagaagatcccagaaaatgccaaggccctgagccagagcctgcagcagaggagccaccacctggagaaccccttcaagtgcaggaaatgtgggaagctgttcaaccgcatcagccccctgatgctgcaccagaggatccacaccagcgagaagccctacaagtgtgacaagtgtgacaagttcttccggcggctgagcaccctcatcctgcacctgcgcatccacaatggagagaagctgtaccgctgcaacaagtgtgagaaggtgtgcaacagacacagcagcctcatccagcaccagaaggtgcacaccaagaagaagaagctgtttgagtgcaaggaatgtgggaagatgttttctggaacagccaacctgaagatccaccagaacatccacagcgaggagaagcccttcaagtgcaacaagtgcagcaaggtgtttggccggcagagcttcctgattgagcaccagaggatccacactggagagaagccctaccagtgtgaagaatgtgggaaggccttcagccaccgcatcagcctgaccaggcacaagaggatccacacagaagatcggccctatgaatgtgaccagtgtgggaaggccttcagccagagcgcccacctggcccagcacgagcgcatccacactggagagaagccctacacctgcaagacctgtgggaaggccttcagccagaggaccagcctcatcctgcacgagaggagccacactggagagaagccctatgagtgcaatgaatgtgggaaggccttcagcagcggcagtgacctgatccgccaccagaggagccacagcagcgagaagccctatgagtgcagcaaatgtgggaaggcctacagccgcagcagcagcctcatccgccaccagaacacccacagcgaggagaaggcctag

SEQ ID NO: 211324 - DNA, 1833 bp, Artificial Sequence
  derived and/or modified sequence
atgcccagcgcccggggcaagagcaagagcaaggcccccatcaccttcggggatcttgctatctacttcagccaagaagaatgggagtggctgagtccaatacaaaaggacctgtatgaggacgtcatgcttgaaaattaccgaaatctggtctctctgggactgagttttcgtaggcccaacgtgataacccttctcgagaaaggcaaggctccctggatggtggagccagtccgcagaagacgcgcacctgactcaggatccaagtgcgaaacaaagaagctgccaccgaaccagtgcaacaaatcgggacagtccatctgccagaaactggtcagtgcccagcagaaggcacctacgcgcaaaagcggttgtaataagaactccgtgcttgtcaaaccgaagaaaggccacagtggaaagaagccactgaaatgcaatgactgtggaaagactttctcccgaagcttctccttaaagctacaccaaaacattcacaccggggaaaagccattcgagtgcagtaattgtcgcaaggctttccgccagatctcctccatcttgctgcaccagcgaatccactccggaaagaagtcacacgagtgcaacaaatgtggcgagagtttcaaccagcggaccactctgatacttcacatgagaatacacgatggaaaggagatcctggattgtggcaaggctctgtcccagtgccagagcttcaatattcatcagaagattcacgtcgtgggtaacgtgtgccagtgccgaaagtgcgggaaggcgtttaaccagatgtcttcccttcttctccacaagaagatacataacggtaaaaagacacacaaatacaacaagtgcggccgcggcttcaaaaagaagagcgtctttgtggtacacaagcgcattcacgctggcgaaaagatccccgagaacgctaaggcattgtcacagtcactccagcagcggagccaccacttagagaacccctttaaatgcaggaagtgcggaaagctgtttaaccgtatatcaccgctgatgctacatcagcggattcacacgagcgagaagccctacaagtgtgacaagtgcgataaattctttaggagactttctactttgatacttcatctgaggattcacaacggtgagaagctctaccggtgtaacaagtgtgaaaaggtgtgcaatcgacatagctccctgattcagcatcaaaaagtacacaccaaaaaaaaaaagcttttcgagtgtaaagagtgcggaaagatgttttcgggcacggccaacttaaagattcaccagaacattcatagcgaagaaaagccattcaaatgcaataaatgctccaaggtatttggtaggcagtcctttttgattgagcaccagcgcattcacactggagaaaaaccttaccaatgcgaggagtgcggaaaagccttttctcataggatatcactgacacggcacaaaagaatccacacagaagaccggccttacgagtgcgatcagtgtgggaaggcattttctcagtccgctcacctggcacagcacgaaagaatacatacaggagaaaagccatatacttgcaaaacctgcggtaaagctttttcccagcgaacctctctgatattacatgagagatctcacaccggtgaaaagccttacgaatgcaatgagtgtggcaaggccttctcttccggatctgacttaatccggcatcaaaggtcccactcaagcgagaagccttacgagtgctcaaagtgcggaaaagcctacagtcgatcatcctctctgatacgccaccagaacacccattctgaggagaaggcgtag

SEQ ID NO: 211325 - DNA, 2217 bp, Artificial Sequence
  derived and/or modified sequence
atgcggaccctggtgaacgccctgagcggcggcggccaggagatcaaacccgaggggaaatgcgcccacaatggaatgtgcttccggtgtgaggaggtcgcaccagacacttgcgaggcctatccttatcccggtctggtcgtgtcagtggccgggaaagaagggcctaaccccgatcataaaagaggctttctggatctggcccaggaagggattcaggccttaccatatcagctatccgctcatttaagcgtctggaccctgaagggagaagagagaatgccaagtgccaggggcaaatcaaagagcaaggcccccattacgtttggggaccttgcaatctatttctcccaggaggagtgggagtggctgtctcccatacaaaaggatttgtatgaggatgtgatgctcgagaactaccgaaatttggtgtcactgggcctgagttttaggagaccaaatgtcataaccctgctagagaagggcaaggccccttggatggtagagccagtgcgacgaagaagagcccctgagctcgtgaccgtggctctctttagttcctttggagaagtgatgttctcccgaatggtcctgatgctcatggacgtgtgtcaatacctcgtgattgacgaactcgattcggggagcaagtgtgaaacaaagaagcttccacctaaccagtgtaacaaaagcggacagagcatctgccagaaattagtttccgctcaacaaaaagcacccacacgcaaatccgggtgtaataagaactccgtccttgtcaaacctaagaaaggccattccggaaagaagcctctgaaatgtaacgattgtggcaagactttttcccgtagcttttcccttaaactacaccaaaacattcacaccggtgagaagcctttcgagtgctctaactgtcggaaagcattccgtcaaatctctagcatcctgctgcatcaaagaattcacagtggtaaaaagtctcacgagtgtaataagtgtggcgaaagtttcaaccaaagaactaccctgattttgcacatgaggatccacgatggaaaggagatcctcgactgcgggaaagccctctcccagtgtcagtcgttcaatatccaccaaaaaattcatgtagtaggtaacgtatgtcagtgtcgaaagtgtggcaaagcctttaatcagatgagctctctcctgctgcacaaaaagattcataatggcaagaaaacccataaatataataagtgcggtcggggatttaagaaaaaaagcgtctttgtcgtgcataaacggatccacgcaggtgaaaaaatccccgagaacgctaaagccctgtcccaatccctgcagcagcgatctcaccatctcgaaaaccccttcaagtgcagaaagtgtgggaagctctttaatcgaatcagcccactgatgctgcatcagcggatccacactagtgaaaaaccttataaatgtgataagtgcgacaagtttttccgcaggctgtctacccttatactgcacttgcgcattcataacggcgagaagctgtaccgatgcaacaaatgcgagaaggtatgcaacaggcactctagccttattcagcaccaaaaagtgcatacaaaaaagaagaaactgttcgaatgtaaggagtgcggcaaaatgttttcaggcaccgccaatctgaagattcatcaaaacatccactctgaagagaagccttttaagtgcaacaaatgtagcaaggtttttgggcgacagtctttccttatcgaacatcagcgcatccacacaggggaaaaaccttaccaatgcgaagagtgcggcaaagctttctctcatcggatttcgttaacccggcataagaggattcacacagaggatcgcccatacgaatgcgaccagtgcggaaaggcattcagccagagcgcccatcttgcacagcacgagcggatccacacaggtgagaagccttacacatgcaagacttgcggcaaggctttctcacagagaacttctcttatactccatgagcggagccataccggggagaagccttacgagtgtaatgagtgtggaaaggcttttagctctgggagcgatctgattcgtcaccaacgatctcactcctccgaaaaaccatacgagtgcagcaagtgtggaaaggcttattccagaagctctagtctgattaggcaccagaacacccacagcgaggaaaaagcgtag

SEQ ID NO: 211326 - DNA, 1833 bp, Artificial Sequence
  derived and/or modified sequence
atgcccagcgcccggggcaagagcaagagcaaggcccccatcacctttggagacctagccatatatttctcgcaagaagaatgggagtggctaagccctatccagaaggacctctacgaagatgtgatgctggaaaactacaggaacctagtcagcctagggctctctttccggcgtcccaatgtgattactttgctcgagaaaggtaaggcaccctggatggtcgagcctgttaggcgacggcgggcacccgacagtgggagcaaatgcgagacaaaaaagttgcctccaaaccagtgcaacaagtctgggcagagcatctgtcaaaagctagtgtctgcccagcagaaggctcccacacgaaaatcaggctgcaacaagaactctgttttagtgaagcccaagaagggccattcaggcaaaaagcctctgaaatgcaatgattgcggtaagacctttagtaggtcttttagccttaaactgcaccagaatatccacactggcgaaaaaccttttgagtgctcgaattgtcgcaaggcttttcggcagatttctagcatcctgctgcaccagaggatccactctgggaaaaagagccacgagtgcaataagtgtggtgaatccttcaaccagcgtaccactctgatcttacatatgagaattcacgatggcaaggagattctcgattgtggcaaggccctatcacaatgccagagttttaacattcatcagaagatacacgtcgtggggaatgtgtgccaatgtagaaaatgcggtaaagcattcaatcaaatgtcctctcttttgctgcacaagaaaatccataacggtaagaagactcacaagtacaataagtgcggtcggggatttaaaaagaaatcggttttcgtggtgcacaagcggattcacgccggtgagaagatccccgaaaatgcgaaggccttaagtcagtcactgcagcagcggagccaccatctggagaaccccttcaagtgcagaaaatgtggcaaactctttaaccgcatcagtcccctgatgttgcaccaaagaatacatacctctgagaaaccttacaagtgtgacaagtgtgataagttctttcgccggttgtctaccttaattcttcatttgagaattcacaacggggaaaaactgtaccgatgcaacaaatgtgaaaaggtatgcaatagacactccagcttgatccaacatcagaaggtccacactaaaaagaagaaactatttgagtgcaaagagtgcggaaaaatgttctcagggaccgctaacctgaagattcaccagaatatccactccgaagagaaaccctttaaatgtaacaaatgcagcaaagtttttggccggcaaagcttcctgatcgagcaccagagaatccatacgggtgaaaaaccatatcagtgtgaagagtgtggaaaggccttttcccacagaatctctctcactcgacacaagcgaattcacacagaggacagaccatacgaatgcgatcagtgtgggaaggccttctcacagtcagcacacttggctcagcatgagcggatccacaccggcgagaaaccatacacctgtaagacatgtggcaaggcgtttagccagcggaccagcctcatattacacgagcggtctcacacgggagaaaagccttatgagtgcaacgaatgtggtaaggcgtttagttcaggatcagacctgatccggcaccagcggtcgcatagttctgagaagccgtatgaatgttcgaaatgcggtaaagcttatagcagaagtagcagcctgatcagacatcagaacacgcacagtgaagaaaaagcgtag

SEQ ID NO: 211327 - DNA, 1833 bp, Artificial Sequence
  derived and/or modified sequence
atgcctagcgccaggggaaaaagcaagagcaaggccccaatcacttttggtgatctggcgatctattttagccaagaggagtgggaatggctgagtcctatccagaaggatctgtacgaggatgtaatgctggaaaattacaggaacctggtttctcttggcttgtcattccgcaggccaaatgtgataactctgctcgagaaaggcaaggcaccctggatggtggagcctgtccggaggagaagggcacccgacagtggatctaagtgcgaaaccaagaagttgccacccaatcagtgtaataaaagcggtcagtctatttgccagaaattagtatccgcgcagcaaaaggctcctaccaggaagagtggatgtaataagaattcagtgctggtgaagcctaagaagggacatagcggcaagaagcccttaaagtgtaacgactgcggtaagacgttctctagaagcttctcacttaaacttcaccagaacatacatactggagaaaaaccgttcgagtgttcaaactgtcgaaaggctttcagacagattagtagcatactgctgcaccagcggattcactcaggtaagaagtcccatgaatgcaacaagtgcggggagtcttttaaccagcgaacaacactcatcctccacatgagaattcatgatggcaaagagatcctagattgcggcaaggccctcagccagtgtcaatctttcaacattcatcagaaaattcacgtagtcggcaacgtttgccaatgtaggaaatgtggcaaagccttcaatcagatgagctctttacttctgcacaagaaaattcacaatggcaagaagacacacaagtacaataagtgtggacggggtttcaagaaaaaatctgtttttgtggtgcacaagcgcattcacgccggtgagaagattccggagaatgccaaagcgctgtcacagtccctgcaacagcgatcccaccacctcgaaaatcccttcaagtgcagaaaatgtggaaaactctttaatcgaatctctcccctcatgttacatcagagaatccataccagtgagaagccatacaaatgcgataagtgcgataagttcttcagacgactctccaccctaattctgcacttgaggatacacaacggagagaagttataccgatgtaataaatgcgaaaaggtgtgcaaccggcactcctctctgatccagcatcagaaggtccacacgaagaagaagaagctgttcgaatgcaaagagtgtggcaaaatgttctcgggaaccgctaacctgaagatccaccagaacatccactcagaagaaaagcccttcaaatgtaacaagtgcagcaaagtgttcgggaggcagtcattcctgatcgaacaccaacgcattcatactggtgaaaagccctaccagtgcgaggagtgtggtaaggcgttttcacataggatctccttgacccgccacaaacggatccatacagaggatcgcccatatgagtgcgatcaatgtggaaaggctttctctcaatctgcccatctcgcacagcacgagcggatccatactggcgagaagccttacacctgcaaaacgtgcggtaaggcctttagccagcgcacatccctgatcttgcatgaaaggagtcacacgggcgagaagccttatgagtgcaatgaatgcgggaaagctttctcatccgggtccgatctcattcgacatcagcgcagtcattcctcggagaaaccctatgagtgcagcaagtgtgggaaggcatactcccggtccagcagtctaatacgccaccaaaacacacactcggaagagaaagcctag

SEQ ID NO: 211328 - DNA, 2217 bp, Artificial Sequence
  derived and/or modified sequence
atgcggaccctggtaaacgccctctccgggggtgggcaggagattaagccagaaggcaagtgcgcccataacggaatgtgctttcggtgcgaagaggtggctcctgatacttgcgaagcttacccttaccccggactggtcgtcagcgttgcgggaaaggaaggacccaatccagatcacaaacgcggatttcttgatctggctcaggagggtattcaggctttgccataccagttatccgcccatctgtctgtgtggaccctgaaaggagaggagcgcatgccatcagcgagaggaaagagtaaaagtaaagcaccaatcactttcggcgacctcgcaatttacttttcccaggaggaatgggagtggttgagccccattcagaaggacctctacgaggacgttatgcttgagaactacagaaatcttgtgtcccttggcctgtcctttcgcaggccaaatgtgatcacactcctcgagaagggcaaagccccatggatggtggagcctgtgagacggaggagggctcctgagttggtgactgtagccctattttcaagtttcggagaggtgatgttcagcagaatggtactcatgctaatggatgtgtgtcagtatttagttatcgacgagcttgatagcggctccaagtgcgagactaagaagctccctccaaaccagtgcaacaagtcaggacagtctatttgccagaaattagtatctgcacagcagaaggcccctactagaaaaagtggatgtaataaaaatagcgtgctcgtaaaacctaagaagggacactctggcaagaagcccctaaagtgcaacgactgcggtaagacctttagtcggtcgttctcgctgaaattacatcagaatattcacacaggcgagaaaccctttgaatgcagtaactgtcgaaaggcgttccgccagatttcgtcgatactgctgcatcagagaatccattcaggtaaaaaaagccacgagtgtaacaagtgcggagaatctttcaaccaacgcacgacgctcatcctccatatgagaatacacgatggaaaggaaattctggactgcggcaaggcgttatctcagtgccaatcctttaacattcaccaaaagatacacgtggtagggaacgtgtgccaatgccgaaaatgtggaaaagcattcaatcagatgagttctttgctgttgcacaagaagatccataacgggaagaaaacccataagtataataagtgtggtcgaggattcaagaaaaaatctgtcttcgtagtccacaagcgcattcacgctggggaaaagatccctgaaaacgccaaggccctatcccagtcactgcagcaaaggtcacaccatctggagaatcctttcaaatgccgcaaatgcggaaagcttttcaatcggatttcacctctgatgttacaccagagaatacataccagtgaaaaaccatacaagtgtgataagtgtgataagttcttccgtaggctgagtacactgatcctgcatctccggatccataatggcgaaaagctgtatcgatgtaataagtgtgagaaagtgtgcaacaggcatagcagcctcatccagcatcagaaggtgcatactaagaagaaaaaactgtttgaatgtaaggaatgcgggaaaatgttttccggcacagccaatttgaaaatccaccagaatattcattccgaggaaaagcctttcaagtgcaacaagtgtagcaaggtgtttggtaggcaatcattcttgatcgaacaccagcgtatccatacaggggaaaagccttaccagtgcgaagaatgcggaaaggcatttagtcatcgaatttctctcacccgacacaagcgaattcacactgaagaccgtccgtatgagtgtgatcagtgtggtaaggccttcagccagagcgcgcaccttgcgcaacacgaacgcatccatacaggtgagaaaccatacacgtgtaaaacctgtggtaaagcctttagccagcggacatcacttatcctacatgagaggtctcatacaggcgagaagccgtacgaatgcaacgagtgcggaaaggcattcagcagtgggagtgacctgatcaggcaccagcggtcacactcaagcgagaagccttatgagtgctccaaatgcggaaaggcttattccaggtcctccagcttgataagacatcagaatactcactctgaggaaaaggcctag

SEQ ID NO: 211329 - DNA, 1833 bp, Artificial Sequence
  derived and/or modified sequence
atgccctctgcccgagggaagtcaaagtcaaaggcccctatcaccttcggcgacctggctatctacttctctcaagaggagtgggagtggcttagccctatccagaaagatctatacgaagacgtgatgctagagaactacaggaatctggtgagccttggcctgtctttccggagacctaatgtcattaccttactagaaaagggcaaggcgccttggatggttgagccagtgagacgacgtcgcgctcccgattctgggagtaaatgtgagacgaagaaactgccacccaaccaatgcaataaaagtgggcagagcatatgccagaagctggtgagtgcccagcaaaaagcacccacaaggaagtccggctgcaacaagaacagcgtcctagttaagcccaaaaaaggccatagtggtaagaagccgctgaagtgcaacgattgtggcaagacattttcccgatcttttagcctgaaactacatcaaaatatacatactggcgagaagcctttcgagtgctctaactgccggaaagcattcaggcagatctcgtccatactcctgcaccaacggatacattccggtaagaagtcacacgagtgcaacaaatgcggagagagctttaaccagcgcactacgctgatcctgcatatgcgaattcacgacggcaaagaaattctggactgtgggaaagcgttgagccaatgtcaaagctttaacatccatcagaagatccacgtagtgggaaacgtttgccagtgtcgcaaatgcggcaaggcctttaatcagatgagttccctgttactgcacaagaaaattcacaacggaaaaaaaacccataaatataacaagtgcgggagggggttcaagaagaaaagtgttttcgtggtgcataaacgcatccatgcaggtgagaagataccagagaacgcgaaggccctctcccagtccctgcagcagagatcccatcatctggaaaaccccttcaaatgtcgaaaatgtggcaagttattcaatcgcatttctccgttgatgctgcatcagcgcatccacacttccgaaaaaccatacaagtgcgataaatgcgataaattttttcgccgactatcgactttgattctacacctgcggatccataacggggaaaaattgtataggtgcaacaagtgtgaaaaggtctgtaaccggcattctagtctgatccaacaccaaaaggtccacactaaaaagaagaagctcttcgaatgtaaggaatgcggtaagatgttttcaggaacagccaacctgaagatccatcagaacattcatagtgaagaaaagccttttaagtgcaataaatgtagtaaggtgttcggccgtcagtcatttctgattgagcaccagagaatccacacaggagagaagccgtaccagtgtgaggagtgcggaaaggcattcagccatagaatttcactgaccaggcataaaaggattcacactgaggaccggccttatgagtgtgaccagtgcggtaaggcctttagccaatccgcacacctggctcagcatgagcggattcatactggggagaaaccatacacctgcaagacatgcggtaaggccttttctcagcggacttctctgattcttcacgaacgcagccacaccggagagaagccttatgagtgcaacgaatgcggcaaggccttctcatcaggcagcgacttaataagacaccagcggagccattcatctgaaaaaccatatgaatgcagcaaatgcgggaaagcctacagtagatcatcttcactgatcaggcaccagaacacccattcggaggagaaggcatag

SEQ ID NO: 211330 - DNA, 3857 bp, Artificial Sequence
  derived and/or modified sequence
atgcgtggtgcgtgtgtgaaggggggtgcagcgcgcggtcccggggtcccggaggggagtgcgcaggcgctgagtccctgctcggctgtctcggtggtcgccgccggggtctgagcccgggaagaccgagccctgccttaccagctctctgcccatctctcagtgtggaccctaaagggggaggaaaggatgccttctgcacgggggaaatccaaatccaaggcacctataacatttggggacttagccatctacttctcccaggaggagtgggaatggctgagccccattcagaaggatttgtatgaagatgtcatgttggagaattaccggaacctggtctcgcttggtctttcctttcggagaccaaatgtgatcaccttattggagaaagggaaagcaccctggatggtagagccagtaagaagacgccgggctcctgactcggggtctaaatgtgagaccaagaagttacctccaaatcaatgcaacaaatctgggcaaagcatctgccagaaactagtttctgcacaacaaaaagctcctacacgaaagagtggctgcaacaaaaattcagtcctagtaaaacctaagaaagggcattcagggaagaaacctttaaaatgtaatgactgtggtaaaacctttagtcgaagcttctctcttaaacttcatcagaacattcatacaggagagaagccttttgaatgcagtaattgtagaaaagctttcagacagatctcatccatcctacttcatcagagaattcacagtggaaagaaaagccatgaatgcaataaatgtggggaaagcttcaatcaaagaacaacccttattctacatatgagaattcatgatggaaaggaaattcttgactgtgggaaggccttgagtcaatgtcagtctttcaatatacatcagaaaattcatgttgttgggaatgtctgccagtgcagaaagtgcggaaaagccttcaatcagatgtcatcccttttacttcataagaaaattcacaatggaaagaaaacacataaatataataaatgtgggagaggcttcaaaaagaaatcagtctttgttgtacataaaagaattcatgctggagagaaaatccctgaaaatgcgaaggccttaagtcagagtctacagcaaagaagtcaccatttagagaatccttttaaatgcagaaaatgtgggaaattatttaataggatttcacccctgatgcttcaccagagaattcacacttcagagaaaccgtacaaatgtgataaatgtgacaagttcttcaggcggctttcaacccttattctgcatctaagaattcataatggagaaaaactatacagatgcaataaatgtgagaaggtctgcaatcggcattcatcccttattcaacatcagaaagttcatacaaagaaaaagaaactatttgagtgtaaggaatgtgggaagatgttttctggaactgcaaaccttaaaatacatcagaatattcattctgaagagaaacctttcaaatgcaataaatgtagtaaagttttcggccgccaatcatttcttattgaacatcaaagaattcatactggagaaaaaccctaccagtgtgaggaatgtggaaaagccttcagccaccgaatatctctcacacgacataagagaattcatactgaagatagaccctatgaatgtgatcagtgtgggaaggccttcagccagagtgcacacctcgcccaacatgaaagaattcacactggagagaagccatatacatgcaaaacatgtggtaaggcctttagtcagcgcacatctcttattctacatgaaagaagtcatactggagagaaaccctatgaatgtaatgaatgtgggaaggcatttagcagtggctcagaccttattcgacatcagagaagtcattcttcagagaaaccctatgaatgtagtaaatgtgggaaggcatatagtcggagttcatccctgattcgacatcagaatacacattctgaagaaaaagcctaaggttgttttaaatctataaaatcaacgaatgaggctatcaaacatatggcaaatatgtatttgtctataatgtaaattttgtgtatatgggaccatttgatgatatgtcccactttgaaagccaaagagcaaaagtcattggtgattttgacctcaggatttgaaattaactgaaggaaactcagaagtttggtcagtcattgtgaatgaagatcatttttcatttgataagaattactggctgggcgcagtggcttacacctgtaaccccagcactttgggaggctgagacaggcggatcacgaggtcaagagtttgagaccacggtgaaaccctgtctctactaaaaaatacaaaattagctgggcgtggtggtgcgcacctgtaatctcagctactggagaggctgaggcaggagaatcgcttgaacccaggaggtgggggttgcaccgagcagagattgcaccactgcactccagtctgggcaacagagcaagactctgtgtcaaaaaaaaaaaaaattaccgatattttacttccagcatagttttaaagataatttattggtcacatacaacaaaatagaattgtgaagtccattatagggctctgagcctgatttaaggtcacagaaaaaagaatttgagtctgtttctcagatctagaattatcaaatataaggaacttctcggcaaaacagggtgccactttcagctgacaaacttgtgggtgagaataaagaaaagtgagtctttaggtagataaagttgtcactcataatggtgtgtaacagtagaaaccttactttaccatctccacggatatgaggatatatgatcttcatggtgtgaacgtctaacttggctgagacaagctatcagtaaaagaaccaagatatagtgaagaatgaggatttcagagccaggagaaatcagtattgttttatttggaaataaatcatctatatttatatgagtaaacattggtattttcatgtaacaatactggtatgcaataagtggtgtaatatgagttgttatggactgaatgtttatgtccctcccaaaactaattatgttaaaatcctcaccatcaatgtgatgttacttggaaatgaggcatttgggaggcaattaggattagatgaggtcatgagggtggagccctcgtgatgggattagtgcctttataagaagagacatcaggctgagcccggtggctcatgcctgtaatcccagcactttgggaggccaaggcgagtggatcatgaggtcaggagattgagacaatcctggctaacacggtgaaaccccgtctccactgaaaaaaaatacaaaaaattagccaggcacagtggcatgtgcctgtagtcccagctactcgggaggctgaaggagaagaatcgcttgaacccaggaggcggaggttgcagtgagccaggatcacgccactgtactccaccctgggcgacagagcgagactacgtctcaaaaagacatcagaaagcctgcttgctctctgcaccatgtgaggatgcaggaagaagccagctgtctacagaacaggaagagaaccctacgagaacctaaccatgctggcgacctgttctcagacttccagacttcagaactgtgagaagtaaattgttgtttaagccacccagtctatgatgttttgttatggcagccccagctaatatatggagtggaaagcctagatttatctactgggttcttttcctgtcagcagttcaacatgtgtagtagctttcagtctctgctgtttgtgccaaatatataagaaataaaatcagataacttttttgtaattggatc

SEQ ID NO: 211331 - DNA, 4052 bp, Artificial Sequence
  derived and/or modified sequence
atgagaacattggtcaatgcattgtccggtggaggacaagagataaagccagaaggcaaatgtgctcacaatggaatgtgtttccgctgtgaagaagtggcacctgatacatgtgaagcatacccctaccccggtttagtggtgagtgttgctggaaaagagggtcccaatccagaccataagagagggttcttggatcttgcacaggaaggaattcaagccctgccttaccagctctctgcccatctctcagtgtggaccctaaagggggaggaaaggatgccttctgcacgggggaaatccaaatccaaggcacctataacatttggggacttagccatctacttctcccaggaggagtgggaatggctgagccccattcagaaggatttgtatgaagatgtcatgttggagaattaccggaacctggtctcgcttggtctttcctttcggagaccaaatgtgatcaccttattggagaaagggaaagcaccctggatggtagagccagtaagaagacgccgggctcctgaactggtcactgttgccttatttagttcatttggtgaggtcatgttttcccggatggtcttgatgcttatggatgtttgtcagtacctggtcattgatgaattagactcggggtctaaatgtgagaccaagaagttacctccaaatcaatgcaacaaatctgggcaaagcatctgccagaaactagtttctgcacaacaaaaagctcctacacgaaagagtggctgcaacaaaaattcagtcctagtaaaacctaagaaagggcattcagggaagaaacctttaaaatgtaatgactgtggtaaaacctttagtcgaagcttctctcttaaacttcatcagaacattcatacaggagagaagccttttgaatgcagtaattgtagaaaagctttcagacagatctcatccatcctacttcatcagagaattcacagtggaaagaaaagccatgaatgcaataaatgtggggaaagcttcaatcaaagaacaacccttattctacatatgagaattcatgatggaaaggaaattcttgactgtgggaaggccttgagtcaatgtcagtctttcaatatacatcagaaaattcatgttgttgggaatgtctgccagtgcagaaagtgcggaaaagccttcaatcagatgtcatcccttttacttcataagaaaattcacaatggaaagaaaacacataaatataataaatgtgggagaggcttcaaaaagaaatcagtctttgttgtacataaaagaattcatgctggagagaaaatccctgaaaatgcgaaggccttaagtcagagtctacagcaaagaagtcaccatttagagaatccttttaaatgcagaaaatgtgggaaattatttaataggatttcacccctgatgcttcaccagagaattcacacttcagagaaaccgtacaaatgtgataaatgtgacaagttcttcaggcggctttcaacccttattctgcatctaagaattcataatggagaaaaactatacagatgcaataaatgtgagaaggtctgcaatcggcattcatcccttattcaacatcagaaagttcatacaaagaaaaagaaactatttgagtgtaaggaatgtgggaagatgttttctggaactgcaaaccttaaaatacatcagaatattcattctgaagagaaacctttcaaatgcaataaatgtagtaaagttttcggccgccaatcatttcttattgaacatcaaagaattcatactggagaaaaaccctaccagtgtgaggaatgtggaaaagccttcagccaccgaatatctctcacacgacataagagaattcatactgaagatagaccctatgaatgtgatcagtgtgggaaggccttcagccagagtgcacacctcgcccaacatgaaagaattcacactggagagaagccatatacatgcaaaacatgtggtaaggcctttagtcagcgcacatctcttattctacatgaaagaagtcatactggagagaaaccctatgaatgtaatgaatgtgggaaggcatttagcagtggctcagaccttattcgacatcagagaagtcattcttcagagaaaccctatgaatgtagtaaatgtgggaaggcatatagtcggagttcatccctgattcgacatcagaatacacattctgaagaaaaagcctaaggttgttttaaatctataaaatcaacgaatgaggctatcaaacatatggcaaatatgtatttgtctataatgtaaattttgtgtatatgggaccatttgatgatatgtcccactttgaaagccaaagagcaaaagtcattggtgattttgacctcaggatttgaaattaactgaaggaaactcagaagtttggtcagtcattgtgaatgaagatcatttttcatttgataagaattactggctgggcgcagtggcttacacctgtaaccccagcactttgggaggctgagacaggcggatcacgaggtcaagagtttgagaccacggtgaaaccctgtctctactaaaaaatacaaaattagctgggcgtggtggtgcgcacctgtaatctcagctactggagaggctgaggcaggagaatcgcttgaacccaggaggtgggggttgcaccgagcagagattgcaccactgcactccagtctgggcaacagagcaagactctgtgtcaaaaaaaaaaaaaattaccgatattttacttccagcatagttttaaagataatttattggtcacatacaacaaaatagaattgtgaagtccattatagggctctgagcctgatttaaggtcacagaaaaaagaatttgagtctgtttctcagatctagaattatcaaatataaggaacttctcggcaaaacagggtgccactttcagctgacaaacttgtgggtgagaataaagaaaagtgagtctttaggtagataaagttgtcactcataatggtgtgtaacagtagaaaccttactttaccatctccacggatatgaggatatatgatcttcatggtgtgaacgtctaacttggctgagacaagctatcagtaaaagaaccaagatatagtgaagaatgaggatttcagagccaggagaaatcagtattgttttatttggaaataaatcatctatatttatatgagtaaacattggtattttcatgtaacaatactggtatgcaataagtggtgtaatatgagttgttatggactgaatgtttatgtccctcccaaaactaattatgttaaaatcctcaccatcaatgtgatgttacttggaaatgaggcatttgggaggcaattaggattagatgaggtcatgagggtggagccctcgtgatgggattagtgcctttataagaagagacatcaggctgagcccggtggctcatgcctgtaatcccagcactttgggaggccaaggcgagtggatcatgaggtcaggagattgagacaatcctggctaacacggtgaaaccccgtctccactgaaaaaaaatacaaaaaattagccaggcacagtggcatgtgcctgtagtcccagctactcgggaggctgaaggagaagaatcgcttgaacccaggaggcggaggttgcagtgagccaggatcacgccactgtactccaccctgggcgacagagcgagactacgtctcaaaaagacatcagaaagcctgcttgctctctgcaccatgtgaggatgcaggaagaagccagctgtctacagaacaggaagagaaccctacgagaacctaaccatgctggcgacctgttctcagacttccagacttcagaactgtgagaagtaaattgttgtttaagccacccagtctatgatgttttgttatggcagccccagctaatatatggagtggaaagcctagatttatctactgggttcttttcctgtcagcagttcaacatgtgtagtagctttcagtctctgctgtttgtgccaaatatataagaaataaaatcagataacttttttgtaattggatc

SEQ ID NO: 211332 - DNA, 4459 bp, Artificial Sequence
  derived and/or modified sequence
atgcgtggtgcgtgtgtgaaggggggtgcagcgcgcggtcccggggtcccggaggggagtgcgcaggcgctgagtccctgctcggctgtctcggtggtcgccgccggggtctgagcccgggaagaccgaggttccagccgtcctcacctcaggaggacatagctttgtgcctttcaaagccctttctcatctatcatcagggactcggaagacgagccaggtttacagccctgccttgatgtgtagtgccgagttccttgaagaaaattattttatggacaatgtatgagtctgttttcgtgctgctgataaagacatacccagactcacagttctacgtggctggggaggcctcacaatcgtgatggaaggtgaaagacacgtcttacatggccacagggagaatgagagtccctgtacagaaccatcagatcacatgagacttactcactgccatgagaacagcatgggggaaaccgcccccatgattcagttatctcccaccgggtccctcccacaacacgtggaaattatgggagctataattcaagatgagatttgagtggggacacagccagaccatatcagacaagaatcatcttctcaaatttggggtgcgtggctgagtgcacacacctgtgaaaactgcgggatgaatgcattacaacttcctggaacaagtcattttacctaagtaattggaaggggaaagccaactgatctgcttatctgccctgccttaccagctctctgcccatctctcagtgtggaccctaaagggggaggaaaggatgccttctgcacgggggaaatccaaatccaaggcacctataacatttggggacttagccatctacttctcccaggaggagtgggaatggctgagccccattcagaaggatttgtatgaagatgtcatgttggagaattaccggaacctggtctcgcttggtctttcctttcggagaccaaatgtgatcaccttattggagaaagggaaagcaccctggatggtagagccagtaagaagacgccgggctcctgactcggggtctaaatgtgagaccaagaagttacctccaaatcaatgcaacaaatctgggcaaagcatctgccagaaactagtttctgcacaacaaaaagctcctacacgaaagagtggctgcaacaaaaattcagtcctagtaaaacctaagaaagggcattcagggaagaaacctttaaaatgtaatgactgtggtaaaacctttagtcgaagcttctctcttaaacttcatcagaacattcatacaggagagaagccttttgaatgcagtaattgtagaaaagctttcagacagatctcatccatcctacttcatcagagaattcacagtggaaagaaaagccatgaatgcaataaatgtggggaaagcttcaatcaaagaacaacccttattctacatatgagaattcatgatggaaaggaaattcttgactgtgggaaggccttgagtcaatgtcagtctttcaatatacatcagaaaattcatgttgttgggaatgtctgccagtgcagaaagtgcggaaaagccttcaatcagatgtcatcccttttacttcataagaaaattcacaatggaaagaaaacacataaatataataaatgtgggagaggcttcaaaaagaaatcagtctttgttgtacataaaagaattcatgctggagagaaaatccctgaaaatgcgaaggccttaagtcagagtctacagcaaagaagtcaccatttagagaatccttttaaatgcagaaaatgtgggaaattatttaataggatttcacccctgatgcttcaccagagaattcacacttcagagaaaccgtacaaatgtgataaatgtgacaagttcttcaggcggctttcaacccttattctgcatctaagaattcataatggagaaaaactatacagatgcaataaatgtgagaaggtctgcaatcggcattcatcccttattcaacatcagaaagttcatacaaagaaaaagaaactatttgagtgtaaggaatgtgggaagatgttttctggaactgcaaaccttaaaatacatcagaatattcattctgaagagaaacctttcaaatgcaataaatgtagtaaagttttcggccgccaatcatttcttattgaacatcaaagaattcatactggagaaaaaccctaccagtgtgaggaatgtggaaaagccttcagccaccgaatatctctcacacgacataagagaattcatactgaagatagaccctatgaatgtgatcagtgtgggaaggccttcagccagagtgcacacctcgcccaacatgaaagaattcacactggagagaagccatatacatgcaaaacatgtggtaaggcctttagtcagcgcacatctcttattctacatgaaagaagtcatactggagagaaaccctatgaatgtaatgaatgtgggaaggcatttagcagtggctcagaccttattcgacatcagagaagtcattcttcagagaaaccctatgaatgtagtaaatgtgggaaggcatatagtcggagttcatccctgattcgacatcagaatacacattctgaagaaaaagcctaaggttgttttaaatctataaaatcaacgaatgaggctatcaaacatatggcaaatatgtatttgtctataatgtaaattttgtgtatatgggaccatttgatgatatgtcccactttgaaagccaaagagcaaaagtcattggtgattttgacctcaggatttgaaattaactgaaggaaactcagaagtttggtcagtcattgtgaatgaagatcatttttcatttgataagaattactggctgggcgcagtggcttacacctgtaaccccagcactttgggaggctgagacaggcggatcacgaggtcaagagtttgagaccacggtgaaaccctgtctctactaaaaaatacaaaattagctgggcgtggtggtgcgcacctgtaatctcagctactggagaggctgaggcaggagaatcgcttgaacccaggaggtgggggttgcaccgagcagagattgcaccactgcactccagtctgggcaacagagcaagactctgtgtcaaaaaaaaaaaaaattaccgatattttacttccagcatagttttaaagataatttattggtcacatacaacaaaatagaattgtgaagtccattatagggctctgagcctgatttaaggtcacagaaaaaagaatttgagtctgtttctcagatctagaattatcaaatataaggaacttctcggcaaaacagggtgccactttcagctgacaaacttgtgggtgagaataaagaaaagtgagtctttaggtagataaagttgtcactcataatggtgtgtaacagtagaaaccttactttaccatctccacggatatgaggatatatgatcttcatggtgtgaacgtctaacttggctgagacaagctatcagtaaaagaaccaagatatagtgaagaatgaggatttcagagccaggagaaatcagtattgttttatttggaaataaatcatctatatttatatgagtaaacattggtattttcatgtaacaatactggtatgcaataagtggtgtaatatgagttgttatggactgaatgtttatgtccctcccaaaactaattatgttaaaatcctcaccatcaatgtgatgttacttggaaatgaggcatttgggaggcaattaggattagatgaggtcatgagggtggagccctcgtgatgggattagtgcctttataagaagagacatcaggctgagcccggtggctcatgcctgtaatcccagcactttgggaggccaaggcgagtggatcatgaggtcaggagattgagacaatcctggctaacacggtgaaaccccgtctccactgaaaaaaaatacaaaaaattagccaggcacagtggcatgtgcctgtagtcccagctactcgggaggctgaaggagaagaatcgcttgaacccaggaggcggaggttgcagtgagccaggatcacgccactgtactccaccctgggcgacagagcgagactacgtctcaaaaagacatcagaaagcctgcttgctctctgcaccatgtgaggatgcaggaagaagccagctgtctacagaacaggaagagaaccctacgagaacctaaccatgctggcgacctgttctcagacttccagacttcagaactgtgagaagtaaattgttgtttaagccacccagtctatgatgttttgttatggcagccccagctaatatatggagtggaaagcctagatttatctactgggttcttttcctgtcagcagttcaacatgtgtagtagctttcagtctctgctgtttgtgccaaatatataagaaataaaatcagataacttttttgtaattggatc

SEQ ID NO: 211333 - protein, 562 aa, Artificial Sequence
  derived and/or modified sequence
MDDKGDPSNEEAPKAIKPTSKEFRKTWGFRRTTIAKREGAGDAEADPLEPPPPQQQLGLSLRRSGRQPKRTERVEQFLTIARRRGRRSMPVSLEDSGEPTSCPATDAETASEGSVESASETRSGPQSASTAVKERPASSEKVKGGDDHDDTSDSDSDGLTLKELQNRLRRKREQEPTERPLKGIQSRLRKKRREEGPAETVGSEASDTVEGVLPSKQEPENDQGVVSQAGKDDRESKLEGKAAQDIKDEEPGDLGRPKPECEGYDPNALYCICRQPHNNRFMICCDRCEEWFHGDCVGISEARGRLLERNGEDYICPNCTILQVQDETHSETADQQEAKWRPGDADGTDCTSIGTIEQKSSEDQGIKGRIEKAANPSGKKKLKIFQPVIEAPGASKCIGPGCCHVAQPDSVYCSNDCILKHAAATMKFLSSGKEQKPKPKEKMKMKPEKPSLPKCGAQAGIKISSVHKRPAPEKKETTVKKAVVVPARSEALGKEAACESSTPSWASDHNYNAVKPEKTAAPSPSLLYKCMYHLGVGLLDPSRSFWIAIPWACPGLGVAALC

SEQ ID NO: 211334 - DNA, 2816 bp, Artificial Sequence
  derived and/or modified sequence
cacgcactacgggttggcgccagagtcaaaaggcgtcggccctctggcaagatggctgctgcggaggcgttggagcgcggaaatctggaaccgggatggcgacgtctacactgagtcggaggcgaaggagcttactccacgggaacagcctctagataatctgagttgttgaaaatacgaagcctgttactcgtgaacagtggctgacaacagtgttgttgtgagcctggctgtctgcttggacccagaggtttcgtctgccagggtttttggttgtatttaggatttcagggaaaagtgtccaagctttcagtgttggagcaggtatggacgacaaaggcgacccgagcaatgaggaggcacctaaggccatcaaacccaccagcaaagagttcaggaaaacatggggttttcgaaggaccactatcgccaagcgagagggcgcaggggacgcggaggctgacccactggagccgccacccccacagcagcagctgggcctgtccctgcggcgcagtgggaggcagcccaagcgcactgagcgcgtggagcagttcctgaccattgcgcggcgccgcggcaggaggagcatgcctgtctccctggaggattctggtgagcccacgtcctgccccgccacagacgccgagacagcctccgagggcagcgtggaaagcgcttctgagaccagaagcggcccccagtctgcttccacagctgtgaaggaacgaccagcctcttctgaaaaggtgaaaggaggggatgaccacgatgacacctccgatagtgacagcgatggcctgaccttgaaagagcttcagaatcgccttcgcaggaagcgggaacaggagcccactgagaggcccctgaaagggatccagagtcgcctgcggaagaagcgccgggaggagggtcccgccgagactgtgggctccgaggccagtgacactgtggagggcgtcctgcccagtaagcaggagcccgagaacgatcagggggttgtgtcccaggctgggaaagatgacagagagagtaagttggagggaaaggcggctcaggacatcaaagatgaggagcctggagacttgggccgaccgaagcctgaatgtgagggttacgaccccaacgccctgtattgcatttgccgccagcctcacaacaacaggtttatgatttgctgtgaccgctgtgaagaatggtttcatggcgattgtgtgggcatttctgaggctcgagggaggcttttggaaaggaatggggaagactatatctgcccaaactgcaccattctgcaagtgcaggatgagactcattcagaaacggcagatcagcaggaagctaaatggagacctggagatgctgatggcaccgattgtacaagtataggaacaatagagcagaagtctagcgaagaccaagggataaagggtagaattgagaaagctgcaaatccaagtggcaagaagaaactcaagatcttccagcctgtgatagaggcgcctggtgcctcaaaatgtattggccccgggtgctgtcacgtggcgcagcccgactcggtgtactgcagtaatgactgtatcctcaaacacgccgcagcgacaatgaagtttctaagctcaggtaaagaacagaagccaaagcctaaagaaaagatgaagatgaagccagagaagcccagtcttccgaaatgcggtgctcaggcaggtattaaaatctcttctgtgcacaagagaccagctccagaaaaaaaagagaccacagtgaagaaggcagtggtggtccctgcgcggagtgaagcactcgggaaggaagcagcttgtgagagcagcacgccgtcgtgggcgagcgatcacaattacaatgcagtaaagccagaaaagactgctgctccctcgccgtcactgttgtataaatgtatgtatcacctaggggttggcctcctggacccctcccgttctttctggatagccatcccctgggcctgtccaggactgggagttgcagctttgtgttaagctgatcacagacaccggctgcaccatcagcgggaagcagagcccatgtccaggatgcctcctgctgccctgtgtccatccctagtctgtcaggacttcctgtcactgttttccaaagctgtaaacctcactggtgaacgttcaccttaatgattgattctttaatctctgttttcactctcaggctctggtaagtattcgtattctcttcatcccagtctgattgcatagccacactgcccggcacgccacatccacccctgtctgcacatgagttgttctgacaacagcgctgtatacgcttcagtttttccacattgtccacggccagcacatgaaagcatcacttcttttttatgttgtgggaatctttgcaagttagtgttgcatctgattttcaggtgtacatttatttttgactgggcagataggggatttttttttttccatgtccgattcacacgctacacacccacatgaacacattcgaacttcgaaggccacacactcctgcttcataggccccacggtaagtgagttcacacctagaacactgtcctgaccgcaggacgcgtgccttggacttggtattctacatgtgactggctttcttgccctcgtctcttgaatgtttagactcttaagatcatatcctgccccaaatttcaaattaatgaaatgaagatatttcaaacagatctttgaaacctcagattctgtggtgcaattttaatgttttcttgtttctcagttttctgctataaaactattttcaattcagtcaaaaaaaaaaaaaaaaaa

SEQ ID NO: 211335 - DNA, 1689 bp, Artificial Sequence
  derived and/or modified sequence
atggacgacaagggcgaccccagcaacgaggaggcccccaaggccatcaagcccaccagcaaggagttcagaaagacctggggcttcagaagaaccaccatcgccaagagagagggcgccggcgacgccgaggccgaccccctggagcccccccccccccagcagcagctgggcctgagcctgagaagaagcggcagacagcccaagagaaccgagagagtggagcagttcctgaccatcgccagaagaagaggcagaagaagcatgcccgtgagcctggaggacagcggcgagcccaccagctgccccgccaccgacgccgagaccgccagcgagggcagcgtggagagcgccagcgagaccagaagcggcccccagagcgccagcaccgccgtgaaggagagacccgccagcagcgagaaggtgaagggcggcgacgaccacgacgacaccagcgacagcgacagcgacggcctgaccctgaaggagctgcagaacagactgagaagaaagagagagcaggagcccaccgagagacccctgaagggcatccagagcagactgagaaagaagagaagagaggagggccccgccgagaccgtgggcagcgaggccagcgacaccgtggagggcgtgctgcccagcaagcaggagcccgagaacgaccagggcgtggtgagccaggccggcaaggacgacagagagagcaagctggagggcaaggccgcccaggacatcaaggacgaggagcccggcgacctgggcagacccaagcccgagtgcgagggctacgaccccaacgccctgtactgcatctgcagacagccccacaacaacagattcatgatctgctgcgacagatgcgaggagtggttccacggcgactgcgtgggcatcagcgaggccagaggcagactgctggagagaaacggcgaggactacatctgccccaactgcaccatcctgcaggtgcaggacgagacccacagcgagaccgccgaccagcaggaggccaagtggagacccggcgacgccgacggcaccgactgcaccagcatcggcaccatcgagcagaagagcagcgaggaccagggcatcaagggcagaatcgagaaggccgccaaccccagcggcaagaagaagctgaagatcttccagcccgtgatcgaggcccccggcgccagcaagtgcatcggccccggctgctgccacgtggcccagcccgacagcgtgtactgcagcaacgactgcatcctgaagcacgccgccgccaccatgaagttcctgagcagcggcaaggagcagaagcccaagcccaaggagaagatgaagatgaagcccgagaagcccagcctgcccaagtgcggcgcccaggccggcatcaagatcagcagcgtgcacaagagacccgcccccgagaagaaggagaccaccgtgaagaaggccgtggtggtgcccgccagaagcgaggccctgggcaaggaggccgcctgcgagagcagcacccccagctgggccagcgaccacaactacaacgccgtgaagcccgagaagaccgccgcccccagccccagcctgctgtacaagtgcatgtaccacctgggcgtgggcctgctggaccccagcagaagcttctggatcgccatcccctgggcctgccccggcctgggcgtggccgccctgtgctag

SEQ ID NO: 211336 - DNA, 2707 bp, Artificial Sequence
  derived and/or modified sequence
ggaaatggctgcgagaccctagaggcctgcggcctgcggagcttactccacgggaacagcctctagataatctgagttgttgaaaatacgaagcctgttactcgtgaacagtggctgacaacagtgttgttgtgagcctggctgtctgcttggacccagaggtttcgtctgccagggtttttggttgtatttaggatttcagggaaaagtgtccaagctttcagtgttggagcaggtatggacgacaaaggcgacccgagcaatgaggaggcacctaaggccatcaaacccaccagcaaagagttcaggaaaacatggggttttcgaaggaccactatcgccaagcgagagggcgcaggggacgcggaggctgacccactggagccgccacccccacagcagcagctgggcctgtccctgcggcgcagtgggaggcagcccaagcgcactgagcgcgtggagcagttcctgaccattgcgcggcgccgcggcaggaggagcatgcctgtctccctggaggattctggtgagcccacgtcctgccccgccacagacgccgagacagcctccgagggcagcgtggaaagcgcttctgagaccagaagcggcccccagtctgcttccacagctgtgaaggaacgaccagcctcttctgaaaaggtgaaaggaggggatgaccacgatgacacctccgatagtgacagcgatggcctgaccttgaaagagcttcagaatcgccttcgcaggaagcgggaacaggagcccactgagaggcccctgaaagggatccagagtcgcctgcggaagaagcgccgggaggagggtcccgccgagactgtgggctccgaggccagtgacactgtggagggcgtcctgcccagtaagcaggagcccgagaacgatcagggggttgtgtcccaggctgggaaagatgacagagagagtaagttggagggaaaggcggctcaggacatcaaagatgaggagcctggagacttgggccgaccgaagcctgaatgtgagggttacgaccccaacgccctgtattgcatttgccgccagcctcacaacaacaggtttatgatttgctgtgaccgctgtgaagaatggtttcatggcgattgtgtgggcatttctgaggctcgagggaggcttttggaaaggaatggggaagactatatctgcccaaactgcaccattctgcaagtgcaggatgagactcattcagaaacggcagatcagcaggaagctaaatggagacctggagatgctgatggcaccgattgtacaagtataggaacaatagagcagaagtctagcgaagaccaagggataaagggtagaattgagaaagctgcaaatccaagtggcaagaagaaactcaagatcttccagcctgtgatagaggcgcctggtgcctcaaaatgtattggccccgggtgctgtcacgtggcgcagcccgactcggtgtactgcagtaatgactgtatcctcaaacacgccgcagcgacaatgaagtttctaagctcaggtaaagaacagaagccaaagcctaaagaaaagatgaagatgaagccagagaagcccagtcttccgaaatgcggtgctcaggcaggtattaaaatctcttctgtgcacaagagaccagctccagaaaaaaaagagaccacagtgaagaaggcagtggtggtccctgcgcggagtgaagcactcgggaaggaagcagcttgtgagagcagcacgccgtcgtgggcgagcgatcacaattacaatgcagtaaagccagaaaagactgctgctccctcgccgtcactgttgtataaatgtatgtatcacctaggggttggcctcctggacccctcccgttctttctggatagccatcccctgggcctgtccaggactgggagttgcagctttgtgttaagctgatcacagacaccggctgcaccatcagcgggaagcagagcccatgtccaggatgcctcctgctgccctgtgtccatccctagtctgtcaggacttcctgtcactgttttccaaagctgtaaacctcactggtgaacgttcaccttaatgattgattctttaatctctgttttcactctcaggctctggtaagtattcgtattctcttcatcccagtctgattgcatagccacactgcccggcacgccacatccacccctgtctgcacatgagttgttctgacaacagcgctgtatacgcttcagtttttccacattgtccacggccagcacatgaaagcatcacttcttttttatgttgtgggaatctttgcaagttagtgttgcatctgattttcaggtgtacatttatttttgactgggcagataggggatttttttttttccatgtccgattcacacgctacacacccacatgaacacattcgaacttcgaaggccacacactcctgcttcataggccccacggtaagtgagttcacacctagaacactgtcctgaccgcaggacgcgtgccttggacttggtattctacatgtgactggctttcttgccctcgtctcttgaatgtttagactcttaagatcatatcctgccccaaatttcaaattaatgaaatgaagatatttcaaacagatctttgaaacctcagattctgtggtgcaattttaatgttttcttgtttctcagttttctgctataaaactattttcaattcag

SEQ ID NO: 211337 - DNA, 1635 bp, Artificial Sequence
  derived and/or modified sequence
atggatgacaagggcgaccccagcaacgaggaagcaccaaaagctattaaaccgacgagcaaagaattcagaaaaacctgggggtttcggaggacgaccattgccaagcgtgagggagccggcgacgcagaagctgacccattggagcctcctcctccgcagcagcagctggggctgtccctgcggaggtccggccgacaaccaaaacggacagagagagttgaacagtttctaacaattgctcgtaggaggggaagaagatccatgcccgtgagcctggaagacagcggggaacctacctcgtgtccggccacagacgccgaaaccgcaagtgaagggagtgtggagtccgcaagcgagactcggtcaggcccccagagcgctagcaccgccgtcaaggaacgtcccgctagctcagagaaagtcaaagggggtgacgaccacgatgatacctctgactcagactccgacggtttgacccttaaagagttgcagaatcggcttcgtcggaagcgagaacaagagccaaccgagaggcccctcaagggaattcaatcacggttgaggaagaaacgacgcgaggagggcccggccgagacagtcggcagcgaggcgtccgacaccgttgaaggcgtgctgccatctaagcaggaaccagaaaatgatcagggggtggtttcccaggccggtaaagacgaccgagagagtaagcttgaggggaaggctgcacaagatattaaagatgaggagccgggggaccttggcagacccaagccggagtgtgaaggctacgatcctaacgcactctattgcatctgccgccaaccacacaataataggttcatgatttgctgtgatcgctgcgaggaatggttccacggagattgtgtcggaatttcagaagcccgcggccgcttgctggaaagaaacggagaggactacatatgcccaaattgcacaatactccaagtacaggatgagacccatagcgagaccgcggaccaacaggaggcaaagtggagacccggagacgccgacggcacggactgtacaagtattgggaccatcgaacagaaatctagtgaggatcaaggtattaagggacgtatcgaaaaagccgctaatccttcagggaagaagaaactgaaaatcttccagcctgtgatcgaagctcccggtgcatcaaaatgcatagggcctggttgctgtcacgtggcacagccggatagtgtgtattgtagtaacgactgcatactcaagcatgccgccgccaccatgaagtttttatcaagcggaaaggagcaaaagccgaagccaaaggaaaagatgaagatgaaaccagaaaagcccagcctgcccaagtgtggagctcaagccggcattaaaataagttcagtccataaaaggccggcccccgagaaaaaggagacaaccgtgaagaaagccgtcgtggttccagctagaagtgaagccctggggaaagaggccgcgtgtgagagcagtaccccctcctgggccagtgaccataattataatgcagtcaagcctgaaaagacagccgcgccttctcccagcctgttgtacaagtgctcgggaaagtatagctattccctacacccatcactgattgcatag

SEQ ID NO: 211338 - DNA, 1689 bp, Artificial Sequence
  derived and/or modified sequence
atggatgataagggcgatccatcaaacgaagaggcacctaaggcaattaagcctacctccaaggaatttaggaaaacctggggatttcgccgtacaacaatcgctaaacgtgagggcgccggggacgcagaggccgatcctttggaaccacccccgccgcagcaacaactcggcctctcccttcggagaagcggcagacagcctaagcgcacagagagggtggaacaattcctgaccattgcccggaggcgtgggaggaggagcatgcctgtctccctggaggattcaggggagccaactagttgtcccgcaaccgacgcagaaaccgcttctgaagggtctgtcgagtcagctagcgaaacgcgcagtggccctcaatctgcttctaccgctgtgaaggagcgccccgcttcttctgaaaaagtgaagggaggtgatgatcatgacgacacatctgactccgacagcgacggcttgactcttaaggagttgcaaaatcggttgagacggaagcgggagcaggaaccaaccgaacgaccgctgaagggtattcagtccagactgcgcaagaagaggagagaggaggggcccgcagagaccgtcggctcggaggcatccgacaccgtcgagggggtgctcccaagcaagcaggaaccagaaaatgatcagggcgtagtctctcaggcgggaaaggatgaccgagagtcaaagttagaaggcaaggctgctcaagacatcaaagacgaggaacccggggatttggggagacccaagcctgagtgcgaaggttacgacccaaacgcgctctattgcatctgtaggcagcctcataataatagatttatgatctgttgcgataggtgcgaagagtggtttcacggggattgcgtcggcatctctgaggcccgtggccgtctgctggagagaaatggagaggactacatctgtcctaattgcaccatcctacaggtgcaagacgaaacccacagcgaaacggcagatcagcaggaggccaagtggaggcctggcgacgctgacgggacagactgcacctcaataggtaccattgaacaaaaaagctctgaagatcagggaattaaagggcggatagaaaaggccgccaatccttctggtaaaaagaaactgaagatattccagcccgtgattgaagcccctggcgcctctaaatgtattgggccaggctgctgtcatgtggctcagcctgactccgtgtactgtagcaatgattgcattctgaagcatgccgcagccacaatgaaattcttgtcaagcgggaaggagcagaaaccgaagcctaaggagaagatgaaaatgaaaccagagaagccatctctgcccaagtgtggagctcaggcagggattaagatctcaagtgttcataagaggcctgccccagaaaaaaaggagaccacagtgaaaaaggcagtcgtggtcccggcccggagcgaggctctgggtaaggaggcggcttgtgagtccagtaccccatcatgggcaagcgatcacaactataacgctgtgaagcccgagaagacagctgcccccagtccatcacttttatataaatgcatgtatcatctcggcgtcggccttctcgatccctctcgctcattttggattgccataccctgggcctgtcccggtctaggggttgctgcgctgtgttag

SEQ ID NO: 211339 - DNA, 1635 bp, Artificial Sequence
  derived and/or modified sequence
atggacgataagggggatccatcaaacgaagaagcacctaaggctataaagcccacctctaaagaattccggaaaacatggggctttaggcggaccacgatagcaaagagggaaggcgccggggatgcagaagcagacccactcgagcctcccccacctcagcagcagctgggcctgagtcttcgtaggagtggtcggcagccaaagcggacagaaagggtggagcaattcttaaccattgctaggcgtcgtggcagaaggagtatgcccgtgtcattggaagactctggagaacccacatcatgtccggccaccgatgctgagaccgcctccgagggcagcgtagagtcagcctcagagacacggagcgggccacagtctgcaagcactgcagttaaagagagaccagcatcctccgagaaggtcaaaggcggcgacgaccatgacgatacctcagattcagattctgatgggctgaccctcaaggagcttcagaacagacttcggcgcaaacgtgagcaggaaccgacagagcggcctctgaaaggaatccagtccagacttagaaagaagcgcagagaggagggccccgccgaaaccgtgggtagcgaagcatccgataccgtggagggagtcctcccatctaagcaggaacccgaaaacgaccaaggagtggtttcacaggctgggaaagatgaccgagaatcgaaattagaaggtaaggcagctcaggatatcaaggatgaagagccaggggatctggggcgtcccaagccagagtgtgaaggctatgatcccaacgcgctgtactgcatatgtcggcagccgcacaacaacaggtttatgatctgctgcgaccgctgtgaggaatggtttcatggggattgtgtaggaataagtgaggcaagaggacgactcctagaacgcaacggggaagattacatttgtcctaactgcacaatcctccaggtgcaggacgagacccattctgagaccgccgaccaacaggaggcaaagtggcgtcccggcgatgcagacggcaccgattgcactagcattggaacaatcgaacaaaagtccagcgaagatcagggaataaaagggaggatagaaaaggctgctaatccttccggaaaaaagaagctcaagatcttccagccagtgattgaagcccccggggcaagtaagtgcattggtcctggctgttgccacgttgctcaaccggacagcgtttattgctccaacgactgcattctgaagcacgcggcggcaacaatgaaatttctttcttctggtaaggagcagaaacccaagcccaaagaaaagatgaagatgaaaccagaaaagccatcattacctaaatgtggcgcccaggctggcattaaaatctcttctgtccataagaggccagctcctgagaaaaaggagactacagtaaaaaaggcagtggttgtcccggcacgctccgaagcactggggaaggaggcagcatgcgagagctctactccctcttgggcctccgaccacaactataatgctgtaaaacctgagaaaactgcggcgccatccccaagcctattgtacaaatgcagtggtaagtactcctactcattgcacccatctctgatcgcttag

SEQ ID NO: 211340 - DNA, 1689 bp, Artificial Sequence
  derived and/or modified sequence
atggatgacaagggagacccaagtaacgaggaggctccaaaagccatcaaacctacctccaaggagtttcgaaaaacctggggattcagacgtaccacgattgccaagagagagggcgcaggcgacgcagaagcggacccgttggaaccacccccgccgcagcagcagctggggctttcgcttaggaggtctggcaggcagccaaaaaggacagagcgtgtggagcagtttctcacgatagcacgaaggcggggaagacgtagcatgccagtcagtctggaagactcaggagaacctacctcctgcccagcaacggatgcagagacggccagcgaaggatccgtcgagtccgcttccgaaaccaggagcggccctcagagcgcttcaacagccgtaaaggaaagaccagcctcatcagaaaaagtgaaggggggcgacgaccatgacgatacctctgacagtgactctgatgggttgacgcttaaggaactacagaatcggcttagacggaagagagaacaggagcccactgagcgacctctgaaaggcatccagtctaggttgcggaaaaaacggcgggaagagggcccagcagaaaccgtgggctccgaagcaagtgacacagtggagggcgtgctgcccagcaagcaggagccagagaatgaccagggtgtcgtgagccaggctgggaaggacgacagggagagtaaactggaaggtaaggccgcgcaggatattaaggatgaagagccaggggatttaggcagacccaaaccagaatgtgagggctacgacccgaacgccctatactgtatctgcaggcagccgcataacaaccggttcatgatctgttgtgaccggtgcgaagaatggttccacggcgactgcgtcgggatctctgaggcccgtggaagattgctcgaaaggaacggcgaagattatatttgccccaattgtacgattcttcaggtccaggacgaaactcatagtgagactgccgatcagcaggaggcaaaatggcgacccggagacgctgacgggaccgattgtacgtctatcggaactatcgaacagaaaagctctgaggaccagggcattaaggggcgcatagaaaaggccgccaatccatcagggaagaaaaagctgaaaattttccagcccgtaatcgaagcccctggggccagcaaatgcataggtcccggatgctgccacgttgctcagcccgattccgtatattgcagcaatgactgtatacttaaacacgccgctgctaccatgaaattcttaagcagtgggaaagagcaaaaaccaaaacctaaggagaaaatgaagatgaagcctgagaagccgtcacttcccaaatgcggggcccaggccggcatcaagatctcctccgtgcataaaagaccggctcccgagaaaaaagaaaccactgtaaagaaggccgtggtggtccccgccaggagcgaggccctagggaaggaagcagcctgtgaatcgtcgaccccaagttgggccagcgatcacaattataacgctgtgaagcccgagaaaacagcagccccatctccaagtctgctttacaagtgtatgtatcacctcggtgtggggctcctggatcccagtcgcagcttctggatcgcgataccttgggcctgcccggggctcggcgtcgccgccctgtgttag

SEQ ID NO: 211341 - DNA, 1689 bp, Artificial Sequence
  derived and/or modified sequence
atggacgacaagggcgatcctagtaatgaagaagcgccgaaagccatcaaaccaacctcgaaagaattcaggaaaacctggggctttcgacgaaccaccatcgccaagcgcgagggagcaggtgatgccgaagccgatcccttagagcctccacctccccagcagcagctcggactttccctccgcaggagtgggagacaacccaagaggacagaacgggttgaacagtttctgaccatcgcaagacggagaggccggcgtagcatgccggtgtccctcgaggattcaggggaacccacctcatgccctgctacagatgctgagaccgctagtgaaggctcggtagaatctgccagtgaaacaagaagcggcccccagtctgcatcaacggcggtgaaggagcggcctgcatcctcagaaaaggtcaaggggggagatgaccacgatgacactagtgacagcgatagcgacggacttacgcttaaagaactgcaaaaccgcctaagacgaaagcgcgagcaagagccaaccgaacggccccttaagggaattcagagcaggcttcgcaaaaaaagaagggaggagggtcccgccgaaacagtcggctccgaagccagcgacactgtagagggcgtcctgccaagtaagcaagagcccgaaaatgaccagggcgtagtgtcgcaggccggcaaggatgacagagaaagcaagctcgagggtaaggccgcccaggatatcaaagacgaagaaccgggcgacctgggcagaccaaagccagaatgcgagggatacgatccaaatgcactctattgcatttgtcgacagccccataataatcggtttatgatctgttgtgacagatgcgaagaatggtttcatggagattgcgtaggaatttcggaggcacgcggccggctgctggaacgcaatggtgaagattatatctgcccaaattgcaccatcctgcaggttcaggacgagacccacagtgaaaccgctgaccagcaggaggctaaatggagaccaggcgacgcagacggtacagactgcacctcaataggcaccatcgagcaaaagagttcagaggatcagggtatcaagggtcggattgaaaaggcagccaaccccagcggaaagaagaagctcaagatcttccagcctgtgatcgaagccccgggagccagtaagtgtattggccccggatgctgccatgtagcccaacccgattcagtttactgttctaatgactgcattctgaaacatgctgccgccacgatgaagtttttgagtagcggtaaagaacaaaagcctaagcccaaggagaaaatgaagatgaagcctgagaaaccatccttgcctaagtgcggagcgcaagccggaatcaaaatatccagcgtacataagcggcctgctcctgaaaagaaggaaactacagtgaaaaaggctgtggtagtgcctgccagaagcgaagccttgggcaaggaggctgcatgcgaatcttccacacctagttgggcctcggaccacaactataatgcggtgaagccggagaagaccgccgcacccagcccgagtctgctgtacaagtgcatgtatcatctcggtgtaggacttctggacccaagtcggtccttttggatagccattccgtgggcctgcccgggactcggagttgccgcactctgctag

SEQ ID NO: 211342 - DNA, 2383 bp, Artificial Sequence
  derived and/or modified sequence
gagcttactccacgggaacagcctctagataatctgagttgttgaaaatacgaagcctgttactcgtgaacagtggctgacaacagtgttgttgtgagcctggctgtctgcttggacccagaggtttcgtctgccagggtttttggttgtatttaggatttcagggaaaagtgtccaagctttcagtgttggagcaggtatggacgacaaaggcgacccgagcaatgaggaggcacctaaggccatcaaacccaccagcaaagagttcaggaaaacatggggttttcgaaggaccactatcgccaagcgagagggcgcaggggacgcggaggctgacccactggagccgccacccccacagcagcagctgggcctgtccctgcggcgcagtgggaggcagcccaagcgcactgagcgcgtggagcagttcctgaccattgcgcggcgccgcggcaggaggagcatgcctgtctccctggaggattctggtgagcccacgtcctgccccgccacagacgccgagacagcctccgagggcagcgtggaaagcgcttctgagaccagaagcggcccccagtctgcttccacagctgtgaaggaacgaccagcctcttctgaaaaggtgaaaggaggggatgaccacgatgacacctccgatagtgacagcgatggcctgaccttgaaagagcttcagaatcgccttcgcaggaagcgggaacaggagcccactgagaggcccctgaaagggatccagagtcgcctgcggaagaagcgccgggaggagggtcccgccgagactgtgggctccgaggccagtgacactgtggagggcgtcctgcccagtaagcaggagcccgagaacgatcagggggttgtgtcccaggctgggaaagatgacagagagagtaagttggagggaaaggcggctcaggacatcaaagatgaggagcctggagacttgggccgaccgaagcctgaatgtgagggttacgaccccaacgccctgtattgcatttgccgccagcctcacaacaacaggtttatgatttgctgtgaccgctgtgaagaatggtttcatggcgattgtgtgggcatttctgaggctcgagggaggcttttggaaaggaatggggaagactatatctgcccaaactgcaccattctgcaagtgcaggatgagactcattcagaaacggcagatcagcaggaagctaaatggagacctggagatgctgatggcaccgattgtacaagtataggaacaatagagcagaagtctagcgaagaccaagggataaagggtagaattgagaaagctgcaaatccaagtggcaagaagaaactcaagatcttccagcctgtgatagaggcgcctggtgcctcaaaatgtattggccccgggtgctgtcacgtggcgcagcccgactcggtgtactgcagtaatgactgtatcctcaaacacgccgcagcgacaatgaagtttctaagctcaggtaaagaacagaagccaaagcctaaagaaaagatgaagatgaagccagagaagcccagtcttccgaaatgcggtgctcaggcaggtattaaaatctcttctgtgcacaagagaccagctccagaaaaaaaagagaccacagtgaagaaggcagtggtggtccctgcgcggagtgaagcactcgggaaggaagcagcttgtgagagcagcacgccgtcgtgggcgagcgatcacaattacaatgcagtaaagccagaaaagactgctgctccctcgccgtcactgttgtataaatgctctggtaagtattcgtattctcttcatcccagtctgattgcatagccacactgcccggcacgccacatccacccctgtctgcacatgagttgttctgacaacagcgctgtatacgcttcagtttttccacattgtccacggccagcacatgaaagcatcacttcttttttatgttgtgggaatctttgcaagttagtgttgcatctgattttcaggtgtacatttatttttgactgggcagataggggatttttttttttccatgtccgattcacacgctacacacccacatgaacacattcgaacttcgaaggccacacactcctgcttcataggccccacggtaagtgagttcacacctagaacactgtcctgaccgcaggacgcgtgccttggacttggtattctacatgtgactggctttcttgccctcgtctcttgaatgtttagactcttaagatcatatcctgccccaaatttcaaattaatgaaatgaagatatttcaaacagatctttgaaacctcagattctgtggtgcaattttaatgttttcttgtttctcagttttctgctataaaactattttcaattca

SEQ ID NO: 211343 - DNA, 2704 bp, Artificial Sequence
  derived and/or modified sequence
ggggaaatggctgcgagaccctagaggcctgcggagcttactccacgggaacagcctctagataatctgagttgttgaaaatacgaagcctgttactcgtgaacagtggctgacaacagtgttgttgtgagcctggctgtctgcttggacccagaggtttcgtctgccagggtttttggttgtatttaggatttcagggaaaagtgtccaagctttcagtgttggagcaggtatggacgacaaaggcgacccgagcaatgaggaggcacctaaggccatcaaacccaccagcaaagagttcaggaaaacatggggttttcgaaggaccactatcgccaagcgagagggcgcaggggacgcggaggctgacccactggagccgccacccccacagcagcagctgggcctgtccctgcggcgcagtgggaggcagcccaagcgcactgagcgcgtggagcagttcctgaccattgcgcggcgccgcggcaggaggagcatgcctgtctccctggaggattctggtgagcccacgtcctgccccgccacagacgccgagacagcctccgagggcagcgtggaaagcgcttctgagaccagaagcggcccccagtctgcttccacagctgtgaaggaacgaccagcctcttctgaaaaggtgaaaggaggggatgaccacgatgacacctccgatagtgacagcgatggcctgaccttgaaagagcttcagaatcgccttcgcaggaagcgggaacaggagcccactgagaggcccctgaaagggatccagagtcgcctgcggaagaagcgccgggaggagggtcccgccgagactgtgggctccgaggccagtgacactgtggagggcgtcctgcccagtaagcaggagcccgagaacgatcagggggttgtgtcccaggctgggaaagatgacagagagagtaagttggagggaaaggcggctcaggacatcaaagatgaggagcctggagacttgggccgaccgaagcctgaatgtgagggttacgaccccaacgccctgtattgcatttgccgccagcctcacaacaacaggtttatgatttgctgtgaccgctgtgaagaatggtttcatggcgattgtgtgggcatttctgaggctcgagggaggcttttggaaaggaatggggaagactatatctgcccaaactgcaccattctgcaagtgcaggatgagactcattcagaaacggcagatcagcaggaagctaaatggagacctggagatgctgatggcaccgattgtacaagtataggaacaatagagcagaagtctagcgaagaccaagggataaagggtagaattgagaaagctgcaaatccaagtggcaagaagaaactcaagatcttccagcctgtgatagaggcgcctggtgcctcaaaatgtattggccccgggtgctgtcacgtggcgcagcccgactcggtgtactgcagtaatgactgtatcctcaaacacgccgcagcgacaatgaagtttctaagctcaggtaaagaacagaagccaaagcctaaagaaaagatgaagatgaagccagagaagcccagtcttccgaaatgcggtgctcaggcaggtattaaaatctcttctgtgcacaagagaccagctccagaaaaaaaagagaccacagtgaagaaggcagtggtggtccctgcgcggagtgaagcactcgggaaggaagcagcttgtgagagcagcacgccgtcgtgggcgagcgatcacaattacaatgcagtaaagccagaaaagactgctgctccctcgccgtcactgttgtataaatgtatgtatcacctaggggttggcctcctggacccctcccgttctttctggatagccatcccctgggcctgtccaggactgggagttgcagctttgtgttaagctgatcacagacaccggctgcaccatcagcgggaagcagagcccatgtccaggatgcctcctgctgccctgtgtccatccctagtctgtcaggacttcctgtcactgttttccaaagctgtaaacctcactggtgaacgttcaccttaatgattgattctttaatctctgttttcactctcaggctctggtaagtattcgtattctcttcatcccagtctgattgcatagccacactgcccggcacgccacatccacccctgtctgcacatgagttgttctgacaacagcgctgtatacgcttcagtttttccacattgtccacggccagcacatgaaagcatcacttcttttttatgttgtgggaatctttgcaagttagtgttgcatctgattttcaggtgtacatttatttttgactgggcagataggggatttttttttttccatgtccgattcacacgctacacacccacatgaacacattcgaacttcgaaggccacacactcctgcttcataggccccacggtaagtgagttcacacctagaacactgtcctgaccgcaggacgcgtgccttggacttggtattctacatgtgactggctttcttgccctcgtctcttgaatgtttagactcttaagatcatatcctgccccaaatttcaaattaatgaaatgaagatatttcaaacagatctttgaaacctcagattctgtggtgcaattttaatgttttcttgtttctcagttttctgctataaaactattttcaattcagtc

SEQ ID NO: 211344 - DNA, 2833 bp, Artificial Sequence
  derived and/or modified sequence
gtacttgcgcagaactcccctcgcggcgaccacgcactacgggttggcgccagagtcaaaaggcgtcggccctctggcaagatggctgctgcggaggcgttggagcgcggaaatctggaaccgggatggcgacgtctacactgagtcggaggcgaaggagcttactccacgggaacagcctctagataatctgagttgttgaaaatacgaagcctgttactcgtgaacagtggctgacaacagtgttgttgtgagcctggctgtctgcttggacccagaggtttcgtctgccagggtttttggttgtatttaggatttcagggaaaagtgtccaagctttcagtgttggagcaggtatggacgacaaaggcgacccgagcaatgaggaggcacctaaggccatcaaacccaccagcaaagagttcaggaaaacatggggttttcgaaggaccactatcgccaagcgagagggcgcaggggacgcggaggctgacccactggagccgccacccccacagcagcagctgggcctgtccctgcggcgcagtgggaggcagcccaagcgcactgagcgcgtggagcagttcctgaccattgcgcggcgccgcggcaggaggagcatgcctgtctccctggaggattctggtgagcccacgtcctgccccgccacagacgccgagacagcctccgagggcagcgtggaaagcgcttctgagaccagaagcggcccccagtctgcttccacagctgtgaaggaacgaccagcctcttctgaaaaggtgaaaggaggggatgaccacgatgacacctccgatagtgacagcgatggcctgaccttgaaagagcttcagaatcgccttcgcaggaagcgggaacaggagcccactgagaggcccctgaaagggatccagagtcgcctgcggaagaagcgccgggaggagggtcccgccgagactgtgggctccgaggccagtgacactgtggagggcgtcctgcccagtaagcaggagcccgagaacgatcagggggttgtgtcccaggctgggaaagatgacagagagagtaagttggagggaaaggcggctcaggacatcaaagatgaggagcctggagacttgggccgaccgaagcctgaatgtgagggttacgaccccaacgccctgtattgcatttgccgccagcctcacaacaacaggtttatgatttgctgtgaccgctgtgaagaatggtttcatggcgattgtgtgggcatttctgaggctcgagggaggcttttggaaaggaatggggaagactatatctgcccaaactgcaccattctgcaagtgcaggatgagactcattcagaaacggcagatcagcaggaagctaaatggagacctggagatgctgatggcaccgattgtacaagtataggaacaatagagcagaagtctagcgaagaccaagggataaagggtagaattgagaaagctgcaaatccaagtggcaagaagaaactcaagatcttccagcctgtgatagaggcgcctggtgcctcaaaatgtattggccccgggtgctgtcacgtggcgcagcccgactcggtgtactgcagtaatgactgtatcctcaaacacgccgcagcgacaatgaagtttctaagctcaggtaaagaacagaagccaaagcctaaagaaaagatgaagatgaagccagagaagcccagtcttccgaaatgcggtgctcaggcaggtattaaaatctcttctgtgcacaagagaccagctccagaaaaaaaagagaccacagtgaagaaggcagtggtggtccctgcgcggagtgaagcactcgggaaggaagcagcttgtgagagcagcacgccgtcgtgggcgagcgatcacaattacaatgcagtaaagccagaaaagactgctgctccctcgccgtcactgttgtataaatgtatgtatcacctaggggttggcctcctggacccctcccgttctttctggatagccatcccctgggcctgtccaggactgggagttgcagctttgtgttaagctgatcacagacaccggctgcaccatcagcgggaagcagagcccatgtccaggatgcctcctgctgccctgtgtccatccctagtctgtcaggacttcctgtcactgttttccaaagctgtaaacctcactggtgaacgttcaccttaatgattgattctttaatctctgttttcactctcaggctctggtaagtattcgtattctcttcatcccagtctgattgcatagccacactgcccggcacgccacatccacccctgtctgcacatgagttgttctgacaacagcgctgtatacgcttcagtttttccacattgtccacggccagcacatgaaagcatcacttcttttttatgttgtgggaatctttgcaagttagtgttgcatctgattttcaggtgtacatttatttttgactgggcagataggggatttttttttttccatgtccgattcacacgctacacacccacatgaacacattcgaacttcgaaggccacacactcctgcttcataggccccacggtaagtgagttcacacctagaacactgtcctgaccgcaggacgcgtgccttggacttggtattctacatgtgactggctttcttgccctcgtctcttgaatgtttagactcttaagatcatatcctgccccaaatttcaaattaatgaaatgaagatatttcaaacagatctttgaaacctcagattctgtggtgcaattttaatgttttcttgtttctcagttttctgctataaaactattttcaattcagtctttaa

SEQ ID NO: 211345 - DNA, 1635 bp, Artificial Sequence
  derived and/or modified sequence
atggatgacaagggggaccccagcaatgaggaggcccccaaggccatcaagcccaccagcaaggagttcaggaagacctggggcttccggaggaccaccatcgccaagcgggagggcgctggagatgctgaggccgaccccctggagcccccaccaccccagcagcagctgggcctgagcctgcggcgcagcggccggcagcccaagaggacagagcgggtggagcagttcctgaccatcgccaggagaagaggccgccgctccatgcctgtgtccctggaggacagcggggagcccaccagctgcccagccacagatgctgagacagccagcgagggctctgtggagagcgccagcgagaccaggagcggcccccagagcgccagcacagctgtgaaggagaggcctgccagcagcgagaaggtgaagggaggagatgaccatgatgacaccagtgacagcgacagtgatggcctgaccctgaaggagctgcagaaccggctgcggaggaagcgggagcaggagcccacagagcggcccctgaagggcatccagagccggctgaggaagaagaggcgggaggagggccctgctgagaccgtgggcagcgaggccagtgacacagtggagggcgtgctgcccagcaagcaggagccagaaaatgaccagggcgtggtgtcccaggccggcaaggatgaccgggagagcaagctggagggcaaggccgcccaggacatcaaggatgaggagcccggggacctgggccggcccaagccagaatgtgagggctatgaccccaatgccctgtactgcatctgccggcagccccacaacaaccgcttcatgatctgctgtgacagatgtgaggagtggttccatggagactgtgtgggcatcagcgaggcccggggccgcctgctggagagaaatggagaggactacatctgccccaactgcaccatcctgcaggtgcaggatgagacccacagcgagacagctgaccagcaggaggccaagtggaggcctggagatgctgatggaacagactgcaccagcatcggcaccatcgagcagaagagcagcgaggaccagggcatcaagggccgcatcgagaaggccgccaaccccagcggcaagaagaagctgaagatcttccagcctgtgattgaggcccctggggccagcaagtgcatcggccctggctgctgccacgtggcccagcctgacagcgtgtactgcagcaatgactgcatcctgaagcacgccgccgccaccatgaagttcctgagcagcggcaaggagcagaagcccaagcccaaggagaagatgaagatgaagccagagaagcccagcctgcccaagtgtggggcccaggccggcatcaagatcagctctgtgcacaagaggcctgcccctgagaagaaggagaccaccgtgaagaaggctgtggtggtgcctgcccggtctgaggccctgggcaaggaggccgcctgtgagagcagcacccccagctgggccagtgaccacaactacaatgctgtgaagccagagaagacagctgcccccagccccagcctgctgtacaagtgcagcggcaagtacagctacagcctgcaccccagcctgattgcctag

SEQ ID NO: 211346 - DNA, 1689 bp, Artificial Sequence
  derived and/or modified sequence
atggatgacaagggggaccccagcaatgaggaggcccccaaggccatcaagcccaccagcaaggagttcaggaagacctggggcttccggaggaccaccatcgccaagcgggagggcgctggagatgctgaggccgaccccctggagcccccaccaccccagcagcagctgggcctgagcctgcggcgcagcggccggcagcccaagaggacagagcgggtggagcagttcctgaccatcgccaggagaagaggccgccgctccatgcctgtgtccctggaggacagcggggagcccaccagctgcccagccacagatgctgagacagccagcgagggctctgtggagagcgccagcgagaccaggagcggcccccagagcgccagcacagctgtgaaggagaggcctgccagcagcgagaaggtgaagggaggagatgaccatgatgacaccagtgacagcgacagtgatggcctgaccctgaaggagctgcagaaccggctgcggaggaagcgggagcaggagcccacagagcggcccctgaagggcatccagagccggctgaggaagaagaggcgggaggagggccctgctgagaccgtgggcagcgaggccagtgacacagtggagggcgtgctgcccagcaagcaggagccagaaaatgaccagggcgtggtgtcccaggccggcaaggatgaccgggagagcaagctggagggcaaggccgcccaggacatcaaggatgaggagcccggggacctgggccggcccaagccagaatgtgagggctatgaccccaatgccctgtactgcatctgccggcagccccacaacaaccgcttcatgatctgctgtgacagatgtgaggagtggttccatggagactgtgtgggcatcagcgaggcccggggccgcctgctggagagaaatggagaggactacatctgccccaactgcaccatcctgcaggtgcaggatgagacccacagcgagacagctgaccagcaggaggccaagtggaggcctggagatgctgatggaacagactgcaccagcatcggcaccatcgagcagaagagcagcgaggaccagggcatcaagggccgcatcgagaaggccgccaaccccagcggcaagaagaagctgaagatcttccagcctgtgattgaggcccctggggccagcaagtgcatcggccctggctgctgccacgtggcccagcctgacagcgtgtactgcagcaatgactgcatcctgaagcacgccgccgccaccatgaagttcctgagcagcggcaaggagcagaagcccaagcccaaggagaagatgaagatgaagccagagaagcccagcctgcccaagtgtggggcccaggccggcatcaagatcagctctgtgcacaagaggcctgcccctgagaagaaggagaccaccgtgaagaaggctgtggtggtgcctgcccggtctgaggccctgggcaaggaggccgcctgtgagagcagcacccccagctgggccagtgaccacaactacaatgctgtgaagccagagaagacagctgcccccagccccagcctgctgtacaagtgcatgtaccacctgggcgtgggcctgctggaccccagccgctccttctggatcgccatcccctgggcctgccccggcctgggcgtggccgccctgtgctag

SEQ ID NO: 211347 - DNA, 1635 bp, Artificial Sequence
  derived and/or modified sequence
atggacgacaagggcgaccccagcaacgaggaggcccccaaggccatcaaaccaacatcgaaagaattcaggaagacttgggggttccgcaggacaacgatcgccaaaagggagggggctggtgacgccgaggccgatccactggagccaccaccccctcaacaacaactgggtctgtctttgagacggagtggccgacagcctaaacggacagagagagtggagcagttccttacgattgcccgacggagaggcaggagatcgatgccagtgtcacttgaagacagtggagaacccacatcttgcccagcaactgacgccgagaccgctagcgaaggcagcgtggagagcgcctccgaaacacgttccgggccccagagcgcgagcactgccgtcaaggaaagacctgcctccagtgagaaggtcaaagggggggatgaccatgatgatacgagtgacagcgactcagacggacttacccttaaagaactccaaaatcgcctgcgacggaaaagagaacaggagcccaccgaaagaccgctgaaagggatccaatctcgcctgcgcaagaaacgcagagaagaagggcccgctgaaacagtcggaagtgaagcgtccgatactgtggaaggagttctccctagtaagcaggaacccgaaaacgatcaaggggtggtgtcacaggcaggaaaagacgacagggagagtaagttagaaggaaaggcggctcaggacatcaaggatgaggagcccggggacctgggacggcctaagcctgaatgtgaaggatacgacccgaacgctctgtactgtatctgtagacagccgcataataatcggttcatgatttgctgcgacaggtgtgaagaatggttccacggggactgtgtgggcattagtgaggcgcggggacgtctcctggaaaggaacggtgaagattacatttgccccaactgcaccattctgcaggtccaggatgaaacacacagcgaaactgccgaccagcaggaggcaaagtggcgtcctggcgatgccgacggcacagattgtactagcatcggtaccattgagcagaagtcctcggaagaccaagggataaaggggcgaattgaaaaagccgctaatcccagcggcaagaagaagctgaaaatatttcaacctgtcatcgaagcccccggtgcctcaaagtgcatcgggcccggctgttgccatgttgctcaacctgatagtgtctactgtagtaatgattgcatcctgaagcacgccgccgctaccatgaagttccttagtagcggcaaggagcagaagcccaaacccaaagagaagatgaagatgaaacccgaaaagcccagcctccctaagtgtggagcgcaggcggggataaaaattagcagtgtgcataagagaccagcacctgagaagaaagaaacgacggtaaaaaaggccgttgtggtccccgccagatccgaagctctgggaaaagaagctgcgtgcgaaagcagtactccctcgtgggcctccgatcataactataatgcggtcaagccggagaaaactgctgcccctagtccatcccttctgtataaatgcagcggcaagtactcttactccttacacccctccctgatagcatag

SEQ ID NO: 211348 - DNA, 1689 bp, Artificial Sequence
  derived and/or modified sequence
atggacgacaagggcgaccccagcaacgaggaggcccccaaggccatcaaaccgacatctaaggaattcaggaagacgtggggctttcggcgcaccactatcgccaagagagagggcgccggagatgccgaggcagacccgctggaacctccaccacctcagcagcaattgggactaagcctgcgccggtcgggccggcagccaaagcgtacggaacgcgtggagcagtttcttaccatcgcaagacgtcgcgggaggcgatctatgcccgtgtcacttgaagatagcggggagcccacttcatgccccgccacggacgccgagacagcctccgagggctccgttgaatcagcttctgagactagatcaggtcctcagtcggctagcactgctgtgaaagagagacctgcttcttcagagaaggttaaaggaggcgacgaccacgacgatacatcagacagtgactcagatggcctaaccctgaaggaactgcagaatcgccttagacgaaagcgggagcaggaaccaactgagcgccctctcaaaggcattcagagcaggctgcgtaaaaagcggagagaagaagggcccgccgagacggtggggtcagaggccagtgatacagtagagggggttctcccttctaagcaggagcctgaaaacgatcagggcgtcgtttcccaggcaggcaaggacgacagggaaagtaagctggagggtaaggcggcacaagacatcaaggatgaggagccgggtgacctgggcagacccaagcctgagtgcgagggctacgatccaaatgccctgtactgcatttgcagacagccgcacaacaaccgcttcatgatttgctgcgacaggtgtgaggaatggtttcacggcgactgcgtgggcatctcagaggcgcgggggaggttactggagcggaatggggaggactacatctgtccaaattgcactattttgcaggtccaagacgagacacatagtgaaaccgccgaccagcaggaagccaaatggaggcccggcgacgctgacggaacagattgtactagcatcggaaccatcgagcagaaatcctcagaggatcagggcatcaagggccggattgaaaaagcggccaacccctctggtaaaaaaaaactaaagatctttcagccagtcatcgaggctcctggtgcatctaaatgtatcggccctggttgttgtcatgtcgcacagcctgacagtgtctactgcagcaatgattgtatccttaaacatgcggcggcaacgatgaagttcctctcaagcggcaaggagcagaagcctaaacccaaggagaagatgaaaatgaaacctgagaagccgtcgctgccgaaatgtggtgcacaggccggcataaagatcagttccgtgcacaaacgaccagcccctgagaagaaagaaaccaccgttaagaaagctgtcgtggttcccgccagatctgaagcactcggtaaggaggcagcctgtgagagttctacgccttcatgggcatccgatcacaattacaacgcggtaaagccggagaaaacagctgccccttcaccgtccctactgtacaaatgtatgtaccacctgggtgtgggattactggaccctagtagaagcttttggatcgccataccatgggcatgccccggactaggtgtagcagccttgtgctag

SEQ ID NO: 211349 - DNA, 1635 bp, Artificial Sequence
  derived and/or modified sequence
atggacgacaagggcgaccccagcaacgaggaggcccccaaggccatcaagccaaccagcaaagaattcaggaagacttgggggttccgccggacaacaatcgccaaaagggaaggtgctggggacgccgaagccgaccctctcgaaccccctcccccacagcagcagcttgggctgagcctccggaggagtggacggcagccgaagagaaccgagcgggttgagcaattcctgactattgcacggagaagagggagacggtcgatgcccgtcagcctcgaagattcgggtgaacccacaagttgcccagctacggacgctgaaaccgcttcagagggaagtgtcgagagcgcgtctgagacgaggtcaggaccacagtccgcatcaacggccgtcaaggaacgacctgcctcttctgagaaggtcaagggtggcgatgatcacgacgatacgtccgattctgactctgacggccttaccctcaaggagcttcagaacaggctcagaagaaagcgtgagcaggagcccaccgaacgacccctgaaagggatccagagccgtctgaggaagaagagacgagaagaagggcctgctgagaccgtcgggtcggaagcctccgataccgtggagggtgtcctgcctagtaagcaagagcctgaaaacgatcagggcgttgtgtcccaagcaggtaaagacgaccgggaatccaaactcgaggggaaggcggcacaggatatcaaggatgaggaaccaggggatttaggccgccccaaaccagaatgtgaggggtacgacccgaacgccctctactgtatctgtcggcagccgcacaacaacagatttatgatctgctgcgatcggtgtgaggagtggtttcacggtgattgcgtcggaataagcgaagctaggggcaggctgctggaacggaacggagaggactacatttgcccaaactgcacaattctgcaagtccaagacgaaacacacagcgaaaccgcagatcaacaagaagctaagtggaggcctggcgatgctgatgggacagactgtacgtcaattggtacaattgaacagaaaagctccgaggaccagggtattaagggcagaatcgaaaaggcagccaatcctagcggcaagaagaagctgaaaattttccagcccgttattgaggcccccggcgcctcgaaatgtattggcccaggatgttgccatgtcgcccagccagactcagtgtactgctccaatgattgtatcctgaagcacgctgccgccacaatgaaatttctttcctcaggaaaggaacagaaaccaaagcccaaagagaaaatgaaaatgaaaccagaaaaaccaagcctgcctaaatgcggcgctcaggctggcatcaagatttcttcggtgcataagcgacctgcccccgagaaaaaagagacaaccgtcaagaaggccgtggtggttccggcaaggtcagaggccctggggaaggaggccgcatgcgaatctagtacaccatcatgggcctctgatcataactataacgccgtgaaaccagagaaaaccgcagctccgagccccagtctgctgtacaagtgcagtggaaaatactcctacagcttacaccccagcctcattgcctag

SEQ ID NO: 211350 - DNA, 1689 bp, Artificial Sequence
  derived and/or modified sequence
atggacgacaagggcgaccccagcaacgaggaggcccccaaggccattaaacctacctccaaagaattccgaaagacatgggggtttcgcaggaccaccattgcaaagagagagggagccggggatgcagaggccgaccccttggagccgccaccccctcaacagcagctcggcttgtcattgaggagaagtgggcgtcagcctaaaaggacagaaagggtggaacagttcctgacaatagctagacgacgtggcaggagaagcatgcctgtgtcgttggaagacagcggggagcccactagttgccccgccaccgacgcagagaccgcaagcgaaggatcagtcgaatccgccagtgaaacgcgctccggtccccagtctgcctctactgcagtgaaagagagaccagcctcaagtgaaaaagtgaaaggcggggacgatcacgatgataccagcgatagtgattctgacggtctgactctcaaggagttacagaacagactgcgtcgcaaacgggagcaggaaccaacagaaagaccactgaagggtatacaatctaggttgagaaaaaaaaggcgtgaggagggacccgctgaaacagtgggttctgaagcctcggatacagtggagggggtgctaccctctaagcaggagcccgaaaatgaccaaggtgtagtctctcaggctggcaaggacgaccgtgagtcaaagctggagggtaaggccgcccaggatataaaagatgaagagccgggggacctaggccgcccgaagcccgaatgtgaaggctacgatcctaacgctttatactgcatctgtagacaaccgcataataaccgatttatgatctgttgtgataggtgcgaagagtggttccacggagactgcgtgggaattagtgaggctagggggagacttctcgaacggaacggtgaggattatatctgtccgaactgcacaatccttcaggtgcaggatgagacacactctgagacggccgaccagcaggaggctaaatggcgacctggtgacgcagacggaacggactgtaccagcatcggaacaatcgagcagaagagtagcgaagaccaaggcataaagggacgcatcgagaaggctgcaaacccctctggcaagaaaaagctgaaaattttccagcctgtgatcgaggctcctggcgcttcaaaatgtatcggcccagggtgttgccatgtcgcccaaccggactcagtctattgcagcaatgattgtatccttaagcacgctgcggcaacgatgaaatttttatcctcaggtaaggaacagaagcctaagcctaaggagaaaatgaaaatgaagcccgagaagcccagcctccctaagtgtggcgcccaagccggcattaagatctcatccgtccacaaaagaccggcgcccgagaaaaaagagactaccgtaaaaaaagccgtggtcgtcccggccagatccgaagctttgggaaaggaagctgcttgcgaaagcagcaccccaagttgggcgtccgaccacaactataacgccgtgaagccagagaagactgcggcgccgtctccttcgctcctatataagtgtatgtaccacctgggcgtcgggctactggatccctctagaagtttctggatcgctatcccttgggcttgcccagggctcggcgtggcggctctgtgctag

SEQ ID NO: 211351 - DNA, 1689 bp, Artificial Sequence
  derived and/or modified sequence
atggacgacaagggcgaccccagcaacgaggaggcccccaaggccatcaaacccacatcaaaagagttcaggaaaacatggggattccgacgcactactattgccaagcgagagggcgcgggcgacgccgaggccgaccctctggaaccacccccccctcagcagcagctcggtcttagcctgcgcaggagtgggcgtcagcctaagcgcaccgagcgcgtggagcagtttctcactatcgcccgaaggcgcggcagaaggtcaatgcctgtgtccctggaagattccggcgaacccaccagctgtcctgctaccgatgccgagaccgcttctgaaggctccgtcgaatcggctagtgagaccaggagtggcccccagtccgctagcacggcagtcaaagagcgccccgcgtctagcgagaaagtgaaaggcggggatgatcatgacgacaccagtgatagcgactcagacggtctgaccctgaaggagctccaaaaccgcctacgccgcaagcgagagcaggagcctactgagcgccctctcaaggggattcagagccggctcaggaaaaaacggagagaggagggaccggcagaaaccgtcggcagtgaggcttccgatacagtggaaggagtgttaccatcgaaacaggagcctgagaatgaccagggagtcgtgagccaagctggaaaggatgatagagagagcaagcttgaaggaaaggctgcccaggacataaaggatgaggagccaggggatcttggccgccccaagccagagtgcgaaggttacgaccccaacgcactctattgcatttgccgacaaccgcacaataatcgcttcatgatctgttgtgaccgctgcgaggaatggtttcatggcgactgcgtcggcatcagtgaagcaagggggcgcctcctcgagagaaacggtgaggactacatctgtcccaattgcacaatcttgcaagtccaagacgagacccatagcgaaactgctgaccaacaggaggcaaaatggagacccggcgacgctgatggcactgattgcactagcattggcacgatcgagcagaaaagttcggaggatcagggcatcaagggccgtatagagaaagccgctaacccaagtggaaagaaaaaactgaaaattttccagcctgtaatcgaggcacccggcgctagcaaatgcattggtcccggatgttgtcacgtggcccaaccagatagtgtttactgctcgaacgactgtatcctgaagcacgctgctgctaccatgaaattcctttccagtggtaaagaacagaaacccaagccaaaggagaagatgaagatgaagcctgagaaaccttctctccctaagtgcggagcacaggccggcatcaagatttccagcgtccataagaggcccgcccctgaaaaaaaggagacgactgtgaagaaagccgttgtagtgccagcccgcagtgaggctctgggaaaagaggctgcatgtgaatcttctacgcctagctgggcatccgaccataattacaacgcagtgaaacccgaaaagacagccgctccctctccatcactgctgtacaaatgcatgtaccacctgggcgttgggctgctggacccctcacgaagtttctggattgctattccctgggcttgcccagggctgggggtggccgctctctgttag

SEQ ID NO: 211352 - DNA, 1635 bp, Artificial Sequence
  derived and/or modified sequence
atggatgacaaaggtgaccccagcaacgaggaggcgccaaaagccatcaagcctaccagcaaggagttcagaaaaacctgggggtttagacggacaacaatcgcaaaaagagaaggcgctggtgacgccgaagccgatcctctcgagccccctcctccccagcaacaattgggtttaagccttcggagaagcggcagacaaccgaagagaacggaaagagtagagcagtttctaacaatagcccgaagacgcggacggagaagcatgcctgtatccttggaggacagtggggaacctacaagctgtccagccaccgacgcagaaacagccagtgagggatcagttgaatccgcctcggagacacgttccggtccacagtccgcgtccacggcagtgaaagaacggcctgcctcctccgaaaaggtcaagggcggagacgaccacgacgacacatcggattcagacagtgatggccttactttaaaggagttgcagaaccgactcaggaggaaaagagaacaggagcccactgagagacctctgaaaggcattcagtctaggctaaggaagaaaagaagggaagagggtcctgcggaaaccgtgggctcggaggcttctgacaccgtggaaggcgttctgccctccaagcaagaacctgagaacgatcagggagtggttagtcaggctggaaaggatgacagagaaagcaaacttgaggggaaagctgcgcaggatatcaaggatgaagaaccgggagacctggggaggcctaagccagaatgtgaggggtatgaccctaatgccttatactgcatttgccggcagccacacaacaatcggttcatgatttgttgcgatcgctgtgaggagtggtttcatggtgattgcgtcggcatcagtgaagcgaggggcaggttgctggaacggaacggcgaggattacatctgtccaaactgtaccatactgcaagtgcaggatgagacacacagcgagaccgccgaccaacaggaggccaaatggagaccaggcgacgcagacggcaccgattgcacttcgatcgggactatcgagcaaaagtcttcagaagaccaggggatcaagggccgaatagaaaaggccgcaaatccctccggcaaaaagaagctgaaaatatttcagcctgtgattgaggctcctggagcatccaaatgtattggcccaggctgctgtcacgtggcccaacctgactccgtatactgcagtaatgactgcatcttgaagcatgccgctgctaccatgaaattcctctcctccggtaaagagcagaagcccaagcctaaggaaaagatgaagatgaaaccagagaagcctagcctgccaaaatgtggagctcaagcagggatcaagatttcatcagtccataagaggccagcgcctgagaagaaagagacaacagtaaagaaagcggtggtagtgccagctcgaagcgaggcactaggcaaggaagccgcatgcgagagttctaccccctcttgggcctctgaccataactataatgctgtcaagcctgagaaaacagcagccccttcaccaagcctgttgtacaaatgttcaggtaaatattcttactccttgcatccttctctgatagcctag

SEQ ID NO: 211353 - DNA, 1689 bp, Artificial Sequence
  derived and/or modified sequence
atggatgacaagggtgatccttcaaatgaggaagcgccaaaggcaatcaaacctacttctaaagagttcagaaaaacctggggtttcagaaggaccaccattgccaagcgggagggagcgggagatgctgaagcagatccactggaaccccctccgcctcagcagcagctcgggctgtccctccggcgtagcggtcgacagcctaaacggactgagcgcgtcgagcagtttctgaccatcgccaggcgaaggggtagaaggtcaatgcctgtttccctggaagatagtggggaacctaccagctgtcctgcgactgacgcggaaaccgccagtgagggcagtgttgagtctgcctcagagaccagatccgggccacagtcagcatctacagccgtcaaggaaagaccagcttcctcggagaaagtcaaggggggagatgaccatgatgacacgtcggactccgactccgatggtctcactctcaaggagctccagaatagactcagacggaagcgagagcaggagcctacggagcgtcccttgaagggtatccagagccgtctcagaaagaagcgacgcgaggaagggccagccgagaccgtgggctccgaagccagcgacacggttgagggggtgttgccttccaagcaggaacccgaaaatgatcagggagtggtgagccaggccggaaaggacgatagagagtctaagctggagggaaaggctgctcaggatatcaaagacgaagagcccggagacctgggcaggccaaagcccgagtgtgagggatatgatcctaatgcactctattgcatctgtcgacaaccccacaacaataggttcatgatctgttgcgataggtgcgaggagtggttccatggggattgcgttgggatttccgaggcccgagggaggcttctcgaacgcaatggcgaagattatatctgtcctaactgtacgatcctgcaagtgcaggacgagacacactccgaaactgccgatcaacaggaagccaaatggcgccctggagatgctgatggtaccgattgcacatcaatcggaaccatcgaacagaaatccagcgaggaccagggtatcaagggccgaatcgaaaaagccgcaaacccctccgggaagaaaaagctgaagatcttccagcctgtgattgaggccccaggcgcatcaaaatgtatcggacctggctgctgccatgtggcccagcccgactctgtttattgttccaacgattgtatactcaagcacgcagcagcgacaatgaagttcttgagctccgggaaggaacagaaaccaaaacccaaagaaaagatgaaaatgaagccagagaaaccttccttaccaaagtgtggcgcacaagctggaatcaaaatcagctccgtgcacaaaagacctgctccagagaagaaggagacgaccgtgaagaaggcagtcgtggtgccagccaggtcagaggcactcggcaaagaggccgcatgcgagagttccacccctagctgggcaagcgaccacaattacaacgctgtgaagcccgaaaaaactgctgcaccaagcccttcgcttctgtataagtgcatgtatcatctcggggtgggtctcctcgatccatcacgaagcttctggatcgccatcccctgggcctgtcccggtctcggcgtggcggctctttgctag

SEQ ID NO: 211354 - DNA, 1635 bp, Artificial Sequence
  derived and/or modified sequence
atggacgataagggtgacccttccaatgaagaggctcccaaggctatcaagcctacttccaaggaattcagaaagacatggggcttccgcaggaccaccattgcgaaacgcgagggagccggagatgccgaagcagatccgctcgagcccccacctcctcagcagcaactaggtttatcccttcggagaagtgggagacagcctaaacgcaccgaacgggtagaacaattccttactattgcaagacgacgcggacgcagaagcatgcccgtgtccctcgaggatagcggagaaccaacgtcatgccccgctacagacgccgagacagctagcgagggatcagtggaatctgctagcgagacacgctctggcccacagagtgctagcactgcggtgaaagagcggcctgctagctccgagaaggttaaggggggagacgatcacgatgacacctctgattctgactccgatggactgacattgaaagagctccagaataggctgcgacgcaagcgggaacaggagcctaccgagagacccctcaaggggatacagtcacgactccgtaagaagaggcgcgaagagggcccagccgagacagtgggtagcgaggccagtgatactgttgagggcgttttgccctcgaaacaagagccggaaaatgatcaaggcgtcgtatcccaggctggtaaggacgaccgggaatcaaagctggagggaaaggctgctcaagacatcaaagatgaggaacctggcgatcttggacggccaaagccagaatgtgaagggtatgatcccaatgccctgtattgcatttgtcggcagccgcacaacaatagatttatgatttgctgcgacagatgtgaggagtggtttcatggtgactgtgtgggcataagcgaggccagggggaggctgctggaaagaaatggcgaggactatatttgcccgaattgtactattctgcaggtccaggacgagacccatagtgagacagctgatcagcaggaggctaagtggagacccggagatgctgatggtacagattgcacatctatcggtacgatcgagcagaagtcatctgaagatcagggtatcaagggcagaattgaaaaggctgcaaacccatccggaaagaaaaagctgaagatctttcagcctgttattgaggcgccaggggctagtaagtgcatcggccctggctgttgtcacgtcgcccagcccgactcagtgtattgtagcaacgattgcattctcaagcacgctgcagccacaatgaaatttctgtcctcaggtaaggagcaaaagcccaaaccaaaggagaaaatgaagatgaagcctgagaagccttccctgcccaaatgtggggcacaggccggtattaagatcagttcagttcataaacggccagcccctgagaagaaggagaccactgtaaagaaagccgtcgtcgtacccgcaaggagcgaggccctgggcaaggaggctgcttgcgaatcatctacacccagctgggctagtgaccataattataacgccgttaaacctgaaaaaaccgcagcgccaagtccttctctgttgtacaaatgcagtgggaaatactcctactccttgcaccccagtttaatcgcatag

SEQ ID NO: 211355 - DNA, 1689 bp, Artificial Sequence
  derived and/or modified sequence
atggatgacaaaggggacccatctaacgaggaagccccaaaggccatcaagccaacatccaaagaatttcggaagacctggggattcagacgaaccacaatagccaagagagaaggagccggtgatgccgaagcggacccactggaacctccccctccgcagcagcaactcggccttagcctcaggcgtagcggccgacagcctaagcgaactgagcgggttgagcaatttctcaccatcgctagacgccgaggacggaggagcatgccggtgagcctggaggacagtggcgaaccaacatcttgtccagctacagatgctgaaactgcttccgaggggagcgttgaatctgctagcgaaactcgcagtggacctcaatcagcatccacagccgttaaggaaaggcctgcttcttctgagaaagtcaagggcggtgacgatcacgatgacacatctgactccgactctgatggcctgactctgaaagagcttcaaaatcgcctcagacggaaaagagaacaagagcctaccgagcgtcccctaaagggtatccagtctcgtctgaggaaaaaacgccgagaggaaggacccgcagaaactgttggctcagaagctagcgacaccgtagagggagtgttgccctccaaacaggagcctgaaaacgaccagggggtggtgtcacaggccggtaaggacgatcgggaatccaagctcgaaggaaaagcagctcaggacattaaggatgaggagccaggcgatttaggccgacccaagccagagtgtgagggatatgaccccaatgccctctattgcatctgccgccagccccataataaccgattcatgatatgctgcgacaggtgtgaagaatggtttcatggtgactgcgtgggaatctccgaggcaaggggcagactgctggaacgtaatggtgaggactatatctgccctaattgtaccatcctgcaagtccaagatgagacccactcagaaaccgccgatcagcaagaagcaaagtggcgccctggggacgcagatggaaccgattgcactagcataggtaccattgagcagaaatcgtcggaagaccaaggaattaaaggccgaattgaaaaggccgctaaccccagtggcaagaaaaagctgaagatctttcagcctgtcatcgaggcacctggagcctctaagtgcatcgggcctggctgctgccatgtggcccagcctgactccgtctactgttcaaatgactgtattctgaagcatgctgcggcaacgatgaagtttctttctagcggaaaagagcagaagccgaagcccaaggagaaaatgaagatgaagcctgagaaaccctctctgcccaagtgcggcgcacaggccggtatcaaaatttccagcgttcacaagagaccagctcccgaaaagaaggaaaccaccgtgaaaaaggcggtggtggtgcctgccaggtccgaagctctgggcaaagaggccgcttgtgaatcttcaactccttcctgggcctccgatcacaactataatgctgtcaagccagagaaaactgctgccccttctcctagtctcctctataaatgcatgtaccacctgggggtgggacttctcgacccttcacgttccttttggatcgctatcccctgggcttgcccaggcctgggggtggccgcattgtgttag

SEQ ID NO: 211356 - DNA, 1689 bp, Artificial Sequence
  derived and/or modified sequence
atggatgacaagggcgatccctctaatgaggaggctcctaaagccatcaaacccacaagcaaagaatttagaaagacctggggctttaggaggacaactatagcaaagagggagggagccggagatgctgaggcagacccccttgagccaccacctcctcagcagcaactggggttaagcttaaggaggagcgggcgtcagccaaagcgtaccgagagagtagaacagtttctgactatcgccaggagacggggtcgccgatccatgcccgtgagccttgaggacagtggagaacccacctcttgtccagcgactgacgcggaaactgcctctgaggggtcagtcgagtcggcttccgagacccgaagtggaccccaatccgcctcaacagcagtgaaggagagaccggcatctagcgaaaaggtgaaaggtggcgatgatcacgatgacaccagcgattctgattctgacggtctcacattaaaggaattgcaaaatagactgcgccgtaagagggagcaggagcccacagaacgaccattgaaggggatccagagcagactcagaaagaaacggcgagaagaaggcccagccgaaactgtcggcagtgaggccagcgataccgttgaaggcgttctgccatccaaacaggagcctgaaaatgaccaaggtgtggtttcccaggcgggtaaagatgatcgggaatccaagctcgagggcaaggccgctcaggacatcaaagatgaagagcctggtgacctgggacgccctaagcccgagtgtgaagggtatgaccctaatgcactgtattgcatttgccgacagccacataataataggttcatgatttgctgtgataggtgtgaagagtggtttcacggggattgcgtgggaatctcagaggctagagggaggcttctggaacgcaacggcgaggattatatttgccctaactgcactatcctgcaggtgcaggacgagactcattccgagactgccgaccagcaagaagcaaagtggcgaccaggtgacgcagacggtactgactgtacatccatcggcaccatcgaacagaaaagttccgaagaccagggcatcaaggggcgtatcgagaaggccgctaatccttcgggtaagaaaaagttgaagatcttccagcctgttatcgaagcacccggtgcctcaaagtgtatcggccctggctgttgtcacgtggcgcagcctgattctgtatattgcagcaacgattgtatactgaagcatgcggcagcgaccatgaagtttctctcttccggcaaagaacagaagcctaagcccaaggagaaaatgaaaatgaagcctgaaaagccatccctgccaaagtgcggcgctcaggccggtataaagattagcagcgtacacaaaagacccgcacctgagaagaaggagaccacagttaagaaagccgtagttgtgccggctcgcagtgaagctcttggcaaggaggccgcttgcgaatctagcactccatcctgggcatccgaccataattacaacgctgtgaagccagaaaagacagccgctccatcccccagcctactgtacaaatgtatgtaccatctcggtgtggggctgttagatccttccagaagcttctggatcgccattccgtgggcttgtcctggactgggggtggcagctttgtgctag

SEQ ID NO: 211357 - DNA, 1961 bp, Artificial Sequence
  derived and/or modified sequence
cacgcactacgggttggcgccagagtcaaaaggcgtcggccctctggcaagatggctgctgcggaggcgttggagcgcggaaatctggaaccgggatggcgacgtctacactgagtcggaggcgaaggagcttactccacgggaacagcctctagataatctgagttgttgaaaatacgaagcctgttactcgtgaacagtggctgacaacagtgttgttgtgagcctggctgtctgcttggacccagaggtttcgtctgccagggtttttggttgtatttaggatttcagggaaaagtgtccaagctttcagtgttggagcaggtatggacgacaaaggcgacccgagcaatgaggaggcacctaaggccatcaaacccaccagcaaagagttcaggaaaacatggggttttcgaaggaccactatcgccaagcgagagggcgcaggggacgcggaggctgacccactggagccgccacccccacagcagcagctgggcctgtccctgcggcgcagtgggaggcagcccaagcgcactgagcgcgtggagcagttcctgaccattgcgcggcgccgcggcaggaggagcatgcctgtctccctggaggattctggtgagcccacgtcctgccccgccacagacgccgagacagcctccgagggcagcgtggaaagcgcttctgagaccagaagcggcccccagtctgcttccacagctgtgaaggaacgaccagcctcttctgaaaaggtgaaaggaggggatgaccacgatgacacctccgatagtgacagcgatggcctgaccttgaaagagcttcagaatcgccttcgcaggaagcgggaacaggagcccactgagaggcccctgaaagggatccagagtcgcctgcggaagaagcgccgggaggagggtcccgccgagactgtgggctccgaggccagtgacactgtggagggcgtcctgcccagtaagcaggagcccgagaacgatcagggggttgtgtcccaggctgggaaagatgacagagagagtaagttggagggaaaggcggctcaggacatcaaagatgaggagcctggagacttgggccgaccgaagcctgaatgtgagggttacgaccccaacgccctgtattgcatttgccgccagcctcacaacaacaggtttatgatttgctgtgaccgctgtgaagaatggtttcatggcgattgtgtgggcatttctgaggctcgagggaggcttttggaaaggaatggggaagactatatctgcccaaactgcaccattctgcaagtgcaggatgagactcattcagaaacggcagatcagcaggaagctaaatggagacctggagatgctgatggcaccgattgtacaagtataggaacaatagagcagaagtctagcgaagaccaagggataaagggtagaattgagaaagctgcaaatccaagtggcaagaagaaactcaagatcttccagcctgtgatagaggcgcctggtgcctcaaaatgtattggccccgggtgctgtcacgtggcgcagcccgactcggtgtactgcagtaatgactgtatcctcaaacacgccgcagcgacaatgaagtttctaagctcaggtaaagaacagaagccaaagcctaaagaaaagatgaagatgaagccagagaagcccagtcttccgaaatgcggtgctcaggcaggtattaaaatctcttctgtgcacaagagaccagctccagaaaaaaaagagaccacagtgaagaaggcagtggtggtccctgcgcggagtgaagcactcgggaaggaagcagcttgtgagagcagcacgccgtcgtgggcgagcgatcacaattacaatgcagtaaagccagaaaagactgctgctccctcgccgtcactgttgtataaatgctctggtaagtattcgtattctcttcatcccagtctgattgcatag

SEQ ID NO: 211358 - DNA, 1635 bp, Artificial Sequence
  derived and/or modified sequence
atggacgacaagggcgaccccagcaacgaggaggcccccaaggccatcaagcccaccagcaaggagttcagaaagacctggggcttcagaagaaccaccatcgccaagagagagggcgccggcgacgccgaggccgaccccctggagcccccccccccccagcagcagctgggcctgagcctgagaagaagcggcagacagcccaagagaaccgagagagtggagcagttcctgaccatcgccagaagaagaggcagaagaagcatgcccgtgagcctggaggacagcggcgagcccaccagctgccccgccaccgacgccgagaccgccagcgagggcagcgtggagagcgccagcgagaccagaagcggcccccagagcgccagcaccgccgtgaaggagagacccgccagcagcgagaaggtgaagggcggcgacgaccacgacgacaccagcgacagcgacagcgacggcctgaccctgaaggagctgcagaacagactgagaagaaagagagagcaggagcccaccgagagacccctgaagggcatccagagcagactgagaaagaagagaagagaggagggccccgccgagaccgtgggcagcgaggccagcgacaccgtggagggcgtgctgcccagcaagcaggagcccgagaacgaccagggcgtggtgagccaggccggcaaggacgacagagagagcaagctggagggcaaggccgcccaggacatcaaggacgaggagcccggcgacctgggcagacccaagcccgagtgcgagggctacgaccccaacgccctgtactgcatctgcagacagccccacaacaacagattcatgatctgctgcgacagatgcgaggagtggttccacggcgactgcgtgggcatcagcgaggccagaggcagactgctggagagaaacggcgaggactacatctgccccaactgcaccatcctgcaggtgcaggacgagacccacagcgagaccgccgaccagcaggaggccaagtggagacccggcgacgccgacggcaccgactgcaccagcatcggcaccatcgagcagaagagcagcgaggaccagggcatcaagggcagaatcgagaaggccgccaaccccagcggcaagaagaagctgaagatcttccagcccgtgatcgaggcccccggcgccagcaagtgcatcggccccggctgctgccacgtggcccagcccgacagcgtgtactgcagcaacgactgcatcctgaagcacgccgccgccaccatgaagttcctgagcagcggcaaggagcagaagcccaagcccaaggagaagatgaagatgaagcccgagaagcccagcctgcccaagtgcggcgcccaggccggcatcaagatcagcagcgtgcacaagagacccgcccccgagaagaaggagaccaccgtgaagaaggccgtggtggtgcccgccagaagcgaggccctgggcaaggaggccgcctgcgagagcagcacccccagctgggccagcgaccacaactacaacgccgtgaagcccgagaagaccgccgcccccagccccagcctgctgtacaagtgcagcggcaagtacagctacagcctgcaccccagcctgatcgcctag

SEQ ID NO: 211359 - protein, 160 aa, Artificial Sequence
  derived and/or modified sequence
MEAERPQEEEDGEQGPPQDEEGWPPPNSTTRPWRSAPPSPPPPGTRHTALGPRSASLLSLQTELLLDLVAEAQSRRLEEQRATFYTPQNPSSLAPAPLRPLEDREQLYSTILSHQCQRMEAQRSEPPLPPGGQELLELLLRVQGGGRMEEQRSRPPTHTC

SEQ ID NO: 211360 - DNA, 483 bp, Artificial Sequence
  derived and/or modified sequence
atggaggccgagagaccccaggaggaggaggacggcgagcagggccccccccaggacgaggagggctggcccccccccaacagcaccaccagaccctggagaagcgccccccccagcccccccccccccggcaccagacacaccgccctgggccccagaagcgccagcctgctgagcctgcagaccgagctgctgctggacctggtggccgaggcccagagcagaagactggaggagcagagagccaccttctacaccccccagaaccccagcagcctggcccccgcccccctgagacccctggaggacagagagcagctgtacagcaccatcctgagccaccagtgccagagaatggaggcccagagaagcgagccccccctgccccccggcggccaggagctgctggagctgctgctgagagtgcagggcggcggcagaatggaggagcagagaagcagaccccccacccacacctgctag

SEQ ID NO: 211361 - DNA, 483 bp, Artificial Sequence
  derived and/or modified sequence
atggaggctgagcggcctcaggaggaggaggatggcgaacagggcccaccgcaggatgaggagggatggcccccccccaactccaccacgcggccctggagaagcgcaccaccttcgccccctccaccgggtaccagacacaccgcactcgggcctaggtccgccagccttctgagtttacagaccgagttgctactggacctggtcgccgaggctcaatctcgccgcctggaagaacagcgggctacattctacaccccccagaacccctctagcctggcccctgcaccactaaggccccttgaagatagggagcagctgtactccacaatcctgtcccaccagtgccagaggatggaagctcagcggtctgaaccccctcttccccctggaggccaggaactcctggagttgctgctccgagttcagggtggcgggaggatggaggagcaaaggtcaagaccaccaacacatacttgttag

SEQ ID NO: 211362 - DNA, 483 bp, Artificial Sequence
  derived and/or modified sequence
atggaagccgagagacctcaagaagaggaggatggcgaacaggggcccccgcaagacgaggaggggtggccaccacctaattccactactagaccgtggcggtcagcacccccctctcccccacctcccggcaccagacacactgcactaggtcccagaagcgcttctcttctgtctctccagacggagttattgctagatctcgtggccgaagcccagtctcgccgactcgaagaacaaagagcaaccttttataccccacagaatccctcgagcctcgccccagctcccctccggccactggaagatcgggagcagttgtatagcacaatactttcccatcaatgccaacggatggaagctcaaaggtctgagcctccgctgccccctggcggacaagagctactggaactcctcctgcgagtacaaggcggaggcaggatggaagaacaacgctcacgccctcctacccacacatgctag

SEQ ID NO: 211363 - DNA, 483 bp, Artificial Sequence
  derived and/or modified sequence
atggaagccgaacgccctcaggaggaggaagacggcgaacagggacctccccaagatgaggagggctggccaccccctaacagcaccactagaccttggcgaagtgcaccaccgtctcctcccccaccgggcacacgacatactgcgttgggcccgcgatccgcttccctgttgtcattgcagacagagcttcttctggacctcgttgccgaagctcagtcccgaaggctggaagaacagcgtgctacgttttacacaccgcaaaacccttcatccttagcgccagctccactccgccccctggaagatagagaacaactgtatagcactatcctgtcgcaccagtgccaaaggatggaggcccagcggtcagagccccctttgcccccaggggggcaggagcttctagaactgttgctgcgagttcaggggggcgggaggatggaggagcagagatctcgtccccctacccatacttgttag

SEQ ID NO: 211364 - DNA, 483 bp, Artificial Sequence
  derived and/or modified sequence
atggaagctgagcggccacaggaagaggaggacggcgaacaaggcccaccccaggatgaagagggttggcctccaccaaattccacaacacgtccttggcgaagcgctcccccatccccccctcctccaggaaccaggcacacagccctgggaccccgatctgcttctcttctctccctgcaaacggagttgctgctagatttggttgccgaagctcaatcacggaggctggaagagcagcgagcaactttttacacgcctcagaacccaagcagcctggcccccgcccccctgcgaccactcgaggaccgggagcagttgtacagcaccatcctcagccatcagtgccagcgcatggaggctcagcgtagtgagcctccactaccgccaggtggccaggagctcctagagttgctgcttagagtgcaggggggcggtcgaatggaggagcaaaggagccggccgccgacgcacacttgctag

SEQ ID NO: 211365 - DNA, 483 bp, Artificial Sequence
  derived and/or modified sequence
atggaggcagagcggccccaggaggaggaagatggcgagcaaggcccacctcaggatgaagagggctggccgccgcccaattccacgacacgcccctggagaagcgcgccgccctcacctcccccgccgggaacgaggcacaccgcacttgggcccaggtcagccagcctcctcagtcttcaaactgagctgctactcgacctcgtagccgaggcacagtcccggcggctagaggaacaacgggccaccttttacacacctcaaaatccttctagtcttgctcccgcgcccttgagacctctggaggacagagagcagctttatagcactattctgtcccatcagtgccagcggatggaggcccagcgatcagaaccacccttaccccctggtggtcaagaacttttggagctgcttctgcgggtgcaaggtgggggaaggatggaggaacagcgtagtcgcccccccactcacacatgctag

SEQ ID NO: 211366 - DNA, 483 bp, Artificial Sequence
  derived and/or modified sequence
atggaggccgagaggccacaggaagaggaggatggcgaacagggtcctccccaggacgaagagggatggcctccacccaattccactacccggccctggaggagcgcgccccccagtccacctcccccggggactcggcataccgctcttggccctcgcagcgccagccttctgtcactccagacagagctactcctcgacttagttgccgaagcccagagtcggcggctcgaagaacagcgagccaccttttataccccacagaatccgtcatcgctagctccagcccccttgcgtcctctggaagaccgtgagcagctgtactcaacaattctgtcacatcagtgtcagaggatggaggcccagcggagtgaaccccccctgcctcccggaggccaggaactacttgagctgctgctcagagtgcaagggggtggaaggatggaagaacagaggtctcgcccccccactcacacatgttag

SEQ ID NO: 211367 - DNA, 483 bp, Artificial Sequence
  derived and/or modified sequence
atggaggcagagaggccgcaagaggaggaggatggtgaacaggggccacctcaggatgaggagggctggccacctccaaatagcacgactagaccatggcgtagtgctccaccctcaccaccaccaccaggtactaggcatactgccctgggcccccgaagcgccagcctcctctccctgcagacggaacttctgttggatttggtagccgaagcccaaagtagacgtttggaggagcagcgcgctaccttctacacccctcaaaacccgagctcactagcgccagcccctctgcggcctctggaagatcgagaacagctgtacagtacaatcctgagccaccaatgtcagaggatggaagcacagcgatcagaacctcccttaccccctggtggccaggagttgctagagctgctgttgcgggtccaagggggcggcaggatggaggaacaacgcagccgacctccaactcatacatgctag

SEQ ID NO: 211368 - DNA, 483 bp, Artificial Sequence
  derived and/or modified sequence
atggaggccgagcgtccacaggaggaagaggatggcgagcagggcccacctcaagatgaagaaggttggcccccgcctaactccacaactaggccctggaggtccgcccctccctcaccacctcccccggggactcgccacaccgccctcggacctagatccgccagtttactgtctctgcagacagaacttttgctcgatctcgtcgccgaagctcagagcagacgactggaagagcagagagccacattttatacacctcagaatccgagctcgctggccccagcccctctgcgccctctggaggatcgcgaacaactgtactctactattctttcgcatcagtgccagcgcatggaagcccaaaggtccgaaccccctctgcctcctgggggacaagaactactggaattgctattgcgtgtgcaagggggcggtagaatggaggagcagcgtagcagaccccccacccacacgtgttag

SEQ ID NO: 211369 - DNA, 483 bp, Artificial Sequence
  derived and/or modified sequence
atggaggcagagaggccacaggaggaagaagacggtgaacagggccctcctcaggacgaggagggttggcctccacccaatagcacaactcggccctggcgaagtgccccaccttcgccaccacctcctgggacgcggcacacagctctgggcccgcgctcagccagcctgctgtcactccaaaccgaacttctgttggacctggtggctgaggcccagagccgcaggcttgaggagcagcgagctactttttataccccacaaaatccttccagtctggcgccggcaccactgaggccactggaggaccgagagcaattgtactccaccatactctcccatcagtgtcagcgtatggaggcccagcgaagcgagccacccctgcccccaggtgggcaggagctgctggagctgctgttgagagtccaggggggtggccgtatggaggaacagcggtctaggccccctacccatacatgttag

SEQ ID NO: 211370 - DNA, 483 bp, Artificial Sequence
  derived and/or modified sequence
atggaggcagaacggcctcaggaagaggaggatggcgaacaaggacctcctcaggatgaggagggctggcctccccctaacagtacgacccgcccctggcggtctgcgcccccctcacctccccctcccggcaccagacacaccgctctcggaccacggtctgctagcctgctgtctctccagacggagctcttattagatctggttgcagaggcacaatctaggagactggaggaacagcgggccaccttctacacccctcagaatccttcatctctcgcgccagcgccattgcggccgctggaggacagggaacagctgtacagcacaatcctctctcaccagtgccagagaatggaggcccaacggtctgagcctcctctgcccccgggaggtcaggagctgctggaactgctgcttagggtccaaggggggggacggatggaggagcagcggtccagacccccaacacacacatgttag

SEQ ID NO: 211371 - DNA, 483 bp, Artificial Sequence
  derived and/or modified sequence
atggaagccgaaagaccccaggaggaagaggacggcgagcaggggcccccacaggacgaagaaggttggccaccacctaactccaccacccgcccctggagatcggcacccccctcaccccctcccccaggtactcgtcataccgctctaggtcccaggtcggcctcactgctgagtctccagacggagctcctgctggacctggtagcagaagctcagagccggcgactcgaggaacagcgggcgactttctacacaccgcagaatccttccagtttggcccccgcccccctgagaccactggaggatcgggaacaattgtatagcacaatcctctcacaccaatgccaacggatggaagctcagagatccgaacctccactcccgccaggagggcaggagctcctggagctgctgttgcgcgtgcaggggggcggccgaatggaggagcaaaggtcgcgccccccgacccacacttgttag

SEQ ID NO: 211372 - DNA, 483 bp, Artificial Sequence
  derived and/or modified sequence
atggaggccgagcgtccacaggaagaggaagatggggaacagggaccacctcaggacgaagagggatggccccctccaaactccactactcggccatggcgatccgccccaccctctccaccaccacctggtacgaggcatacggcccttggtccacgctctgcttcactcttatcactccagactgagttactcctcgatctggttgccgaggcgcagagcagacgattagaagagcagagggccacgttttacacacctcagaatccgtcttctctagcccccgcgccactgcgccctctggaggacagagagcagctctatagtactatcttgtcacatcagtgtcaacgtatggaagcccagagatcagagcctccccttccccccggagggcaggaactgcttgaacttctcctgagagtgcagggtggtggtcgaatggaggaacaacgctcccgaccacctactcacacttgttag

SEQ ID NO: 211373 - DNA, 483 bp, Artificial Sequence
  derived and/or modified sequence
atggaggccgaaaggccccaggaggaggaagacggggaacaagggccacctcaggatgaagagggttggccccctccgaattcaaccacccgaccatggcgcagcgctcctccctcccccccacccccggggacgagacacaccgcgctcggcccccgctctgcatccctgctgtctttgcagacggaattgctgcttgatctggtggcggaggcccaatctcgccgcctcgaggagcaaagggcgacattttatacgcctcaaaatccaagctccctagcaccggcccccctgcggcctctggaggacagggagcagctgtattcgacaatccttagtcaccagtgtcagaggatggaagcacagcggagcgaacccccactgccaccaggaggacaagaactgctggagctgctgctgcgggtgcaaggcggcggaagaatggaggaacaacggtcacgacctcctactcacacttgctag

SEQ ID NO: 211374 - DNA, 483 bp, Artificial Sequence
  derived and/or modified sequence
atggaagccgagagaccacaggaggaagaagacggggagcaaggccccccccaagacgaagaggggtggccaccccctaactctacaacccgaccttggcgctctgctcctccaagccctccacctccgggtactcgccacactgcgttgggtcctagatccgctagccttctgtccctgcagacggagctcttacttgacttggtcgccgaagcccagtctcgaagactggaggaacagagggcaaccttttacacacctcaaaatccttcctctctggccccagcccctctcaggcccctcgaagatagggaacagctttattcaaccatcctttctcaccagtgtcagagaatggaggcccagaggagcgagcctcccctccctccggggggacaggagttgttagaacttctgcttagagttcaaggtgggggcaggatggaggagcagcgatcaaggccacccactcatacgtgttag

SEQ ID NO: 211375 - DNA, 1476 bp, Artificial Sequence
  derived and/or modified sequence
gaaagagcagaagaggaggtggggtggagggagcagagccagggattaggggactactgaggctctggagatgagaccgccaggagtccttccccaccatgagccccctccactcctgcagctggaggagtttttcccagtctcagtgctgccctggggcgagagagactgaacaagctgtttgggtgggaagagaatggaggaagttgacagggatgggcggggcccgtgggggggctgaccaggaacccagcttcctgctcagtacccaggcatccagcccccagctcacccccaccccttccagcccccactcccctcaggaacccaaggttccagccctcctcccaaatcccagccacccctcccccaccagtttctcccctctaggggatggaggctgagagaccccaggaagaagaggatggtgagcagggcccccctcaggatgaggaaggctggccccctccaaactccaccactcggccttggcgatctgctcctccatcccctcctcctccagggacccgccacacagccctgggaccccgctcggcctccctgctctccctgcagactgaactccttctggacctggtggctgaagcccagtcccgccgcctggaggagcagagggccaccttctacaccccccaaaacccctcaagcctagcccctgccccactccgtcctctcgaggacagagaacagctttacagcactatcctcagtcaccagtgccagcggatggaagcccagcggtcagagcctcccctccctccaggggggcaagagctcctggagttgctgctgagagttcagggtgggggtcgaatggaggagcaaaggtcccggccccccacacacacctgctgagacttgagccccaaccagcccttccttgccactggtctcaaagctgggcagcccattgcatgccctcaactcttgcttggcaggggtaccagagactgaaagacacggcacaaatctcaatattcatctcccacatcaccttccctgggaactggacagggtgaaagtcctcaaactctgggaacaggcgagatggaacagggatttaactccccgcccacaggtccatgggagcttgaggcagtaagggggatcccaggcacccatctcaaggagtggctgggagtcttttccctaacttgtggggacaccaccagttgtcaagctactaggcagtagggtctgagggctcaggcctccacctgagaggttataacctgagagacagctctacccttcctcccagtaagaagggaaggtgggtgggcacctgagagattaagactattctcccagtcccactaccagcacccccgatccctgagactgaggggtttacgggctgtgaatggaccttcagccctgcccaccctccctccccactgctgctgagtctgtctgatgttttggttgtgtgaataaatataattcccctctgga

SEQ ID NO: 211376 - DNA, 1456 bp, Artificial Sequence
  derived and/or modified sequence
ccggagcggggatcacctcaacttgactgtggtcccccagccctccaagaaatgcccataaaccaaggaggagagggtaaaaaatagaagaatacatggaattggggagaagaatgggaaaaaagatgggagtgactgcataatgtcagcattttgtgcttttggctcagcatttggattggatggaggattttcatcctgaaaccagccctccgtcgccaccgaccatggaataattgtcttccacgaaactcttccctggtgccaaaaagggttttatgtatatatttgagagctccacatccctggatctgaatcctccacttcccactggaaccatgcccctcccagtcccgtttctcccctctaggggatggaggctgagagaccccaggaagaagaggatggtgagcagggcccccctcaggatgaggaaggctggccccctccaaactccaccactcggccttggcgatctgctcctccatcccctcctcctccagggacccgccacacagccctgggaccccgctcggcctccctgctctccctgcagactgaactccttctggacctggtggctgaagcccagtcccgccgcctggaggagcagagggccaccttctacaccccccaaaacccctcaagcctagcccctgccccactccgtcctctcgaggacagagaacagctttacagcactatcctcagtcaccagtgccagcggatggaagcccagcggtcagagcctcccctccctccaggggggcaagagctcctggagttgctgctgagagttcagggtgggggtcgaatggaggagcaaaggtcccggccccccacacacacctgctgagacttgagccccaaccagcccttccttgccactggtctcaaagctgggcagcccattgcatgccctcaactcttgcttggcaggggtaccagagactgaaagacacggcacaaatctcaatattcatctcccacatcaccttccctgggaactggacagggtgaaagtcctcaaactctgggaacaggcgagatggaacagggatttaactccccgcccacaggtccatgggagcttgaggcagtaagggggatcccaggcacccatctcaaggagtggctgggagtcttttccctaacttgtggggacaccaccagttgtcaagctactaggcagtagggtctgagggctcaggcctccacctgagaggttataacctgagagacagctctacccttcctcccagtaagaagggaaggtgggtgggcacctgagagattaagactattctcccagtcccactaccagcacccccgatccctgagactgaggggtttacgggctgtgaatggaccttcagccctgcccaccctccctccccactgctgctgagtctgtctgatgttttggttgtgtgaataaatataattcccctctgga

SEQ ID NO: 211377 - DNA, 483 bp, Artificial Sequence
  derived and/or modified sequence
atggaggccgagcggccccaggaggaggaggatggagagcagggccccccccaggatgaggagggctggcccccacccaacagcaccacccggccctggaggtctgccccacccagccccccacctcctggcaccaggcacacagccctgggccccaggtctgccagcctgctgagcctgcagacagagctgctgctggacctggtggccgaggcccagagccggcggctggaggagcagagggccaccttctacaccccccagaaccccagcagcctggccccagcccccctgcggcccctggaggaccgggagcagctgtacagcaccatcctgagccaccagtgccagaggatggaggcccagaggtctgagccccccctgcccccaggcggccaggagctgctggagctgctgctgcgggtgcagggcggcggccgcatggaggagcagaggagcaggcctcccacccacacctgctag

SEQ ID NO: 211378 - DNA, 483 bp, Artificial Sequence
  derived and/or modified sequence
atggaggccgagcggccccaggaggaggaggacggcgagcagggcccccctcaagacgaagaggggtggccccctcctaattccaccaccaggccttggcggagcgcccctccatctccaccgcccccaggcaccagacataccgcactcgggccccggtccgcaagtctattgtcgctgcagacagagctgctgctggatctcgtagcggaggctcagtcccggaggctggaggagcagcgcgccacgttctataccccccaaaacccttctagcctcgcgcccgccccccttcgtcctcttgaggacagggagcagttgtacagtaccatcctctcccatcagtgccagcgcatggaggcacagagaagtgagcctcccctgcctccaggggggcaggaactgttagagcttctgctccgagtccagggcggggggcgcatggaggagcagcgaagtcgcccaccgacccacacgtgttag

SEQ ID NO: 211379 - DNA, 483 bp, Artificial Sequence
  derived and/or modified sequence
atggaggccgagcggccccaggaggaggaggacggcgagcagggcccccctcaggacgaggagggctggccccctcctaactctacaacccgaccctggcggagcgcccctccttctccacctcctcccgggacacgtcacacagctctgggacctcgctccgcttccctgctgagtctgcagacggaattactcctagacctggtggcagaagctcaaagcaggaggcttgaagaacaaagagctactttttataccccacagaatcctagctctctggcccccgcacccctccgcccactcgaggatagagaacagctttacagcacaatcctctctcaccagtgccaaaggatggaggcccaaaggtcagagccaccgctaccaccaggcgggcaggaactgctggagctgctcttacgcgtgcaggggggtggaaggatggaggagcagaggtcaaggccaccgacgcacacatgctag

SEQ ID NO: 211380 - DNA, 483 bp, Artificial Sequence
  derived and/or modified sequence
atggaggccgagcggccccaggaggaggaggacggcgagcagggccctccccaagatgaggaagggtggccccctcccaactctacaaccaggccctggagaagtgcacccccatctcccccacctcccggaacacggcacactgccctgggacctcgaagcgctagtctgttatccctccagactgaactgcttcttgaccttgtggcagaagctcagtcaagaaggctggaagaacaacgcgcaactttctatacaccgcagaacccatcctctctggcccctgcaccgttgcgacctctggaagatagagaacagttgtactcaacaattctctcccaccaatgtcagcgaatggaggctcagagaagcgagcccccattgccgcccggggggcaggaattactcgaacttttactcagggtacagggaggggggcggatggaggagcagcgatctaggccgccgactcacacatgctag

SEQ ID NO: 211381 - DNA, 483 bp, Artificial Sequence
  derived and/or modified sequence
atggaggccgagcggccccaggaggaggaggacggcgagcagggccccccacaggacgaggagggttggcccccccccaattcgactacacgcccctggcgaagcgccccacctagtcccccaccgccggggacaaggcatacggcactcggcccccgctccgcctctctgctgagcctgcagaccgaacttctgctggacctagttgcagaggcccagtcccggagactggaggaacaaagggctactttttacacccctcagaatccctcatctctcgcgcctgcccccttgcgaccattagaggatagagagcagctatactccacgatcctgtcccaccagtgccaacggatggaggcccaaaggagtgagccccctctgccaccaggaggacaagagctcctcgagttgctattgcgcgtgcagggcggcggccggatggaggagcagaggagtcgacctcccacgcatacgtgttag

SEQ ID NO: 211382 - DNA, 483 bp, Artificial Sequence
  derived and/or modified sequence
atggaggccgagcggccccaggaggaggaggacggcgagcagggccctccgcaggatgaggaaggttggcccccacccaactccaccactcgcccatggcgttctgccccgccatccccaccgcccccagggacaagacatactgcccttgggccacgctccgccagcctactctctctccagactgagctgctgcttgacttagtggccgaggctcagtctcgccgactggaggagcaaagggctactttttatactccccagaacccgagtagccttgcccctgcgcccctgagacccctcgaagatcgagaacagctgtactccactatactttctcatcagtgccagcgcatggaggcacaacggtctgaacccccccttcccccagggggacaagagctgttggagttgctcctgagggttcagggtggagggagaatggaagagcagagatctcgcccccctacccatacgtgctag

SEQ ID NO: 211383 - DNA, 483 bp, Artificial Sequence
  derived and/or modified sequence
atggaggccgagcggccccaggaggaggaggacggcgagcagggccctccacaggacgaagagggctggccaccgccaaacagtactacccgaccttggcgcagtgcccctccatcaccacctcctccgggcacacggcacacagcgttaggaccccggtcggcctcactgctgtcgcttcagaccgagctccttttggacctggtcgcagaagctcaaagcaggagacttgaagagcagcgcgctacattctacaccccacagaacccctctagtttggcgccggctcctctcaggcctctggaagaccgggaacagctctactcaaccattctttcccatcagtgccaaagaatggaggctcaacgtagcgaaccacccctgccacccggagggcaggaattactggagctcctgttacgcgtccaaggaggcggccgaatggaggaacagcggagtagacctcccactcatacttgctag

SEQ ID NO: 211384 - DNA, 483 bp, Artificial Sequence
  derived and/or modified sequence
atggaggccgagcggccccaggaggaggaggacggcgagcagggccccccccaggatgaagagggctggcctccaccaaatagcaccaccaggccctggcggtcagccccaccttcccctccacctcctggaacccgccacactgctttgggaccacggagcgcctctctcctgtcactgcaaactgaactcctcctagatttagttgccgaagcccagagccgccgcttggaggaacagcgtgccacattctacacaccccaaaacccaagctctctagccccagctcctcttaggcctctggaggatcgagagcaactgtacagtaccatactgagtcaccaatgtcagcgtatggaggcccaaagatctgagccaccactcccacctgggggacaggaactgctagagctcctcttgcgcgtgcagggcggaggtcggatggaagagcagagatcaagaccccccacacacacatgttag

SEQ ID NO: 211385 - DNA, 483 bp, Artificial Sequence
  derived and/or modified sequence
atggaggccgagcggccccaggaggaggaggacggcgagcagggccctccccaggacgaggagggctggccaccaccgaacagcacgacccggccctggagaagtgcaccccctagcccacccccacccggtacccgtcacactgccctggggcctagatctgcatccctactgagcctccagaccgaactgctgttggacttggtggcggaggcccagagtcgccgtctggaggaacagagagctaccttttacactccacagaatccttcctctctagctccagcccctcttagaccgctcgaagaccgcgagcagctttattccactatcctgtcccatcaatgccagcgcatggaagcacagcgaagcgaacccccattgccacctggcggacaggaactgctggaactgctgctgagggttcaaggtggaggccgtatggaggagcaacggtctcgacctcctacacacacctgttag

SEQ ID NO: 211386 - DNA, 483 bp, Artificial Sequence
  derived and/or modified sequence
atggaggccgagcggccccaggaggaggaggacggcgagcagggcccccctcaggatgaggaaggatggcctcctcccaattcgacaacgaggccttggcgctctgcgcctcctagccccccacccccagggacccggcatacagccctggggcctaggtctgcctctctgcttagtctacagacagaactgttactagacctggtcgccgaggctcagtccagaagactggaagaacaacgggcgaccttctacacgccccagaatcccagttctctggcccctgctccgctgcggccccttgaggaccgcgaacagttatattcaactattttaagtcaccagtgtcagaggatggaggctcaaaggagcgagccacctctacctcccgggggccaggaattactggagctgctccttcgagttcagggcgggggcagaatggaggaacaaagatcacgcccaccgacccacacctgctag

SEQ ID NO: 211387 - DNA, 483 bp, Artificial Sequence
  derived and/or modified sequence
atggaggccgagcggccccaggaggaggaggacggcgagcagggccctccacaggatgaggaaggttggcctccccctaactcaaccacccgtccatggcggtcagcaccacctagcccccctcccccaggaaccagacacacagccctgggcccaagatctgccagtctgttgtctcttcaaacggagctcttgttagacttggtggcagaagcccaatctcggcgtctggaggagcagcgtgccacattttataccccgcagaatccgtcttctctggccccggcgccgctccgacccttggaggacagagagcagctgtattcaaccatcctgtctcaccagtgccaaaggatggaggctcagcgtagcgaacctccgctgcctcccggcggacaggaactccttgaactgctcctccgggtccaggggggcggacgaatggaagagcaacgcagtcgacctccgactcatacgtgttag

SEQ ID NO: 211388 - DNA, 483 bp, Artificial Sequence
  derived and/or modified sequence
atggaggccgagcggccccaggaggaggaggacggcgagcagggccccccacaagacgaggaggggtggccccccccgaactctaccactagaccctggaggtccgctcccccgtcgcctcctccacccggcacccgccacactgccctgggccccaggagcgctagtttactcagcttgcagacggagctgctcttggatctcgtcgccgaggcccagtcccgtagacttgaggaacagcgggcaactttctatacgccccagaaccccagctccctggcgccagccccgctgcgtccgcttgaggaccgtgaacagctgtattcgaccattttgagtcaccagtgccagaggatggaagcccagcgcagcgaaccccccctccccccgggtggtcaggaattgctagagctgttactgagagtgcaaggggggggacgtatggaagaacagagatctagacctcctacacacacgtgctag

SEQ ID NO: 211389 - DNA, 483 bp, Artificial Sequence
  derived and/or modified sequence
atggaggccgagcggccccaggaggaggaggacggcgagcagggcccccctcaggacgaagaaggatggccaccacccaacagcaccactcgcccctggcgatccgcacctcctagcccccctccccctggtacacggcacaccgcactgggcccaaggtctgcttcactgttatccttgcagacagaactgcttctagatttggttgctgaagctcagtctcgccgcctcgaggaacagcgcgccactttctacaccccccagaacccgtcttccctcgctcccgcacccctccggccactggaagacagagagcaactctacagcacgattctctctcatcaatgccagcgaatggaagcacagagatctgagccacccctacctccaggaggccaggagctgttggagcttctccttagagtgcaagggggaggacggatggaagagcagcggtcccgtcctccaactcacacatgctag

SEQ ID NO: 211390 - DNA, 483 bp, Artificial Sequence
  derived and/or modified sequence
atggaggccgagcggccccaggaggaggaggacggcgagcagggccccccacaggatgaagagggctggccgccacccaacagtaccacgcgaccatggaggtctgcgccaccttccccccccccccccggcacacggcacaccgcacttgggcctaggagcgcttcccttctctccctgcagactgagctgttgctggacctagtggccgaagctcagagtcgtcgattagaggaacagagagcaactttttataccccacagaacccaagctccctagcccccgcacccctcagaccactcgaggacagagagcagctctacagcaccattctgagccatcagtgccagcggatggaagctcagagatctgaaccacccctccctcctggaggccaggagttactcgaacttctcttgagggtccagggaggcggaagaatggaggaacaacgatcccggccaccgacacatacttgctag

SEQ ID NO: 211391 - DNA, 483 bp, Artificial Sequence
  derived and/or modified sequence
atggaggccgagcggccccaggaggaggaggacggcgagcagggccccccccaggatgaagagggatggcctccccctaacagcaccacacggccatggaggtccgccccccccagccccccccctcctggaacacggcatactgccctgggccctagatccgcatccctcctatccttgcaaaccgaactgctactcgaccttgtggcagaggctcagtcccgacggctggaggaacaacgcgctacattttacaccccccaaaacccctccagcctggcaccggcaccattgaggccgcttgaggatcgggagcaactgtatagtacgatcctgtcacaccagtgccagagaatggaggctcagcggagcgaaccgcccctgcctcccggtggacaggaactcctggaattactccttagggtgcaggggggcggtcgtatggaagagcagcgatcccggccacccacccatacctgttag

SEQ ID NO: 211392 - DNA, 1456 bp, Artificial Sequence
  derived and/or modified sequence
ccggagcggggatcacctcaacttgactgtggtcccccagccctccaagaaatgcccataaaccaaggaggagagggtaaaaaatagaagaatacatggaattggggagaagaatgggaaaaaagatgggagtgactgcataatgtcagcattttgtgcttttggctcagcatttggattggatggaggattttcatcctgaaaccagccctccgtcgccaccgaccatggaataattgtcttccacgaaactcttccctggtgccaaaaagggttttatgtatatatttgagagctccacatccctggatctgaatcctccacttcccactggaaccatgcccctcccagtcccgtttctcccctctaggggatggaggctgagagaccccaggaagaagaggatggtgagcagggcccccctcaggatgaggaaggctggccccctccaaactccaccactcggccttggcgatctgctcctccgtcccctcctcctccagggacccgccacacagccctgggaccccgctcggcctccctgctctccctgcagactgaactccttctggacctggtggctgaagcccagtcccgccgcctggaggagcagagggccaccttctacaccccccaaaacccctcaagcctagcccctgccccactccgtcctctcgaggacagagaacagctttacagcactatcctcagtcaccagtgccagcggatggaagcccagcggtcagagcctcccctccctccaggggggcaagagctcctggagttgctgctgagagttcagggtgggggtcgaatggaggagcaaaggtcccggccccccacacacacctgctgagacttgagccccaaccagcccttccttgccactggtctcaaagctgggcagcccattgcatgccctcaactcttgcttggcaggggtaccagagactgaaagacacggcacaaatctcaatattcatctcccacatcaccttccctgggaactggacagggtgaaagtcctcaaactctgggaacaggcgagatggaacagggatttaactccccgcccacaggtccatgggagcttgaggcagtaagggggatcccaggcacccatctcaaggagtggctgggagtcttttccctaacttgtggggacaccaccagttgtcaagctactaggcagtagggtctgagggctcaggcctccacctgagaggttataacctgagagacagctctacccttcctcccagtaagaagggaaggtgggtgggcacctgagagattaagactattctcccagtcccactaccagcacccccgatccctgagactgaggggtttacgggctgtgaatggaccttcagccctgcccaccctccctccccactgctgctgagtctgtctgatgttttggttgtgtgaataaatataattcccctctgga

SEQ ID NO: 211393 - DNA, 483 bp, Artificial Sequence
  derived and/or modified sequence
atggaagctgagagaccacaggaagaagaggacggcgaacaggggccacctcaggatgaagaaggatggcctcctcctaacagtacaacacgtccctggcgttcggctcctccaagtcctcccccacccggtacacgacacactgccctgggacctaggagcgcttcactcctgtctttgcagacagagctgctcctggacctcgtggcagaagcgcagtcacggcgactggaagaacagagggccaccttttacactcctcaaaatccgtccagtctggcacccgctcctcttagacctctagaagatagggagcagctgtacagcacaatcctttcccaccagtgtcaaagaatggaggcccagcgatcagaacctcccctgccgccagggggacaggagctgttagagctcctgctgagagtgcagggcggaggtaggatggaggagcagcgctctcgacctccgacccacacttgctag

SEQ ID NO: 211394 - DNA, 483 bp, Artificial Sequence
  derived and/or modified sequence
atggaggccgagcggcctcaagaggaggaagatggcgagcaggggccaccccaggacgaggaaggctggcctcccccaaacagcacaacacgcccatggcggagtgcaccaccatccccccctccccctggaacccgacatacagccctgggaccccgatccgcgagcttgctgagtctacagactgaactcctgcttgatctcgtggcagaggctcagtcacggagattggaagagcagagagcaacattttacacacctcagaacccatcttctttggccccagcccctttgaggcctctcgaggacagggaacaactgtatagcaccattctgtcacaccagtgccagcgcatggaggcccagagatccgaacctccactcccccctggaggccaggaattgttagaattgcttttgagagtccagggcggaggaaggatggaagagcaacgatcaaggcctcccacacatacatgctag

SEQ ID NO: 211395 - DNA, 483 bp, Artificial Sequence
  derived and/or modified sequence
atggaggcggaacggccacaggaggaggaggacggggagcaaggcccaccccaggacgaagaaggctggccgcctccaaactcgaccacacggccatggaggtcagctcctccaagccctccacctccgggtacaagacacaccgccttgggccctagatcagcctctctgctgtctctccagaccgagctcctcctggaccttgttgccgaggcccagagcaggcgcctagaagaacagcgagcgactttctacaccccccagaacccctcatctctggctcccgctcctctgcgcccactggaggatcgcgaacagctgtacagcaccattctctcccaccagtgccagcggatggaagctcagaggtccgagccccctctgccccctggcggtcaagaactgttggaactgctgctgagagtgcagggcggtggcaggatggaggagcagcggagtcgtcctccaacacatacctgttag

SEQ ID NO: 211396 - DNA, 483 bp, Artificial Sequence
  derived and/or modified sequence
atggaggccgagagaccacaggaggaagaagacggggaacagggcccaccccaggatgaggaaggctggccccctcccaatagcactacgcgcccatggagaagcgctcccccaagtccgcctccccctgggacccgccacacagcccttggaccacgaagcgcctcactgttgagccttcagaccgaattgttgctggacttggtcgccgaagctcagtcccggcgactggaggagcaaagggcgacgttttatacaccccagaacccttcaagcttagcaccagcacccctgagaccgctggaggatagggaacagctgtactcgactatcttgtcccatcagtgccagcggatggaggcccagagatctgagccccctctgcccccagggggacaggagctcttggaactcctcctgcgtgtgcagggcggtggcagaatggaagagcaaagaagtagaccacccacgcatacttgttag

SEQ ID NO: 211397 - DNA, 483 bp, Artificial Sequence
  derived and/or modified sequence
atggaagctgagcggccacaggaggaggaggacggtgagcaaggccctccacaggacgaagaggggtggccaccccctaatagcacaacaagaccctggagaagtgctcctccatcacccccaccgccagggactagacataccgctttggggccacgaagtgcgagcctgctctcacttcaaactgaactgctgctggacctggtggcggaggctcagagccgtcgcctggaggaacaacgagccacattttatacgccccagaaccccagtagcctggctcccgcacccttacgacccttagaggatcgagaacaactgtatagtactatcctgagccatcagtgtcagcggatggaggcccagcggagcgaaccaccattaccccctgggggtcaggagttgctggagctgcttctgcgtgttcagggcggaggccgtatggaagagcagaggtccaggccacccacacacacgtgttag

SEQ ID NO: 211398 - DNA, 483 bp, Artificial Sequence
  derived and/or modified sequence
atggaagcagagcggcctcaggaggaggaagacggggagcaaggccctccccaggatgaggaaggttggcctccaccaaacagtacgacccgcccttggcggtcggccccacccagcccacctcccccaggcacccggcacacagcattagggccacggagtgcgtccttactgagtctccagactgagctgcttctggatctggtcgcagaagcccagtctcgacgccttgaagagcagagagcaactttctatacaccacagaacccttcatcactggctccggcaccactacgccctctagaagatcgcgagcagctctatagcacgatactgtcccatcagtgccaacggatggaagcccagaggtcagaacccccattgcctcccggaggccaggaactgctcgaactgctgctgcgggtccagggtggcggaaggatggaggaacaacgatcaagaccgcctactcacacatgttag

SEQ ID NO: 211399 - DNA, 483 bp, Artificial Sequence
  derived and/or modified sequence
atggaggcggagcgccctcaagaagaagaagatggggaacaggggcctccacaggacgaggaggggtggcctccgcctaactctacaacaagaccttggagatctgctcctcctagtccacctcccccagggacaaggcatactgctcttggcccaagatccgcctctctgctcagtctgcagaccgaactattacttgacttggtcgccgaagcccagagtcggaggctagaagagcagcgcgctactttctatacccctcagaaccctagctcactggccccagcacctttgagaccgctggaggatagagagcagctgtattctaccattttaagtcaccagtgccaacgcatggaggcccaaaggagcgagccgccactgcctccgggtggtcaagagttgttggaactattactgagagtgcagggaggaggtcggatggaggaacaacgcagccgcccaccgacacacacgtgttag

SEQ ID NO: 211400 - DNA, 483 bp, Artificial Sequence
  derived and/or modified sequence
atggaagcggagaggcctcaggaagaagaagacggtgagcagggcccaccacaggacgaggagggctggcctccgcctaactcaaccacacgcccttggcgttcggctcctccctcgccccctcctcctggtacgcgtcacacagcactcggccctcggtctgccagcctgctgagtctgcagaccgagctgctcctagatctggttgcagaagcacagagccgcaggcttgaggagcagagggcaacgttttatacgccacagaacccaagctctctggctcccgctcctctccggccactggaggatagggaacaactctacagcactatcctgtcgcaccagtgtcagcggatggaagctcagcgctccgagcctcccttgcccccaggcggtcaggagctgcttgaactgctgctgagagtccagggagggggtagaatggaagaacagagatccagacctcccacccatacctgctag

SEQ ID NO: 211401 - DNA, 483 bp, Artificial Sequence
  derived and/or modified sequence
atggaagccgaacgccctcaggaggaagaagacggggaacagggaccccctcaggacgaggaggggtggccaccgcctaactcgacaacaaggccgtggcgcagtgccccacccagccctccccctcccggtacgaggcatactgcactggggccaaggtccgcgtccttactgtccctccagacagaactactattggatcttgtcgccgaagcccagtcccgacggctggaggagcagagagcgacgttttacacccctcagaacccctccagtttggcccctgctcccctaaggcccttggaggatcgggagcagctgtactcgaccatactgtcacaccagtgccagaggatggaggcccagcggtccgaaccgcctctgccgcctggtggtcaagagctcctggagctccttctcagggtgcagggcggaggcagaatggaggagcagaggagcagaccgcctactcacacgtgctag

SEQ ID NO: 211402 - DNA, 483 bp, Artificial Sequence
  derived and/or modified sequence
atggaagcagaaagaccccaggaagaagaagatggggaacagggtccccctcaagatgaggagggctggcctccccctaatagcaccacacgtccttggcggtccgctcctcctagccctcctccacctggaaccagacacaccgcccttggaccccgatccgcaagtcttttgtcgctccagaccgaattgctgctggacctagtggctgaggctcagagtagacgactggaggagcaacgggcaaccttctacacacctcagaatcctagttcccttgcccctgctccactccggccactcgaagacagggagcagttgtactcgaccatcctgtcccaccagtgccagaggatggaggcccaaaggagtgaaccccctcttcctcctggtggacaggagctgctagagctcttgttacgagtgcagggcggtggtcggatggaagaacagagatcacgaccacccacacacacatgctag

SEQ ID NO: 211403 - DNA, 483 bp, Artificial Sequence
  derived and/or modified sequence
atggaggcggaaaggcctcaggaggaggaagacggcgaacagggtccaccccaagacgaagaaggttggcctccaccaaacagcactacaaggccttggcgatccgccccaccttctccccctccccctgggacacggcacacagcactcggaccacgctcggcatccttgctcagcctgcaaacagaactcctcctggatctggtggccgaagctcagtccaggagactagaggagcagagagccacattctacaccccacaaaacccgtccagcctcgcccctgcgcctttgaggcctctggaggacagggaacagctttatagtacaatcctttcacaccagtgccagcgaatggaagctcaaagaagtgagcccccactgcctccaggtggacaagaacttctggaactcctgctgcgagtccaaggcggaggcagaatggaagagcagcgcagccgcccacccactcacacatgttag

SEQ ID NO: 211404 - DNA, 483 bp, Artificial Sequence
  derived and/or modified sequence
atggaggcggaaaggcctcaagaagaggaagatggcgaacaggggccacctcaggacgaggaaggttggccacctcccaattccacaacacgcccatggaggagcgcaccaccgtctccccctcctccaggtacccggcacaccgcactgggacctcgatctgcctctttgctatcgctacagaccgagcttctgctagacttggttgccgaggcacagagtcgtagactggaagaacaaagggcaactttctacaccccgcagaatccttcatcgctggcgcctgcaccactgaggcccctcgaggacagagagcaactgtactctaccatcctcagccaccagtgtcaacggatggaagcacagcggagcgaaccacctctgccacctggaggacaagagctgctggagctcttgcttagagttcaggggggtgggcgaatggaggagcaaagatctaggcctccaacgcacacttgttag

SEQ ID NO: 211405 - DNA, 483 bp, Artificial Sequence
  derived and/or modified sequence
atggaggccgagcgtccacaagaggaagaggatggggagcaaggtcctccccaggacgaagaaggctggcctccccctaacagcaccactcgcccttggaggtctgcacctccgtcacccccaccgcctggcacccgtcacactgcactcggaccaaggagcgcttccctgctatcattgcagaccgaactccttctcgacctggttgccgaggctcaaagcagacggcttgaagagcaaagggcgactttttacactccacagaatccatcttcattggcacccgcacccctccgacccctcgaggatcgcgagcagctgtattcaaccattctgagccaccaatgccagagaatggaggcccagcgcagtgaacctcccctgcccccaggcggacaggaactactggaactactgctgagagtacagggagggggtcgtatggaggagcagcggtctaggcctcctacccatacttgctag

SEQ ID NO: 211406 - DNA, 483 bp, Artificial Sequence
  derived and/or modified sequence
atggaagccgaaagaccccaggaggaagaggacggagagcaggggcctcctcaggacgaggaagggtggccaccacccaactcaacaacaagaccttggcggagcgcaccaccctcacctcccccacctgggacaaggcacactgccctgggacccagatccgctagcctgctgtcgctgcagacggagctactcctggacctggtcgccgaggcacagtcccggaggcttgaggagcagagggctactttttatacaccgcagaacccatcgagtcttgccccagcaccattgcgtcccctggaggaccgcgaacagctctacagtacaatcctatcccatcagtgccagcggatggaggcacagcggtccgagccccctctgcccccaggtggccaggaactattggaattgcttctaagggtacaggggggaggcaggatggaggagcaacggtcacgccctccaactcacacctgttag

SEQ ID NO: 211407 - DNA, 1476 bp, Artificial Sequence
  derived and/or modified sequence
gaaagagcagaagaggaggtggggtggagggagcagagccagggattaggggactactgaggctctggagatgagaccgccaggagtccttccccaccatgagccccctccactcctgcagctggaggagtttttcccagtctcagtgctgccctggggcgagagagactgaacaagctgtttgggtgggaagagaatggaggaagttgacagggatgggcggggcccgtgggggggctgaccaggaacccagcttcctgctcagtacccaggcatccagcccccagctcacccccaccccttccagcccccactcccctcaggaacccaaggttccagccctcctcccaaatcccagccacccctcccccaccagtttctcccctctaggggatggaggctgagagaccccaggaagaagaggatggtgagcagggcccccctcaggatgaggaaggctggccccctccaaactccaccactcggccttggcgatctgctcctccgtcccctcctcctccagggacccgccacacagccctgggaccccgctcggcctccctgctctccctgcagactgaactccttctggacctggtggctgaagcccagtcccgccgcctggaggagcagagggccaccttctacaccccccaaaacccctcaagcctagcccctgccccactccgtcctctcgaggacagagaacagctttacagcactatcctcagtcaccagtgccagcggatggaagcccagcggtcagagcctcccctccctccaggggggcaagagctcctggagttgctgctgagagttcagggtgggggtcgaatggaggagcaaaggtcccggccccccacacacacctgctgagacttgagccccaaccagcccttccttgccactggtctcaaagctgggcagcccattgcatgccctcaactcttgcttggcaggggtaccagagactgaaagacacggcacaaatctcaatattcatctcccacatcaccttccctgggaactggacagggtgaaagtcctcaaactctgggaacaggcgagatggaacagggatttaactccccgcccacaggtccatgggagcttgaggcagtaagggggatcccaggcacccatctcaaggagtggctgggagtcttttccctaacttgtggggacaccaccagttgtcaagctactaggcagtagggtctgagggctcaggcctccacctgagaggttataacctgagagacagctctacccttcctcccagtaagaagggaaggtgggtgggcacctgagagattaagactattctcccagtcccactaccagcacccccgatccctgagactgaggggtttacgggctgtgaatggaccttcagccctgcccaccctccctccccactgctgctgagtctgtctgatgttttggttgtgtgaataaatataattcccctctgga

SEQ ID NO: 211408 - protein, 349 aa, Artificial Sequence
  derived and/or modified sequence
METPPVNTIGEKDTSQPQQEWEKNLRENLDSVIQIRQQPRDPPTETLELEVSPDPASQILEHTQGAEKLVAELEGDSHKSHGSTSQMPEALQASDLWYCPDGSFVKKIVIRGHGLDKPKLGSCCRVLALGFPFGSGPPEGWTELTMGVGPWREETWGELIEKCLESMCQGEEAELQLPGHSGPPVRLTLASFTQGRDSWELETSEKEALAREERARGTELFRAGNPEGAARCYGRALRLLLTLPPPGPPERTVLHANLAACQLLLGQPQLAAQSCDRVLEREPGHLKALYRRGVAQAALGNLEKATADLKKVLAIDPKNRAAQEELGKVVIQGKNQDAGLAQGLRKMFG

SEQ ID NO: 211409 - DNA, 1050 bp, Artificial Sequence
  derived and/or modified sequence
atggagaccccccccgttaatacaatcggagagaaggacacatcccaacctcaacaggaatgggagaagaatttaagagaaaacctggactcggtgatccagattaggcagcagcctcgcgatccaccgaccgaaaccttggagttggaagtttcccccgatccagcctctcagattctggagcacacgcagggggccgaaaaattggtggctgaacttgagggagactcccacaagtctcatggctctacaagtcaaatgccggaggccctgcaggcttcagacctgtggtattgtccagatggaagcttcgtgaagaaaattgttatccgcggccatggcctggacaaaccaaaattgggcagctgttgccgggtgctcgcacttggattcccgttcggttccggaccgcctgaaggctggaccgagttgacaatgggcgtgggcccgtggcgggaagagacgtggggcgagctgatcgaaaagtgtttggagtccatgtgtcagggcgaggaagccgaattgcagctcccggggcattccggcccccccgtgcgattgactctggcttctttcacacaggggagggattcctgggagctcgagacctccgaaaaggaagcactagcacgtgaagagcgagctagagggacagagttgttcagagcaggcaacccagaaggcgctgctcggtgctacggccgcgcgctgagactcttgctgaccctgcctccccccggaccccctgagaggacagtgcttcatgccaacctggctgcttgtcaactgttattagggcagccccaactcgctgcccagtcctgcgaccgggtgttggagcgggaacctggacacctgaaggcattgtaccggcgcggagttgcccaggctgctttaggcaatctcgagaaggccacggcagatttgaaaaaggtccttgccatcgatcctaagaacagggccgcccaagaggagctcggaaaagttgtaattcaggggaagaaccaggatgctgggctggcacagggcctcagaaagatgtttggctag

SEQ ID NO: 211410 - DNA, 1050 bp, Artificial Sequence
  derived and/or modified sequence
atggaaacgccaccagttaacaccatcggcgaaaaggacacgtcccagccacagcaggaatgggagaaaaacctccgcgagaacttggatagtgtcatccagatcaggcaacagcccagggatccgccgacagagactctggaactggaggtctccccagatcccgccagccagattctcgagcatactcagggggcagaaaagctggtggctgaactggagggagattctcacaaatcccatgggtccacatcccagatgcccgaagccttgcaggcgagtgatctgtggtattgcccagatggttcttttgtgaaaaagatcgtgatacgaggccacggactagataagccgaagctggggagttgctgtagagtactcgcgctggggtttcctttcggaagcggcccccctgagggctggaccgagctgacaatgggcgtgggaccatggcgggaagagacctggggcgagctaatcgagaaatgtctggaatcaatgtgccagggcgaggaagcagaacttcagctcccagggcacagtggccctccagtgcgcctgactctggcttcgttcacacagggccgcgactcttgggagttggagacctctgaaaaagaggcactggcaagagaggagcgtgccaggggcacagaactgtttagggccggcaatcctgagggtgcagcccgttgctatggcagagcccttaggctcctcctcactctacctccaccagggcctccggagcggacagtgctccacgccaacctggccgcctgtcagttacttctcggacagccgcagctcgccgcacagagctgtgatcgtgtccttgagagggaaccaggtcacctgaaggctttgtatagacgcggggtggcccaagccgccttgggaaatctggaaaaggccacggcagacttaaagaaggtcctggcaattgaccctaagaatagggcagcccaggaggagctgggaaaagttgtcattcagggaaagaatcaggatgccggcctagcccaaggcctcaggaaaatgtttggatag

SEQ ID NO: 211411 - DNA, 1050 bp, Artificial Sequence
  derived and/or modified sequence
atggagacgcccccagtcaacactatcggcgaaaaggacacatcccagcctcaacaagaatgggaaaagaatctcagagaaaacctggacagcgttatccagatcaggcagcagccccgcgaccctcctaccgaaacattggagctcgaagtgagtcccgacccagcttcccagatcctcgaacacactcagggcgccgagaagttggtggcagaactggaaggtgatagccataagtctcacggcagcacatcgcagatgcctgaagctcttcaggccagtgatctttggtactgtcccgacggatcatttgtgaagaagatcgtgatcaggggtcacgggctggacaaacccaaattgggttcttgttgcagggtcttggccctcgggttccctttcggctccggccctcccgaggggtggacagagcttaccatgggagtgggcccctggagagaggaaacctggggcgagttgattgaaaaatgcttggaatctatgtgtcagggcgaggaggccgaactgcagctccctgggcactcaggacccccagtgcgtctaacactcgcgagcttcacacaggggagagattcttgggaactcgagacctcagagaaagaggccctcgcccgggaggagcgcgctcgggggactgagctcttcagagccgggaatcccgagggagccgcacggtgttacggaagggcattgcgtttgctgcttacactccctcctcctggtccacctgagcgaacggtcctccatgcaaatctggccgcctgtcaacttcttctgggccagccacaactagcagcacagagttgcgatcgcgtcttggagcgggaacccggccatctgaaggctctgtatcgtaggggagtggcccaggctgcgctgggcaatctcgaaaaagcaacagccgacctaaagaaggtcctcgccatagatcccaaaaatagagccgcccaagaggaactcggcaaagtggtgatccaggggaaaaaccaggatgcagggctcgctcaggggctccggaagatgttcgggtag

SEQ ID NO: 211412 - DNA, 1050 bp, Artificial Sequence
  derived and/or modified sequence
atggagaccccacctgtgaacaccatcggggagaaggacaccagccagccccagcaggagtgggagaagaacctgcgggagaacctggacagcgtcatccagatccggcagcagccccgggaccccccaacagagaccctggagctggaggtgtccccagaccctgccagccagatcctggagcacacccagggcgctgagaagctggtggccgagctggagggggacagccacaagagccacggcagcaccagccagatgcctgaggccctgcaggccagtgacctgtggtactgcccagatggcagctttgtgaagaagatcgtcatccggggccacggcctggacaagcccaagctgggcagctgctgccgggtgctggccctgggcttcccctttggaagtggccccccagagggctggacagagctgaccatgggcgtgggcccctggagggaggagacctggggcgagctgattgagaagtgcctggagagcatgtgccagggcgaggaggccgagctgcagctgcccggccacagcggcccccctgtgcggctgaccctggccagcttcacccagggccgggacagctgggagctggagaccagcgagaaggaggccctggcccgggaggagcgggcccggggcacagagctgttccgggccggcaaccctgagggcgccgcccgctgctacggccgggccctgcggctgctgctgaccctgcccccacctggccccccagagaggacagtgctgcacgccaacctggccgcctgccagctgctgctgggccagccccagctggccgcccagagctgtgacagagtgctggagcgggagcccggccacctgaaggccctgtacagaagaggagtggcccaggccgccctgggcaacctggagaaggccacagctgacctgaagaaggtgctggccatcgaccccaagaacagagctgcccaggaggagctgggcaaggtggtgatccagggcaagaaccaggatgctggcctggcccagggcctgaggaagatgtttggatag

SEQ ID NO: 211413 - DNA, 1050 bp, Artificial Sequence
  derived and/or modified sequence
atggagaccccccccgtgaacaccatcggcgagaaggacaccagccagccccagcaagaatgggagaaaaatctgagggagaacctcgattctgttatccagattcgccagcaaccacgcgatccaccaaccgagactttggaactcgaagtgtcccctgaccccgccagccagatcctcgagcacacacagggagctgagaaactggtggccgaactggagggagattcacacaagtcacacggcagcacctcacaaatgcccgaagcactccaggccagcgacctttggtactgccctgatggcagctttgtaaagaagattgttatccgtgggcacggcttggacaagcctaagttaggatcttgttgccgtgtgcttgctctggggttcccctttggctcaggtccccctgaaggatggacagagctgaccatgggtgttgggccgtggagagaggaaacttggggcgagctcatagaaaagtgcctggaaagcatgtgccagggagaggaagcagagctgcagctccccggccactctggaccaccggtgcggctcaccttggcctcattcacccagggcagagactcctgggagctggagacctccgaaaaagaagcccttgctcgcgaagaacgtgctaggggcactgagttgttcagggccggtaatcccgagggagctgctagatgctacggccgggctcttcgcctattacttactcttccaccaccgggaccacccgagcgcactgttctccacgctaatctcgctgcatgtcaattgctactgggtcagccccaactggcagcacaatcttgcgatcgagtgctagaacgcgagccaggccatttgaaggcgctgtacagaagaggcgtggctcaggccgccctgggaaacctcgagaaggcaacagccgatctgaagaaagtgcttgcaatagacccgaagaaccgcgcggctcaagaagaactgggtaaagtggtcattcagggcaagaaccaggacgccggactggcccaaggacttcgcaaaatgtttggctag

SEQ ID NO: 211414 - DNA, 1050 bp, Artificial Sequence
  derived and/or modified sequence
atggagaccccccccgtgaacaccatcggcgagaaggacaccagccagccacaacaggaatgggagaagaatctcagggagaaccttgatagcgtaattcaaattcgacagcagcctcgggacccccctaccgaaaccctcgagcttgaggtgtcccccgatccagcatcacagatcttagaacacacacagggtgcagagaagctggttgctgagctggagggcgactcacataagtctcatggaagcacttcccaaatgcctgaggctcttcaggcttctgacctctggtattgtcccgacggctcttttgtgaagaagatcgtgatacggggccacggactcgacaaaccaaagctgggatcttgttgccgagttttagcgttgggttttcccttcggcagcggacccccagaaggatggaccgagctgaccatgggagtgggtccctggagggaggagacgtggggagagttgatcgagaaatgcctggagtccatgtgccagggggaggaggccgagctccagttgcccggacattccggaccccctgtacgcctcaccctcgcttccttcactcaaggacgtgatagttgggaactagaaacctctgagaaggaggctctcgcccgggaggagcgtgcacgaggaacggagttgttcagggctgggaatccagaaggagcggcccggtgctacggccgggcgcttcggctcttgctcacactgcctcctcctggaccccccgagaggaccgtgttacatgcgaacctcgcagcgtgtcaactgctgctaggccagccacaactagctgcacaatcatgtgatcgcgttcttgagcgcgaacccggacatcttaaagctctctatagaaggggggtagcacaagcggcgctgggaaacctcgagaaggccaccgcagacctgaaaaaggtcctggcaattgacccaaagaatcgcgctgcccaagaggagctgggaaaagtcgtgatccagggcaagaatcaggacgctgggctggcacaaggattgaggaaaatgttcggctag

SEQ ID NO: 211415 - DNA, 1050 bp, Artificial Sequence
  derived and/or modified sequence
atggagaccccccccgtgaacaccatcggcgagaaggacaccagccaacctcagcaagaatgggaaaaaaacctgcgtgagaacttggacagcgtcatacagataagacagcaacctagagacccacccactgagaccctcgaactcgaggtctccccggacccagcctcacagattttggaacatacgcagggagcagagaagctggtagctgagctggagggagacagccataagagtcacggctctacaagccaaatgcctgaagccttgcaagctagcgatctgtggtactgtcccgatggatcctttgtgaagaagatcgtgattcgggggcacggcttagacaagcctaaactggggtcctgttgtcgtgtgctcgccttgggctttcccttcgggtctggcccccctgagggatggaccgaattaacaatgggcgtaggcccctggcgagaggaaacttggggggagctgatagaaaaatgcctggagagcatgtgtcagggagaggaagcggaattgcaactgcccggacattcagggcctccggtgcgtctaacattagccagtttcacccaagggcgtgattcttgggagttggagaccagtgaaaaggaagccttagcccgggaagaaagggctagaggaacagagctgttccgggccggcaacccagagggagctgcccgctgctacggccgcgctctaaggttgttgctcacgctacctcctccaggaccacctgaacggaccgtgctccacgccaatctagccgcttgccagctgcttctcggccagcctcagcttgcagcccagtcttgcgaccgggttctggagagagaacctggtcatctcaaagccctgtatcgtaggggtgtggcccaggccgccctcggcaatctggagaaagcaaccgcggacctgaagaaggtcctcgccatcgaccccaagaatcgcgccgcgcaggaggagttgggcaaggtggtgattcagggcaaaaaccaggatgctggtttggcacaggggctccgtaaaatgtttggttag

SEQ ID NO: 211416 - DNA, 1050 bp, Artificial Sequence
  derived and/or modified sequence
atggaaacccctccagtgaacacaatcggtgagaaggatacatctcaaccgcagcaggagtgggagaagaacctccgagagaatctggattccgtgatccagattagacaacagcctagagacccccctactgagacactggagctcgaggtgtcaccagatcctgcctcgcagattctcgagcacacgcagggggctgaaaagctggtggcggaactggagggagatagtcacaagagtcatggaagcacttcccagatgcctgaggccctgcaagcttctgacctatggtattgccctgacggaagcttcgtaaagaagatagtgattcgtggccacggactggacaagcctaagctaggatcctgttgtagagtgcttgccctggggtttcctttcggaagcggaccaccagagggctggacagaactgactatgggggtgggcccttggcgcgaggaaacatggggtgagctaatagaaaaatgtttagagagcatgtgccagggcgaggaggctgagttgcagcttcctggccattccggaccacccgtgcgactgacattagcctcatttacccagggcagagattcttgggagctggagacctccgaaaaggaagcgcttgcacgggaggaaagggctaggggaaccgaactgttccgcgctgggaatccagagggggcagcgagatgctacggacgggctctaaggctgttgcttaccctgcccccaccaggtccgcctgagagaaccgtgttgcacgccaacttagctgcttgccagcttcttctggggcagccacagttggcagctcagagttgtgaccgcgttctcgagcgtgagccagggcatttgaaggccttgtatcgtcgcggtgttgctcaggccgcactgggtaacttagagaaagcaaccgccgatctgaagaaagtccttgccatcgatcctaagaacagagctgcccaggaggagctgggaaaagtggtcatacaaggcaagaaccaggatgccggactcgcacagggacttcgcaagatgttcggatag

SEQ ID NO: 211417 - DNA, 1050 bp, Artificial Sequence
  derived and/or modified sequence
atggagactcctcctgtcaacaccattggggagaaagatacatcacaacctcagcaggaatgggagaagaaccttagagaaaacctcgattcggtcatccagatacgccagcagccccgagacccaccaacagagacgctggaactggaagtctccccggatcctgccagccaaatcttagaacatacccaaggagcggagaagctggtggcagagcttgagggagacagccacaagagtcacggaagcaccagtcagatgcctgaggcacttcaggctagtgacctctggtattgtcccgatggatcctttgtgaagaagatagtgataagaggacacggacttgataaacccaagttaggctcttgttgtcgagtactcgctctaggctttcctttcggatctggtccaccagagggctggacagaattgactatgggcgtgggtccctggcgggaagagacctggggggagctgattgagaagtgcctggaatcgatgtgtcaaggcgaagaggctgaactgcaactccctggccatagcggaccaccggtgcggcttacactggcaagttttactcagggacgggactcatgggaactagagacgagcgaaaaagaggcactcgcacgtgaggagagagcacgtggaaccgaactgtttagagctggcaatccagaaggcgctgcacgatgttatgggagggccctgcggctgctcctaacactccctccacctggccctcccgaaagaaccgttctccacgctaacctcgcagcgtgtcagctgctgctaggccagccacagctggcagcacaatcatgcgacagagtcctggagcgtgagcctggtcacctcaaggcactgtatcgacgtggtgtcgcgcaggctgccttggggaacctagaaaaggccaccgcagatctgaaaaaggtattggccatcgaccctaagaacagggctgcgcaagaagagttggggaaagtcgtcatccagggaaagaatcaggacgcagggctcgcccagggcctgcgcaagatgtttggttag

SEQ ID NO: 211418 - DNA, 1050 bp, Artificial Sequence
  derived and/or modified sequence
atggagactccacctgtgaacacaataggcgagaaggatactagccagccccagcaggagtgggagaaaaaccttagagaaaatctggattcagtaatccagattaggcagcagccgagagacccccctactgagaccctggagttagaggtgtccccagatcccgcttcccagattctggagcacacccagggcgctgagaaactggtagccgagctggagggtgactcacacaaatcccatggttctacatcacaaatgcctgaagcactgcaagcctccgatttgtggtattgccccgacggtagttttgttaaaaagattgtgatccggggacacggacttgataaaccaaagctcggtagttgttgccgtgtcttagccctgggattcccatttggctccggccctcctgagggatggactgagttaaccatgggtgtgggcccatggagagaagagacatggggcgagttaatcgaaaaatgcctggaatccatgtgtcagggggaagaagccgagcttcagctcccgggacattccggcccaccagtacgccttacactcgcttcgtttacacaggggagggattcatgggagctcgagacttcagagaaggaggcccttgctcgggaggaaagggcacggggaaccgagctcttccgcgctgggaacccagagggcgcagccaggtgttatgggcgtgctctcagacttctgcttacattgcctcctcccggtccacctgaacgcacagttttacatgctaatctggctgcctgccagttactgctgggtcaaccacaacttgctgcccagagctgcgacagggttctggagagagagccaggccatctgaaggcactttacagacgaggggtggcacaggccgctctgggcaacctggaaaaagcaacagcagatcttaagaaggtcctggcaatagaccccaagaatcgagccgcacaagaggagctcggaaaagttgtcattcagggtaagaaccaagacgcgggattagcccagggactgagaaagatgtttggctag

SEQ ID NO: 211419 - DNA, 1345 bp, Artificial Sequence
  derived and/or modified sequence
agggttagttgtcagtatctttcccagttgttccgccccctacccccgcctcccgcaccgcgcccctctccggctgccctctccgcgtggggcaaggctccgagggcagcattcagtagccatttagctttggaaggagaggtgattcgaatggcccggctcctcctgtcaccatgctaggcactttggccgcgcaggtgctgacctgaacctggttcatccctttctgaccaaaactgttcactcaccgtggaagggactaagcatccatatggagacgccaccagtcaatacaattggagaaaaggacacctctcagccgcaacaagagtgggaaaagaaccttcgggagaaccttgattcagttattcagattaggcagcagccccgagaccctcctaccgaaacgcttgagctggaagtaagcccagatccagccagccaaattctagagcatactcaaggagctgaaaaactggttgctgaacttgaaggagactctcataagtctcatggatcaaccagtcagatgccagaggcccttcaagcttctgatctctggtactgccccgatgggagctttgtcaagaagatcgtaatccgtggccatggcttggacaaacccaaactaggctcctgctgccgggtactggctttggggtttcctttcggatcagggccgccagagggctggacagagctaactatgggcgtagggccatggagggaggaaacttggggggagctcatagagaaatgcttggagtccatgtgtcaaggtgaggaagcagagcttcagctgcctgggcactctggacctcctgtcaggctcacactggcatccttcactcaaggccgagactcctgggagctggagactagcgagaaggaagccctggccagggaagaacgtgcaaggggcacagaactatttcgagctgggaaccctgaaggagctgcccgatgctatggacgggctcttcggctgctcctgactttacccccacctggccctccagaacgaactgtccttcatgccaatctggctgcctgtcagttgttgctagggcagcctcagttggcagcccagagctgtgaccgggtgttggagcgggagcctggccatttaaaggccttataccgaaggggggttgcccaggctgcccttgggaacctggaaaaagcaactgctgacctcaagaaggtgctggcgatagatcccaaaaaccgggcagcccaggaggaactggggaaggtggtcattcaggggaagaaccaggatgcagggctggctcagggtctgcgcaagatgtttggctgattaaaagttaaaccttaaaagaga

SEQ ID NO: 211420 - DNA, 1345 bp, Artificial Sequence
  derived and/or modified sequence
agggttagttgtcagtatctttcccagttgttccgccccctacccccgcctcccgcaccgcgcccctctccggctgccctctccgcgtggggcaaggctccgagggcagcattcagtagccatttagctttggaaggagaggtgattcgaatggcccggctcctcctgtcaccatgctaggcactttggccgcgcaggtgctgacctgaacctggtttatccctttctgaccaaaactgttcactcaccgtggaagggactaagcatccatatggagacgccaccagtcaatacaattggagaaaaggacacctctcagccgcaacaagagtgggaaaagaaccttcgggagaaccttgattcagttattcagattaggcagcagccccgagaccctcctaccgaaacgcttgagctggaagtaagcccagatccagccagccaaattctagagcatactcaaggagctgaaaaactggttgctgaacttgaaggagactctcataagtctcatggatcaaccagtcagatgccagaggcccttcaagcttctgatctctggtactgccccgatgggagctttgtcaagaagatcgtaatccgtggccatggcttggacaaacccaaactaggctcctgctgccgggtactggctttggggtttcctttcggatcagggccgccagagggctggacagagctaactatgggcgtagggccatggagggaggaaacttggggggagctcatagagaaatgcttggagtccatgtgtcaaggtgaggaagcagagcttcagctgcctgggcactctggacctcctgtcaggctcacactggcatccttcactcaaggccgagactcctgggagctggagactagcgagaaggaagccctggccagggaagaacgtgcaaggggcacagaactatttcgagctgggaaccctgaaggagctgcccgatgctatggacgggctcttcggctgctcctgactttacccccacctggccctccagaacgaactgtccttcatgccaatctggctgcctgtcagttgttgctagggcagcctcagttggcagcccagagctgtgaccgggtgttggagcgggagcctggccatttaaaggccttataccgaaggggggttgcccaggctgcccttgggaacctggaaaaagcaactgctgacctcaagaaggtgctggcgatagatcccaaaaaccgggcagcccaggaggaactggggaaggtggtcattcaggggaagaaccaggatgcagggctggctcagggtctgcgcaagatgtttggctgattaaaagttaaaccttaaaagaga

SEQ ID NO: 211421 - DNA, 1050 bp, Artificial Sequence
  derived and/or modified sequence
atggagaccccccccgtgaacaccatcggcgagaaggacaccagccagccccagcaggagtgggagaagaacctgagagagaacctggacagcgtgatccagatcagacagcagcccagagacccccccaccgagaccctggagctggaggtgagccccgaccccgccagccagatcctggagcacacccagggcgccgagaagctggtggccgagctggagggcgacagccacaagagccacggcagcaccagccagatgcccgaggccctgcaggccagcgacctgtggtactgccccgacggcagcttcgtgaagaagatcgtgatcagaggccacggcctggacaagcccaagctgggcagctgctgcagagtgctggccctgggcttccccttcggcagcggcccccccgagggctggaccgagctgaccatgggcgtgggcccctggagagaggagacctggggcgagctgatcgagaagtgcctggagagcatgtgccagggcgaggaggccgagctgcagctgcccggccacagcggcccccccgtgagactgaccctggccagcttcacccagggcagagacagctgggagctggagaccagcgagaaggaggccctggccagagaggagagagccagaggcaccgagctgttcagagccggcaaccccgagggcgccgccagatgctacggcagagccctgagactgctgctgaccctgcccccccccggcccccccgagagaaccgtgctgcacgccaacctggccgcctgccagctgctgctgggccagccccagctggccgcccagagctgcgacagagtgctggagagagagcccggccacctgaaggccctgtacagaagaggcgtggcccaggccgccctgggcaacctggagaaggccaccgccgacctgaagaaggtgctggccatcgaccccaagaacagagccgcccaggaggagctgggcaaggtggtgatccagggcaagaaccaggacgccggcctggcccagggcctgagaaagatgttcggctag

SEQ ID NO: 211422 - protein, 1805 aa, Artificial Sequence
  derived and/or modified sequence
MSDTKVKVAVRVRPMNRRELELNTKCVVEMEGNQTVLHPPPSNTKQGERKPPKVFAFDYCFWSMDESNTTKYAGQEVVFKCLGEGILEKAFQGYNACIFAYGQTGSGKSFSMMGHAEQLGLIPRLCCALFKRISLEQNESQTFKVEVSYMEIYNEKVRDLLDPKGSRQSLKVREHKVLGPYVDGLSQLAVTSFEDIESLMSEGNKSRTVAATNMNEESSRSHAVFNIIITQTLYDLQSGNSGEKVSKVSLVDLAGSERVSKTGAAGERLKEGSNINKSLTTLGLVISSLADQAAGKGKSKFVPYRDSVLTWLLKDNLGGNSQTSMIATISPAADNYEETLSTLRYADRAKRIVNHAVVNEDPNAKVIRELREEVEKLREQLSQAEAMKAPELKEKLEESEKLIKELTVTWEEKLRKTEEIAQERQRQLESMGISLEMSGIKVGDDKCYLVNLNADPALNELLVYYLKDHTRVGADTSQDIQLFGIGIQPQHCEIDIASDGDVTLTPKENARSCVNGTLVCSTTQLWHGDRILWGNNHFFRINLPKRKRRDWLKDFEKETGPPEHDLDAASEASSEPDYNYEFAQMEVIMKTLNSNDPVQNVVQVLEKQYLEEKRSALEEQRLMYERELEQLRQQLSPDRQPQSSGPDRLAYSSQTAQQKVTQWAEERDELFRQSLAKLREQLVKANTLVREANFLAEEMSKLTDYQVTLQIPAANLSANRKRGAIVSEPAIQVRRKGKSTQVWTIEKLENKLIDMRDLYQEWKEKVPEAKRLYGKRGDPFYEAQENHNLIGVANVFLECLFCDVKLQYAVPIISQQGEVAGRLHVEVMRVTGAVPERVVEDDSSENSSESGSLEVVDSSGEIIHRVKKLTCRVKIKEATGLPLNLSNFVFCQYTFWDQCESTVAAPVVDPEVPSPQSKDAQYTVTFSHCKDYVVNVTEEFLEFISDGALAIEVWGHRCAGNGSSIWEVDSLHAKTRTLHDRWNEVTRRIEMWISILELNELGEYAAVELHQAKDVNTGGIFQLRQGHSRRVQVTVKPVQHSGTLPLMVEAILSVSIGCVTARSTKLQRGLDSYQRDDEDGDDMDSYQEEDLNCVRERWSDALIKRREYLDEQIKKVSNKTEKTEDDVEREAQLVEQWVGLTEERNAVLVPAPGSGIPGAPADWIPPPGMETHIPVLFLDLNADDLSANEQLVGPHASGVNSILPKEHGSQFFYLPIIKHSDDEVSATASWDSSVHDSVHLNRVTPQNERIYLIVKTTVQLSHPAAMELVLRKRIAANIYNKQSFTQSLKRRISLKNIFYSCGVTYEIVSNIPKATEEIEDRETLALLAARSENEGTSDGETYIEKYTRGVLQVENILSLERLRQAVTVKEALSTKARHIRRSLSTPNVHNVSSSRPDLSGFDEDDKGWPENQLDMSDYSSSYQDVACYGTLPRDSPRRNKEGCTSETPHALTVSPFKAFSPQPPKFFKPLMPVKEEHKKRIALEARPLLSQESMPPPQAHNPGCIVPSGSNGSSMPVEHNSKREKKIDSEEEENELEAINRKLISSQPYVPVEFADFSVYNASLENREWFSSKVDLSNSRVLEKEVSRSPTTSSITSGYFSHSASNATLSDMVVPSSDSSDQLAIQTKDADSTEHSTPSLVHDFRPSSNKELTEVEKGLVKDKIIVVPLKENSALAKGSPSSQSIPEKNSKSLCRTGSCSELDACPSKISQPARGFCPREVTVEHTTNILEDHSFTEFMGVSEGKDFDGLTDSSAGELSSRRSLPNKTGGKTVSDGLHHPSQLHSKLENDQVIIPEAAFWVLCCQ

SEQ ID NO: 211423 - DNA, 5418 bp, Artificial Sequence
  derived and/or modified sequence
atgtcagacaccaaggtgaaagtcgctgtacgcgttcggcccatgaacagacgtgagcttgaactgaacacaaagtgtgttgtggagatggagggtaaccaaacagtgcttcatccacctcccagcaataccaagcagggcgaacgaaaacctccaaaggtctttgcattcgactattgtttttggagcatggatgagagtaatacaacgaaatacgctgggcaggaggtggttttcaagtgtttgggcgaaggtatattggaaaaggcctttcaggggtataatgcttgtatcttcgcgtatggacagaccggcagtggtaaaagcttctctatgatgggccatgctgagcagttagggttaatccctcgactgtgctgtgctctctttaaaaggatctccttagagcaaaatgagtctcagaccttcaaagtggaagtcagctatatggaaatatataacgaaaaggtgcgagacctgctagacccaaagggctctaggcagtctttaaaggttagggagcataaagtccttggaccatatgtagatggactgagccaacttgctgtgacgtcctttgaggatatcgagagcctgatgtccgagggtaacaagtctcggaccgtggcagccactaatatgaacgaggagtcgtctaggtcacacgcagtgtttaacataattattacccaaactctgtatgacctacaatccgggaacagcggcgagaaggtctcaaaagtgagcctggtggaccttgcagggtccgagagggtaagtaaaacaggggcggctggggaaagactcaaagagggctcaaatattaataagagtctcacaaccttgggtctcgttatttcatccctggccgatcaggccgctggaaagggcaagagcaaattcgtcccttatagggattctgtcctaacctggctgcttaaggacaacttagggggaaattcccagacctcgatgatagctactatctctcccgccgccgataactatgaagagacgttatccaccctgaggtacgcggatcgggcgaaacgtatcgttaaccatgcagttgtgaacgaagatccaaacgccaaagtgattagagaattgcgagaagaggttgagaagctcagagagcagttgagccaggcagaggccatgaaggcccctgagttaaaggaaaagttggaagaatcggagaagctgattaaagaattaaccgtgacttgggaggagaaactcagaaagaccgaggaaattgcccaggagcggcagcggcagctggagtcgatgggtatcagtttggagatgtcagggatcaaagtaggggatgataagtgctacctagtcaaccttaatgcagatccagcattgaacgagctgctcgtgtattatctcaaggatcatactcgagttggcgccgatacctcccaagatatccagctcttcgggatcggcatccagccacagcactgcgaaatcgacatcgccagcgatggcgacgtgaccctcactcctaaggagaacgctcgctcttgtgttaacggcaccttagtctgttcaactacgcagctgtggcatggcgaccgaatcctgtggggcaacaaccactttttcaggatcaacttgcccaagcggaagcgtcgcgattggttgaaggatttcgagaaggagactggcccccctgaacacgacttggatgccgcttccgaggcctctagcgagccggattataactatgagtttgctcagatggaagtgatcatgaagaccctgaattcgaacgacccggtgcaaaatgtggtgcaagtgctcgaaaaacagtacctcgaagaaaagaggtctgctctcgaagagcagcgcctgatgtacgaaagggaacttgagcagcttcggcagcagctatcaccggacaggcaaccgcagtcgtcaggaccagatcggctggcctactcttcccaaaccgcacaacaaaaagtaacacaatgggctgaagagagagacgagctcttccggcagagcctggctaagctccgcgagcagctcgtgaaggccaatacattagttagggaggccaactttctagctgaggaaatgtccaagttgactgattatcaagtaactctgcaaatccccgcagctaatctgtcagctaatcggaagagaggagccattgtatccgagcccgcaatccaggtcagacggaagggtaagtccacgcaggtgtggaccatagagaaactggagaacaaactcattgatatgagagacctctaccaggaatggaaggagaaagtgccagaggccaaaaggctctacgggaaaaggggcgatcccttttacgaagcccaggaaaaccataacttgatcggcgtcgcaaatgtatttcttgagtgcttattttgcgacgtaaaattgcagtatgctgtcccaatcatttctcagcagggcgaggtggccgggagactacacgtcgaggtgatgcgggtgaccggagcagttccagaaagggtggtcgaagacgactccagtgaaaattcctcagaatccggctctttggaagtggtcgattccagcggtgaaattatacacagggtaaagaagctgacatgtcgtgtgaaaatcaaagaggcaaccggcctgcctctgaatctgtcaaactttgttttctgtcagtacactttctgggaccaatgcgagagtaccgtcgctgctcccgtggtggatccagaggtcccttctccacagagcaaagatgctcagtacacagtgacattcagccactgtaaggattacgtggtgaatgtgacagaagaattcctggagttcatttctgacggggcactagctatcgaagtgtggggccatcgatgtgccggaaacggatcctcaatctgggaggtggattcactgcatgccaaaactcgtacgttacacgacaggtggaatgaagtgacgaggcggattgagatgtggatatcaatccttgaactgaatgagctcggggagtacgccgccgtagaactccatcaggcgaaggatgtgaacacagggggaatctttcaattacgtcaaggtcactccagaagagtgcaggtgactgtgaagccagtccagcactcaggaaccctcccgcttatggtggaggctatcctgtcagttagcatcggctgcgttacagcccgtagcactaagctgcagcgggggctggactcgtaccagagggacgacgaagatggagatgacatggacagttaccaagaagaagacctcaattgcgtgcgggagcgctggagtgatgcactgatcaagcgacgagaataccttgatgaacagatcaaaaaggtctcgaataaaacagaaaagacagaggacgacgttgaacgtgaagcccaactagtggaacaatgggtgggtttgactgaagagcggaacgccgtgctggttccggcccccggcagtggcatcccaggcgcaccggcagactggatccctccccctgggatggagacccatatcccagtcctctttcttgacctaaacgccgacgatctgagcgccaatgaacagctcgtggggcctcacgcatcgggggtgaactcaatcctcccaaaagaacacgggtctcagtttttctatctcccgattatcaaacacagtgatgatgaagtctcggcgacagcatcatgggacagttcagtccacgatagtgtgcaccttaatcgcgtcacccctcagaacgaacgcatctaccttattgtgaagacaaccgtgcagctgtcccatccagctgccatggagctcgtgctccgaaaaaggattgccgctaatatctacaacaagcagtcttttactcagtctctaaagcgccgcatctctctgaaaaacatcttctactcctgcggcgtcacctatgagatcgtgagcaacatccccaaggcgaccgaggagatagaggacagagaaaccctcgccttgttggctgcgcgatcagagaacgagggtacttccgatggcgagacatatatcgagaaatacaccagaggcgttctgcaggtggagaatattcttagcctcgaacgtctgcggcaggcagtcacagtgaaggaagcattgagcacaaaagctcgccacattcgcaggagcctctctacaccaaacgtgcataatgtgtcatctagtcggcccgatctaagtgggtttgacgaggacgataagggatggcccgaaaatcagttggacatgtccgattacagcagcagctatcaagacgtggcctgctacggcacactgcctcgcgactccccacgtaggaacaaagaaggctgcacttcagagactccccatgctcttaccgttagccctttcaaggccttcagcccccagcctccaaagttctttaagccactgatgcctgttaaggaggagcacaagaagcggattgccctcgaggctcgccccttattaagtcaagaatctatgccaccgccacaggctcataatccgggttgcatagtcccctctggaagtaacgggtcttccatgcctgtagaacataattctaagcgggagaagaaaattgactctgaggaagaggagaacgaattagaagcaatcaacaggaagctgatcagctcacagccttacgtgccagtcgagttcgcggactttagtgtctacaacgcttccctggagaacagagaatggttcagctcaaaggtggatctgtccaatagccgggtgctggaaaaggaagtcagtcgcagcccaacaacaagcagtatcacctcagggtactttagccacagtgcctcgaacgcgactctgagtgacatggtggtgcctagtagcgattcctcagaccagctcgccatccagactaaggatgcggacagcacagagcatagcaccccctcgctggtgcatgacttccgcccttcttctaataaggagctcactgaagtggaaaaggggcttgtgaaggacaaaatcatcgtagtgccgctgaaagaaaactctgccctagccaaggggtcacctagcagccagtctattcctgaaaagaattccaaaagcctgtgccggactggcagttgtagcgaactggacgcctgtccctccaaaatctcccagcctgctaggggattctgtcccagagaagtgaccgtggaacacaccacaaatattctggaagatcattcttttacagaattcatgggcgtgagtgaggggaaggacttcgacgggcttacggattcgtctgcgggagaattgtcctcgagaaggagcctgcccaataaaaccgggggtaaaacagtctccgacggcctccaccatccatcccagctgcatagtaagctcgagaatgaccaggtcatcattcctgaagccgccttctgggtgctgtgttgtcagtag

SEQ ID NO: 211424 - DNA, 5941 bp, Artificial Sequence
  derived and/or modified sequence
gcggccgcgctcgaggggcgcgcggctgcagcggcggcggcgccgcgcgtgaggggccgcctaaggccgagcgggcgcggcgagcggccgggcgagcgcagccaacatgtcggataccaaggtaaaagttgccgtccgggtccggcccatgaaccgacgagaactggaactgaacaccaagtgcgtggtggagatggaagggaatcaaacggtcctgcaccctcctccttctaacaccaaacagggagaaaggaaacctcccaaggtatttgcctttgattattgcttttggtccatggatgaatctaacactacaaaatacgctggtcaagaagtggttttcaagtgccttggggaaggaattcttgaaaaagcctttcaggggtataatgcgtgtatttttgcatatggacagacaggttcgggaaaatccttttccatgatgggccatgctgagcagctgggccttattccaaggctctgctgtgctttatttaaaaggatctctttggagcaaaatgagtcacagacctttaaagttgaagtgtcctatatggaaatttataatgagaaagttcgggatcttttagaccccaaagggagtagacagtctcttaaagttcgagaacataaagttttgggaccatatgtagatggtttatctcaactagctgtcactagttttgaggatattgagtcattgatgtctgagggaaataagtctcgaacggtagctgctaccaacatgaacgaagaaagcagccgctcccatgctgtgttcaacatcataatcacacagacactttatgacctgcagtctgggaattccggggagaaagtcagtaaggtcagcttggtagacctggcgggtagcgaaagagtatctaaaacaggagctgcaggagagcgactgaaagaaggcagcaacattaacaaatcgcttacaaccttggggttggttatatcatcactggctgaccaggcagctggcaagggtaaaagcaaatttgtgccttatcgagattcagtcctcacttggctgcttaaggacaacttggggggcaacagccaaacctctatgatagccacaatcagcccagccgcagacaactatgaagagaccctctccacattaagatatgcagaccgagccaaaaggattgtgaaccatgctgttgtgaatgaggaccccaacgcaaaagtgatccgagaactgcgggaggaagtcgagaaactgagagagcagctctctcaggcagaggccatgaaggcccctgaactgaaggagaagctcgaagagtctgaaaagctgataaaagaactaacagtgacttgggaagagaagctgagaaaaacagaagagatagcacaggaaagacaacgacaacttgaaagcatggggatttccctggagatgtccggtatcaaggtgggggatgacaaatgctacttagtcaatctgaatgcagaccctgctcttaacgaacttctggtttattatttaaaggatcacaccagggtgggtgcagatacctctcaagatatccagctttttggcataggaattcagcctcagcactgtgagattgacattgcatctgatggagacgtcactctcactccaaaagaaaatgcaaggtcctgtgtgaacggcacccttgtgtgcagtaccacccagctgtggcatggtgaccgaatcctatggggaaataatcacttttttagaataaacttacctaagaggaaacgtcgagattggttgaaagactttgaaaaagaaacgggcccgccagagcatgacctggatgcagccagtgaggcttcctctgaaccagactataactatgaatttgcacagatggaagttatcatgaaaaccctgaatagtaatgacccagttcaaaatgtggttcaggtcctggagaaacaatacctagaagaaaagagaagtgccctagaggagcagcggctcatgtatgagcgggaactggagcaactccgccagcagctctcccccgacaggcagccacagagtagcggccctgaccgcctggcctacagcagccagacagcgcagcagaaggtgacccagtgggcagaagagagggatgaactcttccgacaaagcctggcaaaactgcgagagcagctggttaaagctaataccttggtgagggaagcaaacttcctggctgaggaaatgagcaaactcaccgattaccaagtgactcttcagatccctgctgcaaacctcagtgccaataggaagagaggtgcaatagtgagtgaaccagctatccaagtgaggaggaaaggaaagagcacccaagtgtggaccattgagaagctggagaataaattaattgacatgagagacctttaccaagaatggaaggaaaaagttcctgaggcaaagagactctacggaaaacgaggtgaccctttctatgaagcccaagaaaatcacaacctcatcggggtggcgaatgtattcttggaatgcctcttctgtgatgtgaaacttcagtatgcagtccctatcatcagccagcagggggaggttgcagggcgtctccacgtggaagtgatgcgtgttacaggagctgttccagagcgtgtggtggaggatgactcttcggagaattccagtgaaagtgggagccttgaagtcgtagacagcagcggggaaatcattcaccgagtcaaaaagctgacatgtcgggtaaaaattaaagaagcaacggggctgcccttaaacctctcaaattttgtcttctgtcaatacacattctgggaccagtgtgagtctacggtggctgccccggtggtggaccccgaggtgccttcaccacagtccaaggatgcccagtacacagtgaccttctcccactgtaaggactatgtggtgaatgtaacagaagaatttctggagttcatttcagatggagcactggccattgaagtatggggccaccggtgtgctggaaatggcagctccatctgggaggtcgattctcttcatgctaagacaagaacactgcatgacaggtggaatgaagtaacgcgaagaatagaaatgtggatctccatattagaattgaatgagttaggagagtatgctgcagtggaacttcatcaggcaaaagatgtcaacacaggaggcatctttcaacttagacagggtcattcccgtagagtacaagtcacggtgaaacctgtgcagcattcagggacactgccacttatggttgaagccatcctgtcagtatccatcggctgtgtaactgccaggtccaccaaactccaaagagggctggacagttaccagagagatgatgaggatggtgatgatatggatagttatcaggaagaagacttaaactgcgtaagggagaggtggtcagatgcactcattaaacgacgagaatacctggatgaacagataaaaaaagtcagcaataaaacagagaaaacagaggacgatgtggagcgggaagcccagcttgtggagcagtgggtagggctgactgaggaaaggaatgctgtgctggtgccagccccaggcagtgggattcctggggcacctgccgactggatcccacctcctggaatggaaacccacataccagttctcttcctcgatttgaatgcggatgacctcagtgccaatgagcagcttgttggcccccatgcatccggcgtgaactccatcctgcccaaggagcatggcagccagtttttctacctgcccatcataaagcacagtgatgatgaggtttcagccacagcctcttgggattcctcggtgcatgattctgttcacttgaatagggtcacaccacagaatgaaaggatttacctaattgtgaaaaccacagttcaactcagccaccctgctgctatggagttagtattacgaaaacgaattgcagccaatatttacaacaaacagagtttcacgcagagtttgaagaggagaatatccctgaaaaatatattttattcctgtggtgtaacctatgaaatagtatccaatataccaaaggcaactgaggagatagaggaccgggaaacgctggctctcctggcagcaaggagtgaaaacgaaggcacatcagatggggagacgtacattgagaagtacactcgaggcgtgctgcaggtggaaaacattctgagtcttgaacggctccggcaggccgtcacagtcaaagaagcactttccaccaaagcccggcacattcggaggagcctcagtacaccaaatgttcataatgtctcttccagccgaccggacctttctggctttgatgaagatgacaagggttggccagagaaccagttggacatgtctgactatagctccagttaccaagatgtagcatgttatggaactttacccagggattctcctcgaaggaataaagaaggttgtacatcagagactcctcatgccttaaccgtcagcccttttaaagcattctctcctcagccaccaaagtttttcaagcccctaatgcctgtaaaagaggagcataagaaaaggatagccctggaagcaaggcctcttctaagccaggagagcatgcctccacctcaggcacataaccctggctgcattgtaccctcaggaagcaatggcagcagcatgccagtagaacacaatagcaaacgtgagaagaagattgactctgaggaggaagaaaatgagctggaagctattaacaggaagctaataagttcacagccttatgtacctgtggagtttgctgacttcagtgtttacaatgccagcttggagaacagggaatggttttcctctaaagtagatctgtcaaactcacgggtcttggagaaagaagtgtcccgtagccctaccaccagcagtattaccagtggctacttttcccacagtgcctccaatgccaccctgtctgacatggtggtcccttctagtgacagctcagaccagctggccattcagacgaaggatgcagactccaccgagcactccacaccatcgcttgtgcatgatttcaggccgtcctcaaacaaagagttgacagaagtcgaaaaaggcttggtaaaggacaagataattgtggtgccactcaaggaaaacagtgccttagccaaagggagcccatcatcccagagcatccctgagaaaaactccaaatcactgtgcaggactggctcatgttcagaactagatgcctgccccagcaaaattagccagccagccaggggattctgccccagggaggtgacggtagaacacaccaccaacatccttgaagaccattctttcacagaatttatgggagtgtcagagggaaaagattttgatggtttgacagattcttctgctggagagctttccagtaggaggagtctaccaaataaaacaggcggcaagactgtctccgatgggctccaccaccccagccagctgcattccaagttagagaatgaccaggtaataattccagaggcagccttttgggttctgtgctgtcaatgagtatgtctaactgtatgtcaaccccagaggcccttcaccgcaacaacttggtaggaaagattcatccagttgtttgtgacagcaaagatgagcccacagagaagcaggctcacttcctgcacagctgtctctgtcggagagcaagtctgttttgggaactagaacgcaattgtgaaattataagaccagtggatttttttacctggcacatgggttggtgttgaatgaagtgttcagatggataaggatcaatctcatattcattccctgggatgtttagttaccagttttcccaaagtgttctggtagcatctaccatatttcatcaaatctgtgattcctttgattattatatgaaccattattttatgtatcattaagaaaaaatactgccaattaaactctgtcatatcaaca

SEQ ID NO: 211425 - DNA, 5418 bp, Artificial Sequence
  derived and/or modified sequence
atgtctgacaccaaggtgaaggtggccgtgcgggtgcggcccatgaacagaagagagctggagctgaacaccaagtgtgtggtggagatggagggcaaccagacagtgctgcaccccccacccagcaacaccaagcagggcgagaggaagccacccaaggtgtttgcctttgactactgcttctggagcatggatgagagcaacaccaccaagtatgccggccaggaggtggtgttcaagtgcctgggggagggcatcctggagaaggccttccagggctacaatgcctgcatctttgcctacggccagacaggcagcggcaagagcttctccatgatgggccacgccgagcagctgggcctcatcccccggctgtgctgtgccctcttcaagaggatcagcctggagcagaatgaaagccagaccttcaaggtggaggtgtcctacatggagatctacaatgagaaggtgcgggacctgctggaccccaagggcagccggcagagcctgaaggtgcgggagcacaaggtgctgggcccctacgtggatggcctgagccagctggccgtgaccagctttgaggacatcgagagcctgatgtctgagggcaacaagagcaggacagtggccgccaccaacatgaatgaggagagcagccgcagccatgctgtgttcaacatcatcatcacccagaccctgtatgacctgcagagcggcaacagcggggagaaggtgtccaaggtgtccctggtggacctggccggcagcgagcgggtgtccaagacaggagctgctggggagcggctgaaggagggcagcaacatcaacaagagcctgaccaccctgggcctggtgatcagcagcctggccgaccaggccgccggcaagggcaagagcaagtttgtgccctacagagattctgtgctgacctggctgctgaaggacaacctgggcggcaacagccagacctccatgattgccaccatcagccctgctgctgacaactatgaggagaccctgagcaccctgcgctatgctgaccgggccaagagaattgtgaaccacgctgtggtgaatgaagaccccaatgccaaggtgatccgggagctgcgggaggaggtggagaagctgcgggagcagctgagccaggccgaggccatgaaggcccctgagctgaaggagaagctggaggagagcgagaagctgatcaaggagctgactgtgacctgggaggagaagctgaggaagacagaggagatcgcccaggagcggcagaggcagctggagagcatgggcatcagcctggagatgagcggcatcaaggtgggagatgacaagtgctacctggtgaacctgaatgctgaccctgccctgaatgagctgctggtgtactacctgaaggaccacaccagggtgggcgctgacaccagccaggacatccagctgtttggaattggcatccagccccagcactgtgaaattgacatcgccagtgatggagatgtgaccctgacccccaaggaaaatgcccggagctgtgtgaatggcaccctggtgtgcagcaccacccagctgtggcatggagaccgcatcctgtggggcaacaaccacttcttccgcatcaacctgcccaagaggaagaggcgggactggctgaaggactttgagaaggagactggacctcctgagcatgacctggatgctgccagcgaggccagcagcgagccagactacaactatgaatttgcccagatggaggtgatcatgaagaccctgaacagcaatgaccctgtgcagaatgtggtgcaggtgctggagaagcagtacctggaggagaagaggtctgccctggaggagcagaggctgatgtatgaaagagagctggagcagctgcggcagcagctgagcccagaccggcagccccagagcagcggccctgaccggctggcctacagcagccagacagcccagcagaaggtgacccagtgggccgaggagagagatgagctgttccggcagagcctggccaagctgcgggagcagctggtgaaggccaacaccctggtgcgggaggccaacttcctggccgaggagatgagcaagctgacagactaccaggtgaccctgcagatcccagctgccaacctgagcgccaacaggaagagaggagccatcgtgtctgagcccgccatccaggtgcggaggaagggcaagagcacccaggtgtggaccatcgagaagctggagaacaagctgattgacatgagggacctgtaccaggagtggaaggagaaggtgcctgaggccaagaggctgtatggcaagagaggagaccccttctatgaggcccaggagaaccacaacctgattggagtggccaacgtgttcctggagtgcctcttctgtgatgtgaagctgcagtatgctgtgcccatcatcagccagcagggcgaggtggccggccgcctgcacgtggaggtgatgagggtgactggagctgtgcctgagcgggtggtggaggatgacagcagcgagaacagcagcgagagcggcagcctggaggtggtggacagcagtggagagatcatccaccgggtgaagaagctgacctgccgggtgaagatcaaggaggccaccggcctgcccctgaacctgagcaactttgtgttctgccagtacaccttctgggaccagtgtgagagcacagtggccgcccctgtggtggaccctgaggtgcccagcccccagagcaaggatgcccagtacacagtgaccttcagccactgcaaggactatgtggtgaatgtgacagaggagttcctggagttcatcagtgatggagccctggccatcgaggtgtggggccaccgctgtgctggaaatggcagcagcatctgggaggtggacagcctgcacgccaagaccaggaccctgcatgaccgctggaatgaggtgaccaggagaattgagatgtggatcagcatcctggagctgaatgagctgggggagtatgctgctgtggagctgcaccaggccaaggatgtgaacacaggaggcatcttccagctgcggcagggccacagcagaagagtgcaggtgacagtgaagcctgtgcagcacagcggcaccctgcccctgatggtggaggccatcctgtctgtgtccatcggctgtgtgacagcccggagcaccaagctgcagaggggcctggacagctaccagagagatgatgaagatggagatgacatggacagctaccaggaggaggacctgaactgtgtgcgggagcgctggagcgatgccctgatcaagagaagagagtacctggatgagcagatcaagaaggtgagcaacaagacagagaagacagaagatgatgtggagcgggaggcccagctggtggagcagtgggtgggcctgacagaggagagaaatgctgtgctggtgcctgcccctggcagcggcatccctggggccccagctgactggatccccccacctggcatggagacccacatccctgtgctcttcctggacctgaatgctgatgacctgagcgccaatgagcagctggtgggcccccacgccagcggcgtgaacagcatcctgcccaaggagcacggcagccagttcttctacctgcccatcatcaagcacagtgatgatgaggtgtctgccacagcctcctgggacagctctgtgcatgattctgtgcacctgaacagagtgaccccccagaatgaaagaatctacctgattgtgaagaccaccgtgcagctgagccaccctgctgccatggagctggtgctgaggaagagaattgctgccaacatctacaacaagcagagcttcacccagagcctgaagaggcgcatcagcctgaagaacatcttctacagctgtggggtgacctatgaaattgtgagcaacatccccaaggccacagaggagattgaagatcgggagaccctggccctgctggccgcccggagtgaaaatgaaggcaccagtgatggagagacctacatcgagaagtacacccggggcgtgctgcaggtggagaacatcctgagcctggagcggctgcggcaggccgtgacagtgaaggaggccctgagcaccaaggcccggcacatccgccgcagcctgagcaccccaaatgtgcacaacgtgagcagcagcaggccagacctgagcggctttgatgaagatgacaagggctggccagagaaccagctggacatgtctgactacagcagcagctaccaggatgtggcctgctacggcaccctgccccgggacagccccaggaggaacaaggagggctgcaccagcgagacccctcatgccctgactgtgagccccttcaaggccttcagcccccagccccccaagttcttcaagcccctgatgcctgtgaaggaggagcacaagaagagaattgccctggaggcccggcccctgctgagccaggagagcatgcccccaccccaggcccacaaccctggctgcatcgtgcccagcggcagcaatggcagctccatgcctgtggagcacaacagcaagcgggagaagaagattgattctgaggaggaggagaatgagctggaggccatcaacaggaagctgatcagcagccagccctacgtgcctgtggagtttgctgacttctctgtgtacaatgccagcctggagaaccgggagtggttcagcagcaaggtggacctgagcaacagccgggtgctggagaaggaggtgagccgcagccccaccaccagcagcatcaccagcggctacttcagccacagcgccagcaatgccaccctgagtgacatggtggtgcccagcagtgacagcagtgaccagctggccatccagaccaaggatgctgacagcacagagcacagcacccccagcctggtgcatgacttccggcccagcagcaacaaggagctgacagaggtggagaagggcctggtgaaggacaagatcatcgtggtgcccctgaaggaaaattctgccctggccaagggcagccccagcagccagagcatccctgagaagaacagcaagagcctgtgcaggacaggcagctgcagcgagctggatgcctgccccagcaagatcagccagcctgcccggggcttctgcccccgggaggtgacagtggagcacaccaccaacatcctggaggaccacagcttcacagagttcatgggcgtgtctgagggcaaggactttgatggcctgacagacagcagcgctggggagctgagcagcagaagaagcctgcccaacaagacaggaggcaagacagtgtctgatggcctgcaccaccccagccagctgcacagcaagctggagaatgaccaggtgatcatccctgaggccgccttctgggtgctgtgctgccagtag

SEQ ID NO: 211426 - DNA, 5418 bp, Artificial Sequence
  derived and/or modified sequence
atgagcgacaccaaggtgaaggtggccgtgcgggtgcggcccatgaaccgaagagagctggagttgaacacgaagtgtgtagttgagatggagggcaaccagacggtactgcaccctcctcccagcaacactaaacagggcgagagaaaaccccccaaggtgtttgcttttgactattgtttttggtcaatggatgagagtaacactactaagtacgctgggcaggaagtggttttcaagtgtctgggagagggaattctcgaaaaggcctttcaaggctacaacgcctgtattttcgcttacgggcagaccgggtcaggcaaatcctttagcatgatgggccacgccgaacagcttggcttgatccccaggctgtgttgtgcactgttcaagcgcataagtctggaacagaatgaatcacaaactttcaaagtggaagtctcttacatggagatctacaacgaaaaagttcgagacctcttggacccaaaaggctcccgccagtccctgaaggtcagggagcataaggtattagggccatatgtagacgggttgagccagctggcagtgacgagtttcgaagatatcgagagcctgatgagtgagggtaataaatctaggactgtggcagcaaccaatatgaacgaagaatccagccggtcccacgccgtgtttaatatcatcatcacgcaaacattatacgatctccagagcggcaattccggagaaaaagtgtccaaagtttccctagttgatctggctgggagcgaacgagtgtccaagaccggggccgcaggggaacgtctgaaggaaggctccaacatcaataagtcactaaccaccttgggcttggtgataagctcactggcagatcaggctgcagggaagggcaaatccaagttcgtgccgtacagggatagtgtgctgacttggctcctgaaagataacctcggtggcaactcccagacatcaatgatcgctacgatctcccccgcggccgacaattacgaggaaacgctttctacactgaggtatgcagaccgcgccaaaagaatcgtcaaccacgctgttgtcaacgaggacccaaatgcaaaggtgatcagagagctgcgggaggaagttgaaaagttaagagaacagctgtcccaggctgaggctatgaaggctccagaactgaaggagaagctagaagagagcgagaaactgataaaagaattgactgtcacttgggaggagaagctccgaaagactgaggagatcgctcaggagcgacagaggcagctggaatcgatgggcatatcactggaaatgagcggaatcaaagtcggcgacgacaagtgttatttggtgaacttgaatgcagatccagcactgaatgagctgctggtgtactatttaaaagaccacaccagggtcggggcagataccagccaggacatccagcttttcggcatcggcattcagccgcagcattgtgagattgatattgcctccgacggcgacgtgacactgacaccaaaagagaacgcaaggagctgcgtgaacgggactttggtatgtagcactactcaactgtggcatggtgatcgaattttgtggggaaacaaccacttcttcaggataaacctgccaaagaggaagaggcgtgattggcttaaagacttcgaaaaggagacaggccctccggagcacgacttggatgcggcatcagaagcttcttctgagccagattataattacgaatttgcccagatggaggtgattatgaagactctcaattccaatgatcctgtccagaatgttgttcaggtgctagaaaagcaatatctcgaggagaaaaggagcgcattagaagagcaacggcttatgtacgagcgagagctggagcaactgcggcagcagttgtctccggatcggcaaccccagagctctggccctgatcgactggcgtacagcagtcagacggctcagcaaaaggtaacccagtgggccgaggaacgcgacgagctgttccgccaaagcctcgccaagctgcgcgagcagctggtaaaggccaacacactagtgcgagaggctaactttctggccgaagaaatgtcaaaactcaccgactaccaggtgactctgcagatcccagccgctaatctgtcagctaataggaagcgtggtgctatcgtttctgagccggccatccaggttcgaagaaagggcaaatcgacacaagtgtggacgatcgagaaactagagaacaagcttatagatatgcgcgacctataccaggagtggaaggagaaggtgcccgaggccaaacggctatatggaaagcgcggagatcccttctacgaggcacaggagaaccataatctcattggagtcgctaatgtgttcctggagtgcctgttctgtgacgtgaagctgcagtatgctgtgcctattatttcccagcaaggagaggtggccgggcgtttgcatgtcgaagtgatgagagtgaccggcgccgtcccagagcgcgtggttgaagatgatagctccgagaactcttctgaaagtggaagccttgaggtggtggatagtagtggcgaaatcattcaccgcgtgaagaagttaacctgcagagtcaagatcaaagaggctacggggcttcctctgaacctttctaacttcgttttctgtcagtacacattctgggatcagtgcgaatctactgtggccgcccctgtcgtggacccagaagtgccctcaccccaatccaaggatgcgcagtatactgtgacattcagccactgtaaggactatgtcgtcaatgtcacggaagaatttctggaattcatctccgatggcgctctagcgattgaagtgtggggccatcgttgtgcgggaaacggtagcagcatctgggaagtggactccctccatgcgaaaacacgaactttgcacgatcggtggaatgaggtcacccggcgtattgagatgtggatctccattcttgaattaaacgagctcggggagtacgcggccgtagagctgcatcaggcaaaagatgtcaacacaggtggtatattccagctaaggcagggccactcacggcgggtgcaagtgactgtgaagcccgtgcagcactctgggactctcccgctgatggtggaagccatcttatctgttagcattggctgtgttaccgccagaagtacaaagctccagagaggacttgatagctatcagagagacgacgaagatggagacgacatggactcatatcaggaggaggacttaaactgtgtacgagaaaggtggtctgatgctctcattaagcggcgcgaataccttgacgagcaaatcaaaaaagtaagtaataaaacagaaaaaacggaggatgacgtggagagagaggctcagctcgttgagcagtgggtgggacttacggaagaacgaaatgctgtgctcgttcctgctcccgggagtggcatcccaggcgcacccgccgactggattccccctccgggcatggagacacatattcctgtactctttctggacctcaatgctgacgacctgtctgccaacgaacagctggtgggaccacacgcttcaggcgttaatagtattttacctaaggagcacggtagccagtttttttacctgcccatcatcaagcacagcgacgacgaggtgtccgcgacagcttcctgggacagttctgttcatgacagcgtccacttaaaccgggttacccctcagaatgagagaatttatctgattgtaaaaactaccgtgcagctgtcacaccccgctgctatggaactagttctgcggaaacggatcgcagccaacatatacaacaaacagagtttcacacagagcctgaagcggaggattagcctgaaaaacatcttttacagctgcggagtcacttacgagattgtttcaaacatacccaaggccactgaagaaatagaagacagagaaaccctcgccctgctagccgcgcgcagcgaaaacgagggtactagtgacggagaaacctatatcgaaaagtatactcgcggcgtgcttcaggttgaaaacatcttgtccctggaacggttgcggcaagcggtgaccgtgaaggaggctctgtctacaaaggctcggcacatcagaaggtctctgtctacgcctaacgtacataacgtttcttccagtcggcctgacctgtctggcttcgatgaggacgacaaaggatggcccgaaaatcaattggacatgagtgactactcctcctcatatcaggacgtcgcttgttatgggaccttgccaagagactcacctcgacgaaacaaggaaggatgtacctcagagacgcctcacgccctgaccgtttccccattcaaggccttcagcccacaaccccccaagttttttaaacctcttatgccggtgaaggaagaacacaaaaaacgaatcgctttggaggccaggcccctactgtcacaggaaagcatgcctcccccccaggcccacaatccgggttgcatcgtccctagcggttcaaatggatcatccatgcctgtagagcacaattcaaaaagggagaagaaaatagactctgaggaggaggaaaatgagttggaggctatcaaccggaagcttatttcatctcaaccctacgtccctgttgagtttgctgacttctccgtctacaatgcatccctcgaaaacagagaatggttctccagcaaggtcgatctgtcaaacagcagagtgctggagaaagaggtgagtcgatcacccaccacttcatccatcacgagcgggtacttcagccactcagcctctaacgcgaccctgagcgatatggtggtaccctcatctgactcttctgaccagctggccatccaaacaaaggacgcagactcaactgaacattctactccctctctggtacacgactttaggccaagctccaataaggaattgacagaagtcgaaaagggactggtgaaagacaagatcatcgtggtgccattgaaggaaaattctgccttggcgaagggtagcccttcctcgcagagcattcccgaaaagaactcgaagtcgctgtgccgtaccggaagctgttccgaattggatgcctgcccatcaaaaatttcacaaccagctcggggattttgcccccgcgaggtgacagtagagcatacaaccaacatcctggaggatcattctttcacagaattcatgggggtttccgaaggtaaggacttcgacgggttaaccgattcttcagcaggcgaactttcaagcaggcggagtctgcctaataagacaggcgggaagactgtctccgacggcttgcatcatccctctcaactgcactctaaactggaaaatgatcaggtcatcattcctgaggcagctttctgggttctgtgctgccagtag

SEQ ID NO: 211427 - DNA, 5418 bp, Artificial Sequence
  derived and/or modified sequence
atgtctgatactaaagttaaggttgcagttagagtgaggccaatgaatcgccgagagttggagctgaacaccaagtgcgttgttgaaatggagggcaatcagacagtgctccatccacctccaagtaatactaagcagggcgagcgcaagcctccaaaagtttttgcattcgattactgcttctggtctatggacgagtccaacactaccaagtacgccggtcaggaggtcgttttcaagtgcttaggggaaggcatactggagaaggccttccagggctacaatgcctgtatttttgcctacggacagaccgggagcgggaagtcatttagtatgatgggccatgctgaacagctggggcttataccacgtctatgctgtgccttgttcaagagaatcagtctcgaacagaatgagtcccagacatttaaagttgaagtgtcttacatggaaatttataatgaaaaagtgcgggacttgctagacccaaaaggaagccgccaatctctgaaagtgagagaacataaagtgctaggcccatacgttgacggactgtcgcagctcgctgtgacttcgttcgaagatatcgaaagtctgatgtcagagggaaacaagtccagaacagtggccgcaaccaatatgaatgaggagtctagccggagccatgccgtttttaacatcattatcacgcagaccttatacgatctccagtccggcaatagcggggaaaaagtgtcaaaagtcagtttagtggatctggctgggagcgagcgggtgtccaaaacaggagccgcaggtgaacggctgaaggaaggttctaatatcaataagtccctcaccaccttaggacttgttatcagcagcctggccgaccaggccgctggtaaaggaaagtcaaagttcgtcccgtaccgggacagcgtacttacatggttactgaaagacaacttaggtggtaattcccagacgtccatgatagcaacaatctcaccagcagccgacaattacgaggagaccttatctacactgagatacgctgaccgcgcaaagcggatcgtaaaccatgccgtggtgaatgaagaccccaacgcaaaagtaattcgtgaactgcgagaggaggtcgaaaaactgcgcgaacaactgtcccaagccgaagccatgaaggctccggaactgaaggaaaagctggaggagtccgagaaactcattaaggagctgacagtgacgtgggaagagaagttgaggaaaacagaggaaatagctcaggaacgacaacggcaactggaaagcatgggcattagcttagagatgtcagggattaaggtgggagacgacaaatgttacctggtgaacctgaacgcagatcctgcactgaatgagcttctcgtttactacctcaaagatcatacccgggtgggagccgacacaagccaggatatacagctcttcggcattgggattcaacctcaacactgcgaaatcgacatcgcttctgacggagacgtgacactcactccaaaagagaacgctcggtcttgcgtaaacggcacattggtgtgttcaacaacacaactgtggcacggagaccgcattctgtggggcaacaaccatttttttcgtatcaacctgcccaaacggaaacggagggattggctgaaagattttgaaaaagagaccggcccacccgagcacgatcttgacgctgcctccgaagcttctagcgaacctgactataactacgagtttgctcagatggaggtcatcatgaaaaccctaaacagcaacgacccagttcagaacgtggtgcaagtattggagaagcagtatctagaagagaagagatcagcacttgaggaacaacgccttatgtacgagcgcgagctggagcagctgagacagcaactgtctccagaccgtcagccccagagtagcggacctgatcggctagcttacagttcccagaccgcccagcaaaaggtcacccaatgggccgaggaacgagatgagctgtttcgtcagagtctggctaaactccgggagcagctggtcaaagcaaataccttggttagagaggctaatttcctcgcagaggaaatgtctaagctgacagattaccaggtgactcttcaaatccccgctgctaatctgagcgcaaacagaaagagaggggcaatcgtttctgagccagccattcaggtaaggagaaagggcaagtctacgcaggtatggacaatcgagaaacttgagaacaaactcattgatatgcgtgatctatatcaggaatggaaggagaaggtgcctgaggctaaacgtttgtacggaaaacgcggagacccattctatgaggctcaggagaatcataacctcatcggcgtagccaatgtttttcttgagtgtctgttctgtgacgtcaagctgcagtacgctgtaccaattatctctcagcagggtgaggtcgcaggtaggctgcatgttgaagtcatgcgggtcacgggggcagtgcccgagcgggtagttgaggatgactccagcgaaaactcttctgagagcgggtccttggaagtcgtggacagttccggggaaatcattcatagggtgaagaagctcacatgcagagtgaagataaaagaggcaactgggttacccctgaacctgtccaacttcgtgttttgccagtacactttctgggaccaatgcgagtctaccgttgccgctccagtggtcgatccagaggtcccgtcaccacagagcaaagatgcccagtacaccgtgactttcagccattgtaaagattatgtcgtgaacgtcaccgaagagttcttggagttcatctctgatggggctttggccatcgaggtgtggggtcacagatgtgccggaaacggcagtagcatctgggaggtggacagtctccacgccaagactagaactctgcatgacagatggaacgaagtgacccggcgaattgagatgtggatcagcattcttgaattaaacgagcttggcgagtatgcagctgtagagctgcatcaggcaaaagacgtcaacaccggcggtatcttccaattgcgccagggccattctcgtagagtacaggtcaccgtgaagcctgtgcagcactcaggtacactcccattgatggtagaggcaatcctgagcgtctccataggatgcgttaccgcccgatccaccaaactccagagaggactggactcataccagcgagacgacgaggatggcgatgacatggatagttaccaggaagaagatctgaactgcgtgcgtgagcggtggtctgatgcacttatcaaacgacgggaatacctggatgagcaaattaagaaggtgtccaataagaccgaaaagaccgaagacgatgttgagagagaagctcagttggtggaacagtgggtggggctgactgaagagagaaacgccgtcttagtgcccgctcccggaagtggaatcccaggagcccctgccgattggatccccccacctggcatggaaacccacatccctgtcctgtttctggatctgaacgccgacgacctgtccgccaacgagcaactcgtgggccctcatgcctcaggggttaactccatcctcccgaaagagcacggatctcagtttttctatctccccataattaaacactcagacgatgaggtttcggccaccgccagttgggatagctccgtgcatgactcggtacatttgaatagggtcacacctcagaacgagaggatttatctcattgtcaagacgaccgttcagctcagccatcccgcagccatggaattggtattgcgcaaaagaattgccgcaaatatttataataagcagtcattcacacaatccctgaagaggcggattagcctgaagaatattttctatagttgtggggtgacctatgagatcgtttccaacatcccaaaggccactgaggagatagaagacagggaaaccctcgctctattggcagctagatcggagaacgaaggtaccagcgacggagagacttacatagagaaatacacaagaggcgtcctgcaggtggagaatattctgagcttagaaaggttacggcaggctgtcaccgtgaaagaggccctcagcaccaaggcaaggcacataagacgttctctgagcactcctaacgtccacaacgtatcaagtagtagacctgacttgagcgggtttgatgaggacgacaaaggatggccggaaaaccagctagacatgagcgactattcatcatcgtatcaggacgtcgcttgctacggtactctgcctagagattcgcccagaagaaacaaggaaggttgcactagcgagacaccacacgcattaaccgtgtcccccttcaaggcattcagcccccagccgcctaagttcttcaaacctctgatgccagtgaaggaagagcataaaaagaggatagcactagaagcccgaccactcctttcccaggagagcatgccaccacctcaagcccacaatcccggatgcatagtgcctagcggcagcaacgggagtagtatgccagtcgaacacaacagtaaaagggaaaagaagatcgactctgaggaagaggaaaacgaactagaggccataaatcggaaactcatttcttctcagccctacgtgccagtggaattcgcagactttagcgtatacaatgcctcactggaaaaccgggagtggttcagcagcaaagtcgacctgtctaattctcgtgtcctggagaaggaagtgtccaggagccctactactagttctatcaccagcggatatttctcacactcagcatctaatgcaacacttagcgatatggtcgtcccaagtagcgactcctccgaccagctggctatccagacgaaggatgccgattccaccgagcattcaactcctagcttggtccatgactttcggccttcctctaacaaggagttgaccgaagtggagaaaggtcttgtaaaggacaaaattattgtggtgcctctaaaagagaatagtgcccttgctaagggcagcccatcctctcagtcaattcccgagaaaaattccaagtctctgtgccggaccggttcctgctctgagctggatgcctgcccaagcaagatttctcagccggcaagggggttttgccctcgtgaggtgacggtggaacatacaaccaacatcctcgaggaccacagctttaccgaatttatgggggtcagtgagggcaaggacttcgacggtctgacggactccagcgctggcgagctgtcttcccgcaggagtctccccaacaaaactggcggaaagacagtgtctgatggcttgcaccatccatcccagctgcactccaagctagagaatgatcaggtaatcatcccagaggcagcattttgggtgctgtgctgtcagtaa

SEQ ID NO: 211428 - DNA, 5418 bp, Artificial Sequence
  derived and/or modified sequence
atgagcgacaccaaggtgaaggtggccgtgagagtgagacccatgaacagaagagagctggagctgaacaccaagtgcgtggtggagatggagggcaaccagaccgtgctgcaccccccccccagcaacaccaagcagggcgagagaaagccccccaaggtgttcgccttcgactactgcttctggagcatggacgagagcaacaccaccaagtacgccggccaggaggtggtgttcaagtgcctgggcgagggcatcctggagaaggccttccagggctacaacgcctgcatcttcgcctacggccagaccggcagcggcaagagcttcagcatgatgggccacgccgagcagctgggcctgatccccagactgtgctgcgccctgttcaagagaatcagcctggagcagaacgagagccagaccttcaaggtggaggtgagctacatggagatctacaacgagaaggtgagagacctgctggaccccaagggcagcagacagagcctgaaggtgagagagcacaaggtgctgggcccctacgtggacggcctgagccagctggccgtgaccagcttcgaggacatcgagagcctgatgagcgagggcaacaagagcagaaccgtggccgccaccaacatgaacgaggagagcagcagaagccacgccgtgttcaacatcatcatcacccagaccctgtacgacctgcagagcggcaacagcggcgagaaggtgagcaaggtgagcctggtggacctggccggcagcgagagagtgagcaagaccggcgccgccggcgagagactgaaggagggcagcaacatcaacaagagcctgaccaccctgggcctggtgatcagcagcctggccgaccaggccgccggcaagggcaagagcaagttcgtgccctacagagacagcgtgctgacctggctgctgaaggacaacctgggcggcaacagccagaccagcatgatcgccaccatcagccccgccgccgacaactacgaggagaccctgagcaccctgagatacgccgacagagccaagagaatcgtgaaccacgccgtggtgaacgaggaccccaacgccaaggtgatcagagagctgagagaggaggtggagaagctgagagagcagctgagccaggccgaggccatgaaggcccccgagctgaaggagaagctggaggagagcgagaagctgatcaaggagctgaccgtgacctgggaggagaagctgagaaagaccgaggagatcgcccaggagagacagagacagctggagagcatgggcatcagcctggagatgagcggcatcaaggtgggcgacgacaagtgctacctggtgaacctgaacgccgaccccgccctgaacgagctgctggtgtactacctgaaggaccacaccagagtgggcgccgacaccagccaggacatccagctgttcggcatcggcatccagccccagcactgcgagatcgacatcgccagcgacggcgacgtgaccctgacccccaaggagaacgccagaagctgcgtgaacggcaccctggtgtgcagcaccacccagctgtggcacggcgacagaatcctgtggggcaacaaccacttcttcagaatcaacctgcccaagagaaagagaagagactggctgaaggacttcgagaaggagaccggcccccccgagcacgacctggacgccgccagcgaggccagcagcgagcccgactacaactacgagttcgcccagatggaggtgatcatgaagaccctgaacagcaacgaccccgtgcagaacgtggtgcaggtgctggagaagcagtacctggaggagaagagaagcgccctggaggagcagagactgatgtacgagagagagctggagcagctgagacagcagctgagccccgacagacagccccagagcagcggccccgacagactggcctacagcagccagaccgcccagcagaaggtgacccagtgggccgaggagagagacgagctgttcagacagagcctggccaagctgagagagcagctggtgaaggccaacaccctggtgagagaggccaacttcctggccgaggagatgagcaagctgaccgactaccaggtgaccctgcagatccccgccgccaacctgagcgccaacagaaagagaggcgccatcgtgagcgagcccgccatccaggtgagaagaaagggcaagagcacccaggtgtggaccatcgagaagctggagaacaagctgatcgacatgagagacctgtaccaggagtggaaggagaaggtgcccgaggccaagagactgtacggcaagagaggcgaccccttctacgaggcccaggagaaccacaacctgatcggcgtggccaacgtgttcctggagtgcctgttctgcgacgtgaagctgcagtacgccgtgcccatcatcagccagcagggcgaggtggccggcagactgcacgtggaggtgatgagagtgaccggcgccgtgcccgagagagtggtggaggacgacagcagcgagaacagcagcgagagcggcagcctggaggtggtggacagcagcggcgagatcatccacagagtgaagaagctgacctgcagagtgaagatcaaggaggccaccggcctgcccctgaacctgagcaacttcgtgttctgccagtacaccttctgggaccagtgcgagagcaccgtggccgcccccgtggtggaccccgaggtgcccagcccccagagcaaggacgcccagtacaccgtgaccttcagccactgcaaggactacgtggtgaacgtgaccgaggagttcctggagttcatcagcgacggcgccctggccatcgaggtgtggggccacagatgcgccggcaacggcagcagcatctgggaggtggacagcctgcacgccaagaccagaaccctgcacgacagatggaacgaggtgaccagaagaatcgagatgtggatcagcatcctggagctgaacgagctgggcgagtacgccgccgtggagctgcaccaggccaaggacgtgaacaccggcggcatcttccagctgagacagggccacagcagaagagtgcaggtgaccgtgaagcccgtgcagcacagcggcaccctgcccctgatggtggaggccatcctgagcgtgagcatcggctgcgtgaccgccagaagcaccaagctgcagagaggcctggacagctaccagagagacgacgaggacggcgacgacatggacagctaccaggaggaggacctgaactgcgtgagagagagatggagcgacgccctgatcaagagaagagagtacctggacgagcagatcaagaaggtgagcaacaagaccgagaagaccgaggacgacgtggagagagaggcccagctggtggagcagtgggtgggcctgaccgaggagagaaacgccgtgctggtgcccgcccccggcagcggcatccccggcgcccccgccgactggatccccccccccggcatggagacccacatccccgtgctgttcctggacctgaacgccgacgacctgagcgccaacgagcagctggtgggcccccacgccagcggcgtgaacagcatcctgcccaaggagcacggcagccagttcttctacctgcccatcatcaagcacagcgacgacgaggtgagcgccaccgccagctgggacagcagcgtgcacgacagcgtgcacctgaacagagtgaccccccagaacgagagaatctacctgatcgtgaagaccaccgtgcagctgagccaccccgccgccatggagctggtgctgagaaagagaatcgccgccaacatctacaacaagcagagcttcacccagagcctgaagagaagaatcagcctgaagaacatcttctacagctgcggcgtgacctacgagatcgtgagcaacatccccaaggccaccgaggagatcgaggacagagagaccctggccctgctggccgccagaagcgagaacgagggcaccagcgacggcgagacctacatcgagaagtacaccagaggcgtgctgcaggtggagaacatcctgagcctggagagactgagacaggccgtgaccgtgaaggaggccctgagcaccaaggccagacacatcagaagaagcctgagcacccccaacgtgcacaacgtgagcagcagcagacccgacctgagcggcttcgacgaggacgacaagggctggcccgagaaccagctggacatgagcgactacagcagcagctaccaggacgtggcctgctacggcaccctgcccagagacagccccagaagaaacaaggagggctgcaccagcgagaccccccacgccctgaccgtgagccccttcaaggccttcagcccccagccccccaagttcttcaagcccctgatgcccgtgaaggaggagcacaagaagagaatcgccctggaggccagacccctgctgagccaggagagcatgccccccccccaggcccacaaccccggctgcatcgtgcccagcggcagcaacggcagcagcatgcccgtggagcacaacagcaagagagagaagaagatcgacagcgaggaggaggagaacgagctggaggccatcaacagaaagctgatcagcagccagccctacgtgcccgtggagttcgccgacttcagcgtgtacaacgccagcctggagaacagagagtggttcagcagcaaggtggacctgagcaacagcagagtgctggagaaggaggtgagcagaagccccaccaccagcagcatcaccagcggctacttcagccacagcgccagcaacgccaccctgagcgacatggtggtgcccagcagcgacagcagcgaccagctggccatccagaccaaggacgccgacagcaccgagcacagcacccccagcctggtgcacgacttcagacccagcagcaacaaggagctgaccgaggtggagaagggcctggtgaaggacaagatcatcgtggtgcccctgaaggagaacagcgccctggccaagggcagccccagcagccagagcatccccgagaagaacagcaagagcctgtgcagaaccggcagctgcagcgagctggacgcctgccccagcaagatcagccagcccgccagaggcttctgccccagagaggtgaccgtggagcacaccaccaacatcctggaggaccacagcttcaccgagttcatgggcgtgagcgagggcaaggacttcgacggcctgaccgacagcagcgccggcgagctgagcagcagaagaagcctgcccaacaagaccggcggcaagaccgtgagcgacggcctgcaccaccccagccagctgcacagcaagctggagaacgaccaggtgatcatccccgaggccgccttctgggtgctgtgctgccagtag

SEQ ID NO: 211429 - protein, 693 aa, Artificial Sequence
  derived and/or modified sequence
MDRPDEGPPAKTRRLSSSESPQRDPPPPPPPPPLLRLPLPPPQQRPRLQEETEAAQVLADMRGVGLGPALPPPPPYVILEEGGIRAYFTLGAECPGWDSTIESGYGEAPPPTESLEALPTPEASGGSLEIDFQVVQSSSFGGEGALETCSAVGWAPQRLVDPKSKEEAIIIVEDEDEDERESMRSSRRRRRRRRRKQRKVKRESRERNAERMESILQALEDIQLDLEAVNIKAGKAFLRLKRKFIQMRRPFLERRDLIIQHIPGFWVKAFLNHPRISILINRRDEDIFRYLTNLQVQDLRHISMGYKMKLYFQTNPYFTNMVIVKEFQRNRSGRLVSHSTPIRWHRGQEPQARRHGNQDASHSFFSWFSNHSLPEADRIAEIIKNDLWVNPLRYYLRERGSRIKRKKQEMKKRKTRGRCEVVIMEDAPDYYAVEDIFSEISDIDETIHDIKISDFMETTDYFETTDNEITDINENICDSENPDHNEVPNNETTDNNESADDHETTDNNESADDNNENPEDNNKNTDDNEENPNNNENTYGNNFFKGGFWGSHGNNQDSSDSDNEADEASDDEDNDGNEGDNEGSDDDGNEGDNEGSDDDDRDIEYYEKVIEDFDKDQADYEDVIEIISDESVEEEGIEEGIQQDEDIYEEGNYEEEGSEDVWEEGEDSDDSDLEDVLQVPNGWANPGKRGKTG

SEQ ID NO: 211430 - DNA, 2082 bp, Artificial Sequence
  derived and/or modified sequence
atggacagacccgacgagggcccccccgccaagaccagaagactgagcagcagcgagagcccccagagagaccccccccccccccccccccccccccccctgctgagactgcccctgccccccccccagcagagacccagactgcaggaggagaccgaggccgcccaggtgctggccgacatgagaggcgtgggcctgggccccgccctgccccccccccccccctacgtgatcctggaggagggcggcatcagagcctacttcaccctgggcgccgagtgccccggctgggacagcaccatcgagagcggctacggcgaggcccccccccccaccgagagcctggaggccctgcccacccccgaggccagcggcggcagcctggagatcgacttccaggtggtgcagagcagcagcttcggcggcgagggcgccctggagacctgcagcgccgtgggctgggccccccagagactggtggaccccaagagcaaggaggaggccatcatcatcgtggaggacgaggacgaggacgagagagagagcatgagaagcagcagaagaagaagaagaagaagaagaagaaagcagagaaaggtgaagagagagagcagagagagaaacgccgagagaatggagagcatcctgcaggccctggaggacatccagctggacctggaggccgtgaacatcaaggccggcaaggccttcctgagactgaagagaaagttcatccagatgagaagacccttcctggagagaagagacctgatcatccagcacatccccggcttctgggtgaaggccttcctgaaccaccccagaatcagcatcctgatcaacagaagagacgaggacatcttcagatacctgaccaacctgcaggtgcaggacctgagacacatcagcatgggctacaagatgaagctgtacttccagaccaacccctacttcaccaacatggtgatcgtgaaggagttccagagaaacagaagcggcagactggtgagccacagcacccccatcagatggcacagaggccaggagccccaggccagaagacacggcaaccaggacgccagccacagcttcttcagctggttcagcaaccacagcctgcccgaggccgacagaatcgccgagatcatcaagaacgacctgtgggtgaaccccctgagatactacctgagagagagaggcagcagaatcaagagaaagaagcaggagatgaagaagagaaagaccagaggcagatgcgaggtggtgatcatggaggacgcccccgactactacgccgtggaggacatcttcagcgagatcagcgacatcgacgagaccatccacgacatcaagatcagcgacttcatggagaccaccgactacttcgagaccaccgacaacgagatcaccgacatcaacgagaacatctgcgacagcgagaaccccgaccacaacgaggtgcccaacaacgagaccaccgacaacaacgagagcgccgacgaccacgagaccaccgacaacaacgagagcgccgacgacaacaacgagaaccccgaggacaacaacaagaacaccgacgacaacgaggagaaccccaacaacaacgagaacacctacggcaacaacttcttcaagggcggcttctggggcagccacggcaacaaccaggacagcagcgacagcgacaacgaggccgacgaggccagcgacgacgaggacaacgacggcaacgagggcgacaacgagggcagcgacgacgacggcaacgagggcgacaacgagggcagcgacgacgacgacagagacatcgagtactacgagaaggtgatcgaggacttcgacaaggaccaggccgactacgaggacgtgatcgagatcatcagcgacgagagcgtggaggaggagggcatcgaggagggcatccagcaggacgaggacatctacgaggagggcaactacgaggaggagggcagcgaggacgtgtgggaggagggcgaggacagcgacgacagcgacctggaggacgtgctgcaggtgcccaacggctgggccaaccccggcaagagaggcaagaccggctag

SEQ ID NO: 211431 - DNA, 2082 bp, Artificial Sequence
  derived and/or modified sequence
atggacaggccggatgaaggcccacccgctaagactcgcagactgagtagctctgaatccccacagagggacccgcccccaccacctcctcctcctcctctcctgcgactgccactccctccccctcaacagcggccccgcctccaggaggaaactgaggccgcccaagtgctcgcagacatgcggggggtcggcctgggccctgccttgcctcccccacccccatatgtgattctggaggagggcggaatccgcgcatacttcaccttgggcgccgaatgcccagggtgggacagcactattgaatccggatatggggaggcacccccgcccactgaaagcctagaagctttaccaaccccagaggccagtggggggtcattagagattgactttcaggtggtgcagagtagcagtttcggaggagagggagccctggagacttgttcagccgttggatgggcgccacagcgcttggtcgaccctaaatcaaaggaagaggccatcatcattgttgaagatgaggatgaggacgagcgggaatccatgagaagctctcgtagacgacgtcggcgacgccggcgcaaacaacgcaaggtcaaaagggaaagtcgtgagagaaatgccgagaggatggaaagcatcctgcaggcactggaggacattcagctggacctagaagcagtcaacataaaagcagggaaggcctttcttcgcctgaaacggaagtttattcagatgcgacggcccttcctagaaaggcgggatctgataattcagcatatcccaggcttctgggtcaaggctttcttaaaccaccctcgaatcagtattttgatcaaccgaagggacgaggacattttccggtatcttactaatctccaagtccaggacttgagacacatcagcatggggtacaaaatgaagctgtacttccaaaccaacccatactttactaacatggtgatcgtcaaggaattccagagaaaccgttccgggagactcgtctcccattctactccgatccggtggcatagaggccaagaaccacaggccaggagacacgggaaccaagatgcaagccatagtttcttttcatggttttctaaccacagcttgccagaagcagaccgcatagcagagattatcaagaacgacctttgggtgaaccctctgaggtattatctgagggaacgcggtagtagaatcaaacgcaaaaaacaagaaatgaaaaaacgcaagaccaggggacggtgcgaggtggttattatggaggatgctcccgactattatgcggttgaggacatctttagcgaaattagcgatatcgacgaaactatccacgacattaaaatttccgatttcatggaaaccacggattactttgaaactaccgacaacgaaatcaccgacatcaacgagaatatctgcgactcagaaaatcccgatcataatgaagtcccaaacaacgagactactgacaataacgagagcgcggatgatcatgaaaccacagataacaatgagtccgccgatgacaataacgagaatcccgaggataacaataagaatacggacgataacgaggagaatcccaacaataacgagaatacctatggcaataattttttcaagggcggcttctggggatctcatgggaacaaccaggactcctccgattccgataacgaggccgacgaggcaagcgacgatgaggataacgacggaaacgagggagataacgaaggttcagacgacgatggcaatgagggagacaatgaaggcagtgacgatgacgatagggatatagaatactacgagaaagtcatcgaagacttcgataaagaccaggcagactatgaggatgtcatcgagataataagtgatgaatctgtcgaggaggaaggcatcgaggaggggatccagcaagatgaagatatatatgaagagggaaattacgaggaggagggttcagaagacgtgtgggaagaaggggaggattccgatgattccgacctggaggatgtcttacaagtcccgaacggctgggctaaccccggcaaacgcggcaagactggctag

SEQ ID NO: 211432 - DNA, 2082 bp, Artificial Sequence
  derived and/or modified sequence
atggacagaccagatgagggccccccagccaagacccggcggctgagcagcagcgagagcccccagagggaccccccacctcctcctcctcctccacccctgctgcggctgcccctgcccccaccccagcagaggccccggctgcaggaggagacagaggccgcccaggtgctggccgacatgagaggagtgggcctgggccctgccctgcccccacctccaccctacgtgatcctggaggagggcggcatccgggcctacttcaccctgggcgcagaatgtcctggctgggacagcaccattgaaagtggctatggagaggcccccccacccacagagagcctggaggccctgcccaccccagaggccagcggcggcagcctggagattgacttccaggtggtgcagagcagcagctttggaggagagggcgccctggagacctgcagcgctgtgggctgggccccccagaggctggtggaccccaagagcaaggaggaggccatcatcatcgtggaggatgaagatgaagatgagcgggagagcatgaggagcagcagaagaagaagaagaagaagaagaaggaagcagaggaaggtgaagcgggagagccgggagagaaatgctgagaggatggagagcatcctgcaggccctggaggacatccagctggacctggaggccgtgaacatcaaggccggcaaggccttcctgcggctgaagaggaagttcatccagatgaggcggcccttcctggagcggcgggacctgatcatccagcacatccctggcttctgggtgaaggccttcctgaaccacccccgcatcagcatcctgatcaacagaagagatgaggacatcttccgctacctgaccaacctgcaggtgcaggacctgcggcacatctccatgggctacaagatgaagctgtacttccagaccaacccctacttcaccaacatggtgattgtgaaggagttccagaggaacagaagtggccgcctggtgagccacagcacccccatccgctggcaccggggccaggagccccaggccaggagacatggcaaccaggatgccagccacagcttcttctcctggttcagcaaccacagcctgcctgaggccgacagaattgctgagatcatcaagaatgacctgtgggtgaaccccctgcgctactacctgcgggagcggggcagccgcatcaagaggaagaagcaggagatgaagaagaggaagacccggggccgctgtgaggtggtgatcatggaggatgccccagactactatgctgtggaggacatcttcagcgagatcagtgacattgatgagaccatccatgacatcaagatcagtgacttcatggagaccacagactactttgagaccacagacaatgagatcacagacatcaatgaaaacatctgtgacagcgagaacccagaccacaatgaggtgcccaacaatgagaccacagacaacaatgaatctgcagatgaccacgagaccacagacaacaatgaatctgcagatgacaacaatgaaaatcctgaggacaacaacaagaacacagatgacaatgaggagaaccccaacaacaatgaaaacacctacggcaacaacttcttcaagggcggcttctggggcagccacggcaacaaccaggacagcagtgacagcgacaatgaagcagatgaggccagtgatgatgaggacaatgatggaaatgaaggagacaatgaaggaagtgatgatgatggaaatgaaggagacaatgaaggaagtgatgatgatgaccgggacatcgagtactatgagaaggtgattgaagattttgacaaggaccaggccgactatgaagatgtgattgagatcatcagtgatgaatctgtggaggaggagggcatcgaggagggcatccagcaggatgaggacatctatgaggagggcaactatgaggaggagggctctgaagatgtgtgggaggagggggaggacagtgatgacagcgacctggaggatgtgctgcaggtgcccaacggctgggccaaccctgggaagaggggcaagacaggatag

SEQ ID NO: 211433 - DNA, 2082 bp, Artificial Sequence
  derived and/or modified sequence
atggaccggcccgacgagggcccccccgccaagacccggcggctgtcttcgagcgagtcaccacagagggaccctccgccgccaccgccacccccgcccctgctgcgactgcccctgccacctccacagcagcgccctcgtcttcaggaagagaccgaagcagcacaggtcctggcagacatgcgaggggtgggactcggtccggctctgcccccccctcctccttacgttatcctggaggagggagggatacgcgcttactttacactcggcgcagagtgccctggttgggactctacaatcgagtcaggctacggagaggctccgccaccgactgaatcactggaagccctcccaacaccagaggcgtccggggggtcccttgaaattgatttccaagtggtgcagagtagcagctttggcggtgagggtgccctagagacatgttccgcggtcggatgggcaccccagaggctcgtggatcctaagagcaaagaagaggccatcatcattgttgaggacgaggatgaggacgagcgggaatccatgcgatcatctcgccggcgccgccgcaggaggcgcagaaagcagaggaaagttaagcgcgagtccagagagcgcaatgcagaaaggatggagagcattctgcaggctctcgaagatatacagctggacctggaagccgtcaacatcaaggccggaaaagcgttcctcagactcaaacggaagtttattcagatgagacggcccttccttgaacggagagacttgataattcagcacatccccgggttctgggttaaggctttcctcaaccatcctagaatttccatattgataaaccggagggacgaagacatatttcggtatctgacaaatttgcaggttcaggacttgagacatatctctatgggctataagatgaaactttactttcagactaacccatacttcacaaacatggtgatcgttaaggagtttcagcgcaacagatcaggaagactggtgagccattcaacccctatccgttggcaccgagggcaagaacctcaagctcgcagacacggcaatcaggacgcaagtcactctttctttagctggttcagcaaccacagtctgcccgaggctgatcgaattgctgaaataattaagaacgatctgtgggtgaaccccctgaggtactacctgcgggaacgaggaagccgcattaaaagaaaaaaacaagagatgaagaaacgcaaaactcgaggcagatgcgaagtggtcatcatggaggacgctcctgactattacgccgttgaggacattttcagcgaaataagtgacatcgatgagacaatacacgacattaagatcagcgacttcatggaaacaactgactactttgaaacaacagataatgaaattaccgacattaacgagaatatttgcgattctgagaaccctgaccacaacgaggttcccaataacgagaccacagacaataacgaaagcgccgacgaccatgaaaccactgacaataacgagtctgccgacgacaacaacgaaaatccagaggacaataataagaacacggacgacaatgaagagaaccccaataataatgagaacacctatggaaataacttcttcaagggcggcttctggggctcccatggcaacaatcaggactcatcagactcggacaacgaagcagacgaagctagcgacgatgaagataacgatggtaacgagggcgataatgaaggaagcgatgatgatggaaacgagggtgataatgaagggtcagacgacgatgaccgcgacatcgagtattacgaaaaagtaatagaggacttcgacaaagatcaggcagactacgaggacgtgatcgaaattatcagtgatgagagtgtggaggaagagggcatcgaggagggcatacagcaggatgaggatatttatgaagaagggaattacgaagaggagggctccgaagatgtctgggaggagggagaggatagcgacgattccgatcttgaggatgtgctgcaggtccctaacgggtgggctaacccagggaagagaggcaaaaccggatag

SEQ ID NO: 211434 - DNA, 2082 bp, Artificial Sequence
  derived and/or modified sequence
atggaccgtcccgatgaaggtcctcccgcaaaaacgaggcgcctgagttctagcgagagcccgcagcgcgatccacctccacccccacctcctcccccactcctacgactacctttgccaccccctcagcagcgacctaggctccaggaagaaactgaagccgctcaggttctcgcggacatgcgaggcgtcggtctggggcctgctctgcccccacctcctccctacgtgattctggaagagggaggaatcagggcgtacttcacgctcggcgctgaatgccctggttgggattccaccatcgaatctggttacggcgaggctccccctccaacagagagtctagaagcccttcctactccggaggcttctgggggatctctggaaatcgacttccaagtcgtgcaaagtagttctttcgggggtgaaggcgctcttgagacttgctcagccgtcggttgggctccccagagactagtagatccaaagagcaaggaagaggctatcataatcgtagaggacgaggatgaagacgaaagggagtctatgaggtcctcccgaagaaggaggcggagaaggcgcaggaaacagcgcaaagtgaagcgcgagagtagggaacggaacgccgagcggatggagagcatattgcaggccctcgaggacattcagctggacctggaggctgtgaacatcaaggccggtaaggccttcctgagactgaaacgcaagtttattcagatgagaagacccttcctggagaggcgggacttaattatccagcacatcccaggattttgggtgaaggccttcttaaaccatcctcgcattagtattcttattaaccgtagggacgaagacatctttagatacttaaccaacctgcaggtccaggaccttcgccacatttcaatgggctacaaaatgaagctctacttccaaaccaacccttactttactaatatggtgattgtcaaggaattccaaaggaatagatccggtcggctggtctcacactctacccctatccggtggcaccgtggccaggagcctcaagccagaagacatggcaatcaggatgcaagccactccttcttttcgtggttctccaatcactctctaccagaagcagatcggatcgctgagattatcaagaacgatttatgggtaaatcccctgcggtattatctgcgtgaaagagggtcgagaatcaagcgtaagaaacaagagatgaagaagagaaagaccagaggcaggtgcgaagtggttataatggaagacgcccctgattattacgctgttgaagacatcttttctgagataagtgatatagatgagacaatccatgacataaaaatttcagatttcatggagactacggattattttgaaacaactgacaatgaaataacagacatcaatgagaacatttgtgactcagaaaaccccgaccataatgaagtacctaataacgagaccaccgacaataacgaaagcgctgatgaccatgaaaccaccgacaacaatgagtcagctgacgataataacgagaatcctgaagacaacaacaagaatactgacgataatgaggagaacccgaataacaacgaaaatacatacggaaacaattttttcaagggcggtttctggggaagtcacgggaataaccaagattccagcgacagcgataatgaggctgacgaggccagcgacgatgaggacaatgatggtaatgagggggataatgagggatctgatgatgatgggaatgagggtgacaatgaaggatcagacgatgatgacagggatatagagtactacgaaaaggtgatagaggacttcgacaaggaccaggcagattacgaagacgtcatcgagattatttctgacgaatccgtggaggaagagggaattgaggaaggaattcagcaggatgaagatatttacgaggaggggaactacgaggaagaggggagcgaggacgtgtgggaagaaggtgaagacagcgatgattcagatctcgaggatgtacttcaggtgcctaacggctgggctaaccctgggaagagaggcaaaaccgggtag

SEQ ID NO: 211435 - DNA, 2815 bp, Artificial Sequence
  derived and/or modified sequence
agagcgaggtggtgaggagagctggttgcgtgagtctcctcagctctgcttaccggtgcgactagcggcagcgacgcggctaaaagcgaaggggcgagtgcgagtcccctgagctgtacgaacgcggtcgccatggaccgcccagatgaggggcctccggccaagacccgccgcctgagcagctccgagtctccacagcgcgacccgcccccgccgccgccgccgccgccgctcctccgactgccgctgcctccaccccagcagcgcccgaggctccaggaggaaacggaggcggcacaggtgctggccgatatgaggggggtgggactgggccccgcgctgcccccgccgcctccctatgtcattctcgaggagggggggatccgcgcatacttcacgctcggtgctgagtgtcccggctgggattctaccatcgagtcggggtatggggaggcgcccccgcccacggagagcctggaagcactccccactcctgaggcctcgggggggagcctggaaatcgattttcaggttgtacagtcgagcagttttggtggagagggggccctagaaacctgtagcgcagtggggtgggcgccccagaggttagttgacccgaagagcaaggaagaggcgatcatcatagtggaggatgaggatgaggatgagcgggagagtatgaggagcagcaggaggcggcggcggcggcggaggaggaagcagaggaaggtgaagagggaaagcagagagagaaatgccgagaggatggagagcatcctgcaggcactggaggatattcagctggatctggaggcagtgaacatcaaggcaggcaaagccttcctgcgtctcaagcgcaagttcatccagatgcgaagacccttcctggagcgcagagacctcatcatccagcatatcccaggcttctgggtcaaagcattcctcaaccaccccagaatttcaattttgatcaaccgacgtgatgaagacattttccgctacttgaccaatctgcaggtacaggatctcagacatatctccatgggctacaaaatgaagctgtacttccagactaacccctacttcacaaacatggtgattgtcaaggagttccagcgcaaccgctcaggccggctggtgtctcactcaaccccaatccgctggcaccggggccaggaaccccaggcccgtcgtcacgggaaccaggatgcgagccacagctttttcagctggttctcaaaccatagcctcccagaggctgacaggattgctgagattatcaagaatgatctgtgggttaaccctctacgctactacctgagagaaaggggctccaggataaagagaaagaagcaagaaatgaagaaacgtaaaaccaggggcagatgtgaggtggtgatcatggaagacgcccctgactattatgcagtggaagacattttcagcgagatctcagacattgatgagacaattcatgacatcaagatctctgacttcatggagaccaccgactacttcgagaccactgacaatgagataactgacatcaatgagaacatctgcgacagcgagaatcctgaccacaatgaggtccccaacaacgagaccactgataacaacgagagtgctgatgaccacgaaaccactgacaacaatgagagtgcagatgacaacaacgagaatcctgaagacaataacaagaacactgatgacaacgaagagaaccctaacaacaacgagaacacttacggcaacaacttcttcaaaggtggcttctggggcagccatggcaacaaccaggacagcagcgacagtgacaatgaagcagatgaggccagtgatgatgaagataatgatggcaacgaaggtgacaatgagggcagtgatgatgatggcaatgaaggtgacaatgaaggcagcgatgatgacgacagagacattgagtactatgagaaagttattgaagactttgacaaggatcaggctgactacgaggacgtgatagagatcatctcagacgaatcagtggaagaagagggcattgaggaaggcatccagcaagatgaggacatctatgaggaaggaaactatgaggaggaaggaagtgaagatgtctgggaagaaggggaagattcggacgactctgacctagaggatgtgcttcaggtcccaaacggttgggccaatccggggaagagggggaaaaccggataagggttttccccttttggggatcacctctctgtatcccccacccactatcccatttgccctcctcctcagctagggccacgcggccccacattgcacttctggggggtgaccgacttcgtacacgggtttaaagtttatttttatggtttagtcattgcagagttcttattttggggggagggaaagggggctagtccccttcttttggccctccgcccccgcaggcttctgtgtgctgctaactgtatttattgtgatgccttggtcagggcccctctacccacttctcccagtcagttgtggccccagcccctctccctgtgctgtgtggagtggacaccctgacccccgaagcggggagggccgctgtggccttcgtcacagccgcgcagtgcccatggaggcgctgctgccaccttcctctcccaagttctttctccatccctctcctcttcccgccgcgccgctagcccgcctcggtgtctatgcaaggccgcttcgccattgcggtattctttgcggtattcttgtccccgtcccccagaaggctcgcctctccccgtggaccctgttaatcccaataaaattctgagcaagttca

SEQ ID NO: 211436 - protein, 980 aa, Artificial Sequence
  derived and/or modified sequence
MVSKMIIENFEALKSWLSKTLEPICDADPSALAKYVLALVKKDKSEKELKALCIDQLDVFLQKETQIFVEKLFDAVNTKSYLPPPEQPSSGSLKVEFFPHQEKDIKKEEITKEEEREKKFSRRLNHSPPQSSSRYRENRSRDERKKDDRSRKRDYDRNPPRRDSYRDRYNRRRGRSRSYSRSRSRSWSKERLRERDRDRSRTRSRSRTRSRERDLVKPKYDLDRTDPLENNYTPVSSVPSISSGHYPVPTLSSTITVIAPTHHGNNTTESWSEFHEDQVDHNSYVRPPMPKKRCRDYDEKGFCMRGDMCPFDHGSDPVVVEDVNLPGMLPFPAQPPVVEGPPPPGLPPPPPILTPPPVNLRPPVPPPGPLPPSLPPVTGPPPPLPPLQPSGMDAPPNSATSSVPTVVTTGIHHQPPPAPPSLFTADTYDTDGYNPEAPSITNTSRPMYRHRVHAQRPNLIGLTSGDMDLPPREKPPNKSSMRIVVDSESRKRTIGSGEPGVPTKKTWFDKPNFNRTNSPGFQKKVQFGNENTKLELRKVPPELNNISKLNEHFSRFGTLVNLQVAYNGDPEGALIQFATYEEAKKAISSTEAVLNNRFIKVYWHREGSTQQLQTTSPKPLVQQPILPVVKQSVKERLGPVPSSTIEPAEAQSASSDLPQVLSTSTGLTKTVYNPAALKAAQKTLLVSTSAVDNNEAQKKKQEALKLQQDVRKRKQEILEKHIETQKMLISKLEKNKTMKSEDKAEIMKTLEVLTKNITKLKDEVKAASPGRCLPKSIKTKTQMQKELLDTELDLYKKMQAGEEVTELRRKYTELQLEAAKRGILSSGRGRGIHSRGRGAVHGRGRGRGRGRGVPGHAVVDHRPRALEISAFTESDREDLLPHFAQYGEIEDCQIDDSSLHAVITFKTRAEAEAAAVHGARFKGQDLKLAWNKPVTNISAVETEEVEPDEEEFQEESLVDDSLLQDDDEEEEDNESRSWRR

SEQ ID NO: 211437 - DNA, 3624 bp, Artificial Sequence
  derived and/or modified sequence
tagggccgctgtggatggtttctaaaatgatcattgaaaacttcgaggcactcaagtcctggctcagcaagactctcgagcccatctgtgatgcagatccatccgccctagcaaaatatgttctggctttggtaaagaaagacaaaagtgaaaaagagttaaaggcattatgtattgatcagctggatgtatttcttcagaaagagacacagatatttgtggaaaaactttttgatgctgtgaatacaaagagttacctacctcctccagagcagccatcatcaggaagcctgaaggtagaattttttccacaccaagaaaaagatataaagaaggaagagatcactaaggaggaagagcgagagaagaagttttctagaaggctaaatcacagtcctccccagtcaagctcccgatacagggaaaatagaagccgtgatgagaggaaaaaagatgatcgttctcgcaaaagagattatgatcgaaaccctcctcgaagagattcatacagagaccggtacaatagaagacgagggcggagtcgcagttatagcaggagtcgaagtcgaagttggagtaaagagaggcttcgtgagagggacagagatagaagcaggactagaagcagaagcagaacacgaagcagggaaagggatctggtaaaacctaaatatgacctggatagaacagatccattagaaaataattatactccagtctcttcggtacctagtatttcatctggccactaccctgtacctactttgagcagcactattacagtaattgctcctactcatcatggaaacaacactaccgaaagttggtctgaatttcatgaagaccaagtggaccataactcttacgtaagaccacccatgccaaagaaacggtgtagagactatgatgaaaagggtttttgtatgagaggagacatgtgtccttttgatcatggaagtgatccagtagttgtagaagatgtgaatcttcctggtatgctgcctttcccagcacagcctcctgttgttgaaggaccacctcctcctggactccccccacctccaccaattcttacacccccacctgtgaatctcaggcccccagtaccaccgccaggtccattgccacccagtctcccacctgttacaggaccaccacctccacttcctcctttgcagccatctggcatggatgctcctccaaactctgcaaccagttctgttcctactgtagtaacaactggcattcatcaccagcctcctcctgctccaccctctctttttactgcagatacatatgacacagatggctacaatcctgaagccccaagcataacaaacacttccagacctatgtatagacacagagtgcatgcacaaaggcccaacttgataggactaacatcaggggatatggatttgccacccagagaaaagcctcccaataaaagcagtatgaggatagtagtggactcagaatcaaggaaaagaaccattggttctggagagcctggagttcctacaaagaagacttggtttgataaaccaaattttaatagaacaaacagcccaggctttcagaagaaggttcaatttggaaatgaaaataccaagcttgaacttagaaaagttcctccagaattaaataatatcagcaaacttaatgaacattttagtcgatttggaaccttggttaacttacaggttgcttataatggtgatcctgaaggtgccctaatccaatttgcaacatacgaagaagcaaagaaagcaatatcaagtacggaagcagtattaaacaatcgctttattaaggtttattggcacagagaaggaagcacccaacagttacaaactacttctccaaagcctttagtccagcagcccattttgcctgttgtgaagcagtcagtcaaagagcggctgggtccagtaccttcaagtactattgaacctgcagaagcccagagtgcctcttcagaccttcctcaggtgttgtctacatctactggcctaacaaaaacagtgtataatccagctgctttgaaggctgcacagaaaaccttacttgtttccacctctgcagttgataataatgaagcacagaaaaaaaaacaggaggcattgaaacttcagcaggatgtaaggaaaaggaaacaagaaattttagaaaagcacattgaaacacagaagatgttaatttcaaaactggagaaaaacaaaacaatgaagtctgaagataaagcagaaataatgaaaactttagaggttttgacaaaaaatattaccaagttgaaagatgaggtcaaagctgcttctcctggacgctgtcttccaaaaagtataaaaaccaagactcagatgcagaaggaattacttgacacagaactggatttatataagaagatgcaggctggagaagaagtcactgaacttaggagaaagtatacagaattacagctggaagctgccaaacgagggattctttcatctggtcggggcagaggaattcattcaagaggtcgaggtgcagttcatggccgaggcagggggcgagggcgagggcgaggtgtgcctggtcatgctgtggtggatcaccgtcccagggcattggagatttctgcatttacggagagcgatagagaagatcttcttcctcattttgcgcaatatggtgaaattgaagattgtcagattgatgattcctcacttcatgcagtaattacattcaagacaagagcagaagctgaagcagctgcagttcatggagctcgtttcaaagggcaagatctaaaactggcatggaataaaccagtaactaatatttcagctgttgaaacagaagaagttgagcctgatgaagaagaatttcaggaagagtctttggtggatgactcattacttcaagatgatgatgaagaagaagaggacaatgaatctcgttcttggagaagatgatttgactgatcattgatctgcatatgctagaactctacctgtgtttcattagtattatctaatgtacttttacatatttgtaaaaacaatttttggtaaaatgtgatgaagatggatttcacaaatagacaaaaaagaagaaaactaccttctgatcttgtattttgaaagattgatgtttgcattttacttcagtaaacaattgctaaagacatcacactagaaacatatgcaatgtttttattacatacttctactggacatcacagaattctttgggttctttgtaatttaatgaataggtctgaaaacttatgaccaatacttgttataacttagaggactttgttttattccaaataaggaatgaatttgcatttaaaatcttaatgaatgttttcaaaactgaatagataacatagtactctaactaaagtctccaagttatgtattataatattacatagtagtatgcttaggctttactatgtattagccttttgttggactgtgtatgtattttaccatatgggttttaatgataatggtgtatgactgctttacatgagtccttatgcatccagatgttataataaagtggaatggtctctttaaaaaaaaaaaaggaaagaaaagagaaaagcaatgacaaaaaaaaaaaaaaaaa

SEQ ID NO: 211438 - DNA, 2943 bp, Artificial Sequence
  derived and/or modified sequence
atggtgagcaagatgatcatcgagaacttcgaggccctgaagagctggctgagcaagaccctggagcccatctgcgacgccgaccccagcgccctggccaagtacgtgctggccctggtgaagaaggacaagagcgagaaggagctgaaggccctgtgcatcgaccagctggacgtgttcctgcagaaggagacccagatcttcgtggagaagctgttcgacgccgtgaacaccaagagctacctgcccccccccgagcagcccagcagcggcagcctgaaggtggagttcttcccccaccaggagaaggacatcaagaaggaggagatcaccaaggaggaggagagagagaagaagttcagcagaagactgaaccacagccccccccagagcagcagcagatacagagagaacagaagcagagacgagagaaagaaggacgacagaagcagaaagagagactacgacagaaacccccccagaagagacagctacagagacagatacaacagaagaagaggcagaagcagaagctacagcagaagcagaagcagaagctggagcaaggagagactgagagagagagacagagacagaagcagaaccagaagcagaagcagaaccagaagcagagagagagacctggtgaagcccaagtacgacctggacagaaccgaccccctggagaacaactacacccccgtgagcagcgtgcccagcatcagcagcggccactaccccgtgcccaccctgagcagcaccatcaccgtgatcgcccccacccaccacggcaacaacaccaccgagagctggagcgagttccacgaggaccaggtggaccacaacagctacgtgagaccccccatgcccaagaagagatgcagagactacgacgagaagggcttctgcatgagaggcgacatgtgccccttcgaccacggcagcgaccccgtggtggtggaggacgtgaacctgcccggcatgctgcccttccccgcccagccccccgtggtggagggcccccccccccccggcctgcccccccccccccccatcctgacccccccccccgtgaacctgagaccccccgtgcccccccccggccccctgccccccagcctgccccccgtgaccggcccccccccccccctgccccccctgcagcccagcggcatggacgccccccccaacagcgccaccagcagcgtgcccaccgtggtgaccaccggcatccaccaccagcccccccccgccccccccagcctgttcaccgccgacacctacgacaccgacggctacaaccccgaggcccccagcatcaccaacaccagcagacccatgtacagacacagagtgcacgcccagagacccaacctgatcggcctgaccagcggcgacatggacctgccccccagagagaagccccccaacaagagcagcatgagaatcgtggtggacagcgagagcagaaagagaaccatcggcagcggcgagcccggcgtgcccaccaagaagacctggttcgacaagcccaacttcaacagaaccaacagccccggcttccagaagaaggtgcagttcggcaacgagaacaccaagctggagctgagaaaggtgccccccgagctgaacaacatcagcaagctgaacgagcacttcagcagattcggcaccctggtgaacctgcaggtggcctacaacggcgaccccgagggcgccctgatccagttcgccacctacgaggaggccaagaaggccatcagcagcaccgaggccgtgctgaacaacagattcatcaaggtgtactggcacagagagggcagcacccagcagctgcagaccaccagccccaagcccctggtgcagcagcccatcctgcccgtggtgaagcagagcgtgaaggagagactgggccccgtgcccagcagcaccatcgagcccgccgaggcccagagcgccagcagcgacctgccccaggtgctgagcaccagcaccggcctgaccaagaccgtgtacaaccccgccgccctgaaggccgcccagaagaccctgctggtgagcaccagcgccgtggacaacaacgaggcccagaagaagaagcaggaggccctgaagctgcagcaggacgtgagaaagagaaagcaggagatcctggagaagcacatcgagacccagaagatgctgatcagcaagctggagaagaacaagaccatgaagagcgaggacaaggccgagatcatgaagaccctggaggtgctgaccaagaacatcaccaagctgaaggacgaggtgaaggccgccagccccggcagatgcctgcccaagagcatcaagaccaagacccagatgcagaaggagctgctggacaccgagctggacctgtacaagaagatgcaggccggcgaggaggtgaccgagctgagaagaaagtacaccgagctgcagctggaggccgccaagagaggcatcctgagcagcggcagaggcagaggcatccacagcagaggcagaggcgccgtgcacggcagaggcagaggcagaggcagaggcagaggcgtgcccggccacgccgtggtggaccacagacccagagccctggagatcagcgccttcaccgagagcgacagagaggacctgctgccccacttcgcccagtacggcgagatcgaggactgccagatcgacgacagcagcctgcacgccgtgatcaccttcaagaccagagccgaggccgaggccgccgccgtgcacggcgccagattcaagggccaggacctgaagctggcctggaacaagcccgtgaccaacatcagcgccgtggagaccgaggaggtggagcccgacgaggaggagttccaggaggagagcctggtggacgacagcctgctgcaggacgacgacgaggaggaggaggacaacgagagcagaagctggagaagatag

SEQ ID NO: 211439 - DNA, 2943 bp, Artificial Sequence
  derived and/or modified sequence
atggtgagtaagatgataatagaaaacttcgaggcattgaagtcatggctttctaagactctggaaccaatttgtgacgcagatccgagcgccctggctaaatatgtcctggccctggtaaaaaaggacaaatccgaaaaggaactgaaggcgctctgcattgatcagttggatgtatttctccagaaagagacccagatttttgtagagaaactcttcgatgctgtgaataccaagagctatttgcccccacctgaacagccgagctcaggatcacttaaagtggagttttttcctcaccaagagaaggatatcaagaaggaagagatcactaaagaagaagagcgggaaaaaaagttttctcgccgactcaaccactcccctccacaaagctcaagcaggtaccgggagaaccgaagccgcgacgaaaggaaaaaagatgatcggagccgcaagagggattatgacagaaacccacccagaagggattcttaccgagacaggtataatagacgcagaggacgaagtcgcagttactctcgctctcgctcccgctcctggagcaaagaaagactgcgggagagggatcgggacagaagcaggacgagatctcgtagcagaactcggagccgcgagagggacctcgtgaagccaaaatacgatctggataggacagaccctttggagaacaattacacccccgtatctagcgtgccatccatctcgtctggacactatcccgtgcccaccctgtcctccaccattaccgtcatcgctcccacccatcatggtaacaacaccaccgagtcctggagcgaattccacgaggaccaggtcgaccacaacagctatgtgcgtccgcctatgcccaaaaagagatgcagggattacgatgagaagggcttctgcatgagaggcgatatgtgcccattcgaccatggttctgaccccgtggtggtggaagatgtgaacctccccggtatgctccctttcccagcccagccccccgtggtggaagggccccctccgcccggcctgcccccaccgccacccatcttaacacccccccccgtcaacctgaggccccctgtccctccccctggaccgctgcctccgagtctgccacccgtgactggccctccgccgccccttcccccattgcagccgtcaggtatggacgcgccgcccaattctgccacatccagtgtgcccacagtggtgactaccggcatccaccatcaaccccctcccgcgcctccatccctgttcacagccgacacttacgatacggacggctacaacccagaggcaccttctattacaaacacctcccgcccaatgtatcgccatagggtgcatgcccagaggcctaatcttattggcttgaccagcggcgacatggacctgcctccccgggaaaagccacccaataagagttcaatgagaattgtggtggacagcgaatccagaaaacgaactattggctccggagagcctggagttccaactaagaagacatggttcgacaaacctaattttaaccggaccaactccccaggcttccagaagaaagtccaatttggcaacgaaaacacgaagctggaactgcggaaggttccccccgagctcaacaacatttccaaacttaatgaacacttcagccgcttcggcacgctggtgaatctgcaagtggcctacaatggcgatcccgagggggcgttgattcagttcgcgacttacgaagaggctaaaaaggcaattagttccaccgaagctgtcctgaataataggtttatcaaggtatattggcatcgggaggggtcaacacagcagctgcagaccacctctccaaaacccctcgtgcagcagcccattctcccggtcgtgaaacagagcgtcaaggagcggctgggcccagtcccgtcatccaccattgagcccgccgaagcccagtccgcatccagcgacttgccacaagttctctcgacaagcactggtctcacaaagaccgtgtataatccagccgccttgaaagccgcacagaagacactgttggtttctacgtcagctgtggacaacaatgaggcccagaagaagaaacaggaggccctgaaactacagcaggatgtgagaaagcgcaagcaggagattctagagaaacacattgaaacccagaagatgcttatttcaaagctcgaaaaaaataaaaccatgaagagcgaggacaaggctgagattatgaaaactcttgaggtcctgactaagaatataaccaagctaaaggacgaggtgaaagccgccagtccgggaaggtgtctgccaaaatctatcaagactaaaacacagatgcagaaagagctgctcgacacagagctggatttgtataagaaaatgcaggccggcgaagaggtcactgagctgcgtaggaaatacacagaactccagttggaggcagccaagcgagggattcttagctccggcagagggcgcggcattcactctcgcggaagaggcgctgttcacggccgaggtaggggccgaggaagggggcgcggtgtcccaggccatgcagttgtagaccacagacccagagcgctcgaaattagcgccttcacagagtctgaccgtgaggatcttctgcctcactttgcgcaatacggcgaaattgaggactgccagatcgacgactccagtctacatgccgttatcactttcaaaacccgggccgaagccgaagccgccgctgtgcatggcgctcgattcaagggccaggatctgaaactggcttggaacaagcctgttactaatattagtgcagtggagaccgaggaagtggaacccgatgaggaggagttccaggaggaaagtctggtggatgacagcctgttacaagacgacgacgaggaggaggaagacaatgagtcccggtcatggagacgttag

SEQ ID NO: 211440 - DNA, 2943 bp, Artificial Sequence
  derived and/or modified sequence
atggtgtccaagatgatcatcgagaactttgaggccctgaagtcctggctgagcaagaccctggagcccatctgtgatgctgaccccagcgccctggccaagtatgtgctggccctggtgaagaaggacaagtctgagaaggagctgaaggccctgtgcatcgaccagctggatgtgttcctgcagaaggagacccagatctttgtggagaagctgtttgatgctgtgaacaccaagagctacctgcccccacctgagcagcccagcagcggcagcctgaaggtggagttcttcccccaccaggagaaggacatcaagaaggaggagatcaccaaggaggaggagcgggagaagaagttcagccggcggctgaaccacagccccccccagagcagcagccgctacagagaaaatagaagcagagatgagaggaagaaggatgacaggagcaggaagagggactatgacagaaatcctccaagaagagacagctacagagaccgctacaacagaagaagaggccgcagccgcagctacagccgcagccgcagccgctcctggagcaaggagcggctgcgggagcgggaccgggacaggagcaggaccaggagccgcagcaggaccaggagccgggagcgggacctggtgaagcccaagtatgacctggacagaacagaccccctggagaacaactacacccctgtgtcctctgtgcccagcatcagcagcggccactaccctgtgcccaccctgagcagcaccatcaccgtcatcgcccccacccaccacggcaacaacaccacagagagctggagcgagttccacgaggaccaggtggaccacaacagctatgtgcggccccccatgcccaagaagcgctgccgggactatgatgagaagggcttctgcatgagaggagacatgtgcccctttgaccacggcagtgaccctgtggtggtggaggatgtgaacctgcccggcatgctgcccttccctgcccagccccctgtggtggagggccccccacctcctggcctgcccccacctccacccatcctgaccccacctcctgtgaacctgcggccccctgtgcccccacctggccccctgccccccagcctgccccctgtgacaggccccccaccacccctgccccccctgcagcccagcggcatggatgccccacccaacagcgccaccagctctgtgcccaccgtggtgaccaccggcatccaccaccagcccccaccagccccacccagcctcttcaccgctgacacctatgacacagatggctacaaccctgaggcccccagcatcaccaacaccagccggcccatgtaccgccaccgggtgcacgcccagaggcccaacctgattggcctgaccagcggggacatggacctgcccccccgggagaagccacccaacaagagctccatgagaattgtggtggacagcgagagcaggaagaggaccatcggcagcggggagcccggggtgcccaccaagaagacctggtttgacaagcccaacttcaacagaaccaacagccctggcttccagaagaaggtgcagtttggaaatgaaaacaccaagctggagctgaggaaggtgcccccagagctgaacaacatcagcaagctgaatgagcacttcagccgcttcggcaccctggtgaacctgcaggtggcctacaatggagaccctgagggcgccctgatccagtttgccacctatgaggaggccaagaaggccatcagcagcacagaggccgtgctgaacaaccgcttcatcaaggtgtactggcaccgggagggcagcacccagcagctgcagaccaccagccccaagcccctggtgcagcagcccatcctgcctgtggtgaagcagagcgtgaaggagcggctgggccctgtgcccagcagcaccatcgagcctgctgaggcccagagcgccagcagtgacctgccccaggtgctgagcaccagcacaggcctgaccaagacagtgtacaacccagctgccctgaaggccgcccagaagaccctgctggtgtccaccagcgctgtggacaacaatgaggcccagaagaagaagcaggaggccctgaagctgcagcaggatgtgaggaagaggaagcaggagatcctggagaagcacatcgagacccagaagatgctgatcagcaagctggagaagaacaagaccatgaagtctgaggacaaggccgagatcatgaagaccctggaggtgctgaccaagaacatcaccaagctgaaggatgaggtgaaggccgccagccctggccgctgcctgcccaagagcatcaagaccaagacccagatgcagaaggagctgctggacacagagctggacctgtacaagaagatgcaggccggggaggaggtgacagagctgcggaggaagtacacagagctgcagctggaggccgccaagaggggcatcctgagcagcggccggggccggggcatccacagccggggcagaggagctgtgcacggccggggccggggccggggccggggccggggcgtgcccggccatgctgtggtggaccaccggccccgggccctggagatcagcgccttcacagaaagtgaccgggaggacctgctgccccactttgcccagtacggggagattgaggactgccagattgatgacagcagcctgcatgctgtgatcaccttcaagaccagggctgaggccgaggccgctgctgtgcatggagcccgcttcaagggccaggacctgaagctggcctggaacaagcctgtgaccaacatctctgctgtggagacagaggaggtggagccagatgaggaggagttccaggaggagagcctggtggatgacagcctgctgcaggatgatgatgaggaggaggaggacaatgaaagccgctcctggaggaggtag

SEQ ID NO: 211441 - DNA, 2943 bp, Artificial Sequence
  derived and/or modified sequence
atggtgagcaagatgatcatcgagaacttcgaggccctgaagagctggctgtctaaaaccctggaacctatctgcgacgctgaccctagcgccctggcaaagtatgtcttagccctcgtgaagaaggataagtctgaaaaggagctaaaagccctctgtattgaccagctcgatgtgttcctccagaaagagactcagatttttgtagaaaaacttttcgacgccgtcaacactaagtcctacttgccacctccagaacagcccagctcaggctctttgaaggtcgagttttttccacaccaagaaaaggacataaagaaggaagagatcacgaaagaggaggaacgggagaaaaagttctcccgtaggttgaaccattctccccctcagagctcgagcagataccgggagaatcggtcacgcgacgaacgaaaaaaagacgatcgctcccggaaaagagactatgaccggaatcctcctaggcgagactcctaccgcgacaggtataacaggagacgaggacggtcccggtcctacagtcggagtagaagtcggtcctggtctaaggagcgacttcgggaaagagacagagaccggtcgcgaaccaggtctaggagtcggaccagatcacgagaacgggacctcgttaagcctaagtacgaccttgatagaactgacccactggagaacaattacacacctgtctcgtctgtgccatcgatttcctcgggccactaccctgtcccaacactttcctctaccatcaccgtcatcgcccccactcatcacgggaataataccactgagtcctggagcgagtttcacgaggaccaggtggaccataattcctacgtgagacctcctatgcccaaaaagagatgtagagactacgatgagaagggattttgcatgagaggggatatgtgccctttcgaccacggatccgatcccgtggtggtcgaggacgtcaacttgccaggtatgcttccctttccagcccaaccccccgtcgtggagggcccaccccctcctggactacctccacctccccctatccttacccccccacccgtgaatctgcgacctcccgtgccacccccagggccccttcctccgtctctgcctcctgtcaccggaccaccccccccgctcccgccgctgcagccgtcaggaatggatgcccctcccaacagtgccacctcgagcgtccctaccgtagtcacgacgggtatacaccatcagcccccccccgccccaccttctttgttcaccgctgacacctatgatacggatgggtacaacccggaggccccctcgataacgaacacctctcgacctatgtacagacaccgggtgcacgctcagcgccccaacctaatcgggctcacttccggagatatggatctgccacctcgagaaaaacctcccaacaagtcctcaatgagaattgtggtagattccgagtctcgaaagcggacaattgggagcggggaaccgggagttcccaccaaaaaaacatggtttgataaacccaattttaatcggacgaactcccctggctttcagaagaaggtccagttcggcaatgagaacacaaagcttgagttaaggaaggtccccccagaactgaataacatcagcaagctgaacgagcatttcagcagattcggaacgctggtcaatcttcaggtcgcttacaatggcgatcctgagggagcactaatccagttcgctacctatgaagaagcaaagaaagcgattagctctaccgaagccgtgctgaacaatagattcatcaaagtttattggcacagggaaggtagcacccagcaactccagactacttcacccaagcctcttgtgcagcagccgatacttcctgtggtcaaacagagtgtcaaggaacggctgggaccagtgcctagcagcactatcgaacccgcagaggctcagtctgcttcatccgacctgccacaagtgctctccacttccactgggctgaccaagacagtatacaacccagctgcactgaaggcggcgcagaagacattactggtgagcactagcgcagtggacaacaacgaggcacagaaaaaaaagcaagaggccctcaagctccaacaggatgtgaggaagcggaagcaagagattctggaaaagcacattgagacccaaaagatgctgatcagtaaactggagaaaaataaaacaatgaagagcgaggacaaggccgagatcatgaaaacccttgaggtcttgacaaagaatattaccaagttgaaggatgaggtgaaggcggcatcaccaggccgctgtctgcccaagagcattaaaaccaagacccaaatgcaaaaagaactcctagacacagaactagatctctacaaaaagatgcaggccggcgaagaggtgacagaattgcgacgtaagtatactgagcttcagctggaagcggccaagcgtgggatcctgagtagcggtcgagggagaggaatccactcacgcggtaggggagccgtgcatggacgtggccggggccggggtagaggtagaggcgtcccggggcatgccgtggtggaccatcggccacgggccctggaaattagcgctttcactgaaagtgatcgcgaggacttgctgccccattttgctcaatacggagaaattgaggactgccagattgacgacagctcgctgcatgcagtcattacattcaagacacgggcagaggccgaggctgccgccgtccatggagcgagattcaagggacaagacctgaaattggcctggaataagcctgtcacgaatatctccgccgttgagaccgaggaagtggagccagacgaggaggagttccaggaagagagcctggtcgacgactcactgctccaggatgacgacgaagaggaagaggacaacgaatcccgtagttggaggcgatag

SEQ ID NO: 211442 - DNA, 2943 bp, Artificial Sequence
  derived and/or modified sequence
atggtttccaagatgatcattgagaactttgaggccttgaaaagttggttatccaaaactttggaacccatctgtgacgcggacccttccgccctggccaaatatgtactcgcactcgtcaagaaggataaatccgagaaggagttgaaagccctctgtatagatcagctcgacgtctttctacagaaggagactcagattttcgtggagaaattgtttgacgccgtaaatacaaaaagttacctgccacccccagagcaaccgtcgagtggcagcctgaaagtggagttctttccacaccaggaaaaggatattaaaaaagaggagattacgaaagaagaggaacgagaaaaaaaattcagcaggcggctgaaccactcacctccgcagagttcttcccgttaccgcgaaaatcggtcgcgcgacgaaagaaaaaaagacgatcggtctagaaaaagagactatgaccgcaatcctcctcgaagagactcatatagagatagatacaaccgtagaagaggaaggtcacgcagctattctcgctcccggtcacgaagctggtctaaagaaagactgagggaaagagaccgggacaggtcacggacccgctctcgatcccgaactaggagcagagagcgggacctcgttaaacctaaatacgatcttgaccgaacagatcccttggagaataattacaccccggtgtcctccgtgcccagcatatcttcgggtcactacccggtgcctaccctgagctcaacaataaccgtgatcgcgccaactcatcacggaaacaataccactgaaagctggagcgaatttcatgaagatcaagtggaccacaacagctatgtgcggcctcctatgcccaagaagaggtgcagggactatgacgagaagggtttttgcatgcgaggcgacatgtgcccgttcgaccatgggtctgacccagtggtggtagaggacgtgaacctgccagggatgcttccgtttcccgcacagcccccagtggtcgaaggaccgcctccacctggattgccacctccccctccaatactgacccctcctcccgtaaacctgcgccctcccgtcccacctccaggcccacttccccctagcctgcctcccgtgacaggccctccaccaccgctgccaccgctacagccatctggcatggacgcccctcccaattctgctacttcctcggtacctacggttgttactaccggtattcatcaccagcccccacctgccccaccatccctgttcacagccgatacatatgacaccgatggatacaaccctgaagcccctagcataacgaacacctcccgccctatgtatcgccaccgagtccacgctcagaggcccaacctgatcggattgacctctggtgatatggatctgcctcctcgtgagaaaccaccgaacaaatcctccatgagaattgttgtagatagcgaatctagaaaacggactattggttcaggggagccaggagtgcccaccaagaagacatggtttgacaagccgaactttaaccgcactaatagcccagggttccagaagaaggtgcagttcggcaatgagaatacaaagctggagcttagaaaagtccctcctgaacttaataacatatcgaagctcaatgagcatttttccaggttcgggacactggtcaatctacaggtcgcctataatggtgatccagagggggcactcatccagttcgctacttacgaggaagctaagaaagccatatcttctacagaagctgtgcttaataacaggttcattaaggtctactggcatagagaaggtagtacccagcagctgcagactaccagcccaaaacccctggtgcaacagcccatcctccctgttgtaaaacagtccgtaaaggagcggctcggcccagtgccttcctccaccatcgagcctgcggaagctcagagtgcatccagcgacctaccgcaggtgctttctaccagtacagggctgactaagacagtttataatcctgcggcattaaaggctgctcagaagacgctactggtgagcacaagcgccgtcgataataatgaagctcagaaaaagaaacaggaagcgctgaaactgcaacaggacgtgcggaaacgaaaacaggaaattctcgaaaagcacatcgagacgcaaaagatgctgatcagcaagttagaaaagaataaaacaatgaaatccgaggacaaggctgagattatgaagactctggaggttctgaccaagaacatcaccaagctgaaagatgaggtaaaggctgcctcccctggacgatgtctgccaaaatccattaaaaccaaaacccaaatgcagaaagagttgttagacaccgagctagatctgtacaaaaagatgcaagccggagaggaggtgactgaactgaggcgtaagtatactgagctccaacttgaagcggcaaagagggggattctttccagtggcagaggtcgcggtatccacagtaggggcagaggagcggtgcatgggaggggacgcggacggggaagaggaaggggggtgcccggacacgccgtggttgatcatcgccctcgtgcactggagatctccgccttcacagagtctgatcgcgaggatttactgcctcattttgcccagtacggcgagattgaggactgccagatagatgactccagtttgcatgcagttatcacattcaagacaagagcagaagctgaggccgctgctgttcatggggcaaggttcaaggggcaagacttgaaattagcgtggaataaacctgtgaccaacatctcagccgtggaaaccgaagaggttgaacctgacgaagaggaattccaggaggaaagcttggtcgacgatagcctgctgcaggacgacgatgaagaggaggaggacaatgagtcacgatcctggcggcgatag

SEQ ID NO: 211443 - protein, 317 aa, Artificial Sequence
  derived and/or modified sequence
MVVSGAPPALGGGCLGTFTSLLLLASTAILNAARIPVPPACGKPQQLNRVVGGEDSTDSEWPWIVSIQKNGTHHCAGSLLTSRWVITAAHCFKDNLNKPYLFSVLLGAWQLGNPGSRSQKVGVAWVEPHPVYSWKEGACADIALVRLERSIQFSERVLPICLPDASIHLPPNTHCWISGWGSIQDGVPLPHPQTLQKLKVPIIDSEVCSHLYWRGAGQGPITEDMLCAGYLEGERDACLGDSGGPLMCQVDGAWLLAGIISWGEGCAERNRPGVYISLSAHRSWVEKIVQGVQLRGRAQGGGALRAPSQGSGAAARS

SEQ ID NO: 211444 - DNA, 954 bp, Artificial Sequence
  derived and/or modified sequence
atggtggtgtcaggcgctccgcctgctctcggaggcggctgcctcgggacatttacatcactcctattgcttgccagtactgccattctgaacgctgccagaatcccagtaccccccgcatgtggaaaaccacagcaacttaatcgggtggtgggcggagaagacagtaccgactctgaatggccatggatcgtttcgatccagaaaaatgggacacatcactgtgcaggctcactcctgacgtcccggtgggtgatcacagccgcccactgttttaaggataatctcaacaaaccctacctgtttagcgtgctgctgggagcatggcagctcggaaatcctggctcccgtagtcagaaagtgggagtggcctgggtggaacctcatccagtgtactcttggaaagaaggcgcttgtgccgacatcgcccttgtgcgactcgagcggagcatccagttctcagagcgggtgctccccatttgcttacctgatgcctctattcacttaccacctaacactcactgctggatcagtgggtgggggagtatccaggatggcgtgcctctcccgcatcctcagaccctgcagaagctaaaggtgccaatcatagactctgaggtctgttcgcacctgtattggcgaggggctggtcaagggcctattacagaggacatgctgtgcgccggataccttgaaggagaacgcgacgcttgcctgggggatagtggaggtccgctcatgtgccaggtcgacggggcctggctactggccggaatcatctcctggggcgagggctgtgctgagagaaacagacctggggtatacataagcctatctgcccaccgttcatgggtggagaagattgttcagggggtgcaactaaggggtagagcacaaggcgggggcgccctgagagcgccaagccagggctcgggtgcagccgcaaggtcctag

SEQ ID NO: 211445 - DNA, 954 bp, Artificial Sequence
  derived and/or modified sequence
atggtggtgtctggggcccccccagccctgggcggcggctgcctgggcaccttcaccagcctgctgctgctggccagcacagccatcctgaatgctgcccgcatccctgtgcccccagcctgtgggaagccccagcagctgaacagagtggtgggcggggaggacagcacagattctgagtggccctggatcgtgtccatccagaagaatggcacccaccactgtgccggcagcctgctgaccagccgctgggtgatcacagctgcccactgcttcaaggacaacctgaacaagccctacctgttctctgtgctgctgggcgcctggcagctgggcaaccctggcagccgcagccagaaggtgggcgtggcctgggtggagccccaccctgtgtacagctggaaggagggcgcctgtgccgacatcgccctggtgcggctggagaggagcatccagttcagcgagcgggtgctgcccatctgcctgcctgatgccagcatccacctgccccccaacacccactgctggatcagcggctggggcagcatccaggatggagtgcccctgccccacccccagaccctgcagaagctgaaggtgcccatcattgattctgaggtgtgcagccacctgtactggaggggggccggccagggccccatcacagaggacatgctgtgtgccggctacctggagggggagagagatgcctgcctgggggacagcggcggccccctgatgtgccaggtggatggagcctggctgctggccggcatcatctcctggggcgagggctgtgccgagaggaacagacctggggtgtacatcagcctgagcgcccaccgctcctgggtggagaagatcgtgcagggcgtgcagctgcggggccgggcccagggcggcggggccctgcgggcccccagccagggcagcggggccgccgcccggagctag

SEQ ID NO: 211446 - DNA, 954 bp, Artificial Sequence
  derived and/or modified sequence
atggtggtgagcggcgccccccccgccctgggcggcggctgcctggggacctttactagcctgctgctgctagcaagtacagcaatactcaacgcagcacgcattcctgtcccccctgcttgtggcaagcctcaacagctgaatcgcgtggtcggaggcgaagactctacagatagcgagtggccttggattgtgtccatccagaagaatgggacacaccactgcgcagggagccttctgacaagccgctgggttatcacagcggcccactgcttcaaggataatcttaataaaccatacttgttctctgtgctcctgggcgcatggcaattgggaaatcctggttcacgctcccagaaagtcggcgtagcttgggttgaaccgcatcctgtgtacagctggaaggagggagcttgcgcagatattgcattagtccggctggagagatctattcagttctccgaaagagtgttgccgatttgtctgcctgatgcaagtatacacctcccgcctaacactcactgctggatttctggctggggttctatccaggatggtgtgccactcccccatccccagaccctgcaaaagctgaaggtcccaatcattgacagcgaagtctgttcacatctctattggcgcggtgcggggcagggccctataactgaggatatgttgtgtgccggctacctggagggcgaaagagacgcctgcctgggggacagcggcggaccactgatgtgccaagtcgatggcgcttggctcttggcgggaattatttcatggggcgaggggtgtgctgagaggaaccgtccaggagtgtatatctcattgtctgcacataggagctgggttgagaaaatcgtgcagggtgttcagctgcgcgggagagcccaggggggcggcgctttgcgagctccatcgcaggggtctggcgcagccgcacggtcgtag

SEQ ID NO: 211447 - DNA, 954 bp, Artificial Sequence
  derived and/or modified sequence
atggttgtcagtggggctcctcccgcacttggaggtggctgtctgggcacattcacaagtctactgctgttggcctccaccgcaatcttgaatgctgcgcgaattccggtgccacccgcttgtggcaaaccgcagcaactcaacagggtcgtggggggagaggattccaccgactccgaatggccgtggatcgtcagcatccagaagaacggaacacatcactgtgctggatctctattaacgtctcgctgggtcatcaccgctgcccactgttttaaggataatttgaacaagccctacctctttagtgttctacttggagcttggcagttaggaaacccaggatccagatctcagaaggtcggtgtggcctgggtcgaacctcacccggtgtatagctggaaggaaggtgcctgcgccgatatcgcactagtgaggctggagaggtctatccagtttagcgagagagtccttccaatttgcctaccagatgctagcatccacttaccgccaaatacacactgttggatcagtggctggggatcaattcaggacggcgtgccactgcctcatccgcagactctgcaaaaactaaaagtcccgattatcgacagtgaggtttgtagccatctgtattggcgaggcgcaggtcagggccctattactgaggacatgctgtgcgctggatacctggaaggcgagagagatgcttgcctcggtgattctggcggaccactgatgtgccaggtggacggggcttggctgctggccggaatcatatcttggggggagggctgcgccgaacggaatcgccctggggtgtacattagcctctccgcacatcggagctgggtggagaaaatcgtgcagggcgtacaattgcgcggacgagctcagggcggaggcgctcttcgcgctcctagccagggcagtggcgctgccgctcggtcttag

SEQ ID NO: 211448 - DNA, 1386 bp, Artificial Sequence
  derived and/or modified sequence
acacaccctgacccgcatcgccctgggtctctcgagcctgctgcctgctcccccgccccaccagccatggtggtttctggagcgcccccagccctgggtgggggctgtctcggcaccttcacctccctgctgctgctggcgtcgacagccatcctcaatgcggccaggatacctgttcccccagcctgtgggaagccccagcagctgaaccgggttgtgggcggcgaggacagcactgacagcgagtggccctggatcgtgagcatccagaagaatgggacccaccactgcgcaggttctctgctcaccagccgctgggtgatcactgctgcccactgtttcaaggacaacctgaacaaaccatacctgttctctgtgctgctgggggcctggcagctggggaaccctggctctcggtcccagaaggtgggtgttgcctgggtggagccccaccctgtgtattcctggaaggaaggtgcctgtgcagacattgccctggtgcgtctcgagcgctccatacagttctcagagcgggtcctgcccatctgcctacctgatgcctctatccacctccctccaaacacccactgctggatctcaggctgggggagcatccaagatggagttcccttgccccaccctcagaccctgcagaagctgaaggttcctatcatcgactcggaagtctgcagccatctgtactggcggggagcaggacagggacccatcactgaggacatgctgtgtgccggctacttggagggggagcgggatgcttgtctgggcgactccgggggccccctcatgtgccaggtggacggcgcctggctgctggccggcatcatcagctggggcgagggctgtgccgagcgcaacaggcccggggtctacatcagcctctctgcgcaccgctcctgggtggagaagatcgtgcaaggggtgcagctccgcgggcgcgctcaggggggtggggccctcagggcaccgagccagggctctggggccgccgcgcgctcctagggcgcagcgggacgcggggctcggatctgaaaggcggccagatccacatctggatctggatctgcggcggcctcgggcggtttcccccgccgtaaataggctcatctacctctacctctgggggcccggacggctgctgcggaaaggaaaccccctccccgacccgcccgacggcctcaggccccgcctccaaggcatcaggccccgcccaacggcctcatgtccccgcccccacgacttccggccccgccccgggccccagcgcttttgtgtatataaatgttaatgatttttataggtatttgtaaccctgcccacatatcttatttattcctccaatttcaataaattatttattctccagtg

SEQ ID NO: 211449 - DNA, 954 bp, Artificial Sequence
  derived and/or modified sequence
atggtagtgtccggagctcctcctgccctggggggggggtgcctggggaccttcacctctctacttctgctggcaagcaccgctatcctgaacgccgctaggatacccgtaccacctgcttgcgggaagcctcagcagctcaatcgagtcgtcggcggcgaagattccacagattctgagtggccttggatcgtgagtatccagaagaatggaacacatcactgcgccggatctctgcttacctcccggtgggttataacagccgcacattgcttcaaagacaatctaaacaagccatatttgttcagcgtcctcctcggagcttggcagctcggcaaccccggctcgcgctcccagaaagtcggcgtcgcatgggtcgaaccacaccctgtttattcttggaaagagggagcttgcgccgacatcgcgctcgttcggctcgaacgttccatccagttttctgagagggtcttgcctatatgcctgcccgacgcttctatccacctcccccctaatactcactgctggatcagtggctgggggtctattcaggacggtgttcccttgccacacccccagaccttgcagaaactgaaagtgccaatcatcgatagcgaggtgtgctctcatctttattggaggggagctggccaggggcctataaccgaagatatgttatgtgctgggtatctcgaaggagagagggacgcatgcttgggcgactccggtgggcccctgatgtgtcaggtggatggcgcttggctactcgcgggaattatttcctggggtgagggatgcgctgaaaggaaccggccaggcgtgtacatttctctgtctgcccatcgctcttgggttgaaaaaatagtgcaaggcgtgcaactgcgaggaagagctcaaggcggcggggccttgcgagcaccgtcccagggatctggagccgctgctcgctcctag

SEQ ID NO: 211450 - DNA, 954 bp, Artificial Sequence
  derived and/or modified sequence
atggtggtttcaggggctccacccgccttgggcggaggatgtctgggaacttttacatcactgctgctccttgcatcaacagctatccttaatgcggctaggataccggtgccgcctgcatgtgggaaacctcaacagttaaatagagtcgtcgggggcgaagacagtaccgattctgaatggccatggattgtgagtatccaaaaaaatgggacccaccactgcgccggctccctacttactagccgatgggtcattactgccgcccactgctttaaggacaatttgaataaaccgtacctgttttctgtcttgcttggtgcctggcagctgggtaatcccgggtcccgctcgcagaaagttggcgtcgcatgggttgaacctcacccagtctactcatggaaggaaggtgcgtgcgctgacattgcattggttaggttagagcgctctattcaattctctgaaagggtcctgcccatatgtttgcctgacgcttctattcacctccccccaaatacacactgttggatctccggatgggggtctatccaggacggagtgcctctgccccacccccagacattacaaaagctgaaagttccaatcattgatagcgaagtgtgttcccatttgtactggcggggagcgggtcagggtcccatcaccgaggatatgctgtgcgccggatacctggaaggggaaagagacgcctgtctgggagatagtggaggaccactgatgtgccaggtcgacggagcttggctcctggccggtatcataagttggggagaaggttgtgccgaaagaaaccgtccaggcgtgtacatctctctgagcgctcatagaagctgggtggaaaagatcgtccagggggtgcagttacgaggaagggcacagggcggaggtgctcttcgcgcaccgagccaggggagtggagctgctgctagaagttag

SEQ ID NO: 211451 - DNA, 954 bp, Artificial Sequence
  derived and/or modified sequence
atggtggtgagcggcgccccccccgccctgggcggcggctgcctgggcaccttcaccagcctgctgctgctggccagcaccgccatcctgaacgccgccagaatccccgtgccccccgcctgcggcaagccccagcagctgaacagagtggtgggcggcgaggacagcaccgacagcgagtggccctggatcgtgagcatccagaagaacggcacccaccactgcgccggcagcctgctgaccagcagatgggtgatcaccgccgcccactgcttcaaggacaacctgaacaagccctacctgttcagcgtgctgctgggcgcctggcagctgggcaaccccggcagcagaagccagaaggtgggcgtggcctgggtggagccccaccccgtgtacagctggaaggagggcgcctgcgccgacatcgccctggtgagactggagagaagcatccagttcagcgagagagtgctgcccatctgcctgcccgacgccagcatccacctgccccccaacacccactgctggatcagcggctggggcagcatccaggacggcgtgcccctgccccacccccagaccctgcagaagctgaaggtgcccatcatcgacagcgaggtgtgcagccacctgtactggagaggcgccggccagggccccatcaccgaggacatgctgtgcgccggctacctggagggcgagagagacgcctgcctgggcgacagcggcggccccctgatgtgccaggtggacggcgcctggctgctggccggcatcatcagctggggcgagggctgcgccgagagaaacagacccggcgtgtacatcagcctgagcgcccacagaagctgggtggagaagatcgtgcagggcgtgcagctgagaggcagagcccagggcggcggcgccctgagagcccccagccagggcagcggcgccgccgccagaagctag

SEQ ID NO: 211452 - protein, 175 aa, Artificial Sequence
  derived and/or modified sequence
MIRCGLACERCRWILPLLLLSDHGQTSSLWWKCSQEGGGSGSYEEGCQSLMEYAWGRAAAAMLFCGFIILVICFILSFFALCGPQMLVFLRVIGGLLALAAVFQIISLVIYPVKYTQTFTLHANPAVTYIYNWAYGFGWAATIILIGCAFFFCCLPNYEDDLLGNAKPRYFYTSA

SEQ ID NO: 211453 - protein, 193 aa, Artificial Sequence
  derived and/or modified sequence
MIRCGLACERCRWILPLLLLSAIAFDIIALAGRGWLQSSDHGQTSSLWWKCSQEGGGSGSYEEGCQSLMEYAWGRAAAAMLFCGFIILVICFILSFFALCGPQMLVFLRVIGGLLALAAVFQIISLVIYPVKYTQTFTLHANPAVTYIYNWAYGFGWAATIILIGCAFFFCCLPNYEDDLLGNAKPRYFYTSA

SEQ ID NO: 211454 - protein, 196 aa, Artificial Sequence [sequence omitted]

SEQ ID NO: 211455 - DNA, 528 bp, Artificial Sequence
  derived and/or modified sequence
atgatcagatgcggcctggcctgcgagagatgcagatggatcctgcccctgctgctgctgagcgaccacggccagaccagcagcctgtggtggaagtgcagccaggagggcggcggcagcggcagctacgaggagggctgccagagcctgatggagtacgcctggggcagagccgccgccgccatgctgttctgcggcttcatcatcctggtgatctgcttcatcctgagcttcttcgccctgtgcggcccccagatgctggtgttcctgagagtgatcggcggcctgctggccctggccgccgtgttccagatcatcagcctggtgatctaccccgtgaagtacacccagaccttcaccctgcacgccaaccccgccgtgacctacatctacaactgggcctacggcttcggctgggccgccaccatcatcctgatcggctgcgccttcttcttctgctgcctgcccaactacgaggacgacctgctgggcaacgccaagcccagatacttctacaccagcgcctag

SEQ ID NO: 211456 - DNA, 582 bp, Artificial Sequence
  derived and/or modified sequence
atgatcagatgcggcctggcctgcgagagatgcagatggatcctgcccctgctgctgctgagcgccatcgccttcgacatcatcgccctggccggcagaggctggctgcagagcagcgaccacggccagaccagcagcctgtggtggaagtgcagccaggagggcggcggcagcggcagctacgaggagggctgccagagcctgatggagtacgcctggggcagagccgccgccgccatgctgttctgcggcttcatcatcctggtgatctgcttcatcctgagcttcttcgccctgtgcggcccccagatgctggtgttcctgagagtgatcggcggcctgctggccctggccgccgtgttccagatcatcagcctggtgatctaccccgtgaagtacacccagaccttcaccctgcacgccaaccccgccgtgacctacatctacaactgggcctacggcttcggctgggccgccaccatcatcctgatcggctgcgccttcttcttctgctgcctgcccaactacgaggacgacctgctgggcaacgccaagcccagatacttctacaccagcgcctag

SEQ ID NO: 211457 - DNA, 528 bp, Artificial Sequence
  derived and/or modified sequence
atgattagatgtgggttggcctgtgaacgttgccgttggattctccctctgctcctgctatccgatcatggccagaccagcagcctatggtggaaatgctctcaggaaggagggggctctggttcttatgaagagggttgccaatctcttatggagtacgcgtggggtcgggcggcagccgccatgctgttctgcggatttatcattcttgtgatctgttttatccttagcttcttcgcactttgcgggccccaaatgctggtcttccttcgtgtgattggagggctcttagccttggccgccgtgttccagattatttcgctcgtgatttaccccgtgaaatacacgcagaccttcaccctgcacgccaacccagctgttacatatatatataactgggcctacggctttggctgggccgcgacaattattctcataggctgtgccttcttcttttgttgtcttccaaactatgaggacgaccttctagggaacgccaaaccgcgctacttctatactagcgcctag

SEQ ID NO: 211458 - DNA, 582 bp, Artificial Sequence
  derived and/or modified sequence
atgatccgctgcggcctcgcctgcgaacggtgcagatggatcttgccactgctacttctttctgccatcgcatttgatatcattgccttggccgggcgcgggtggctacagtccagtgatcacggccagacttccagcctgtggtggaagtgctcgcaggagggcgggggttctgggagctacgaggaggggtgccaaagccttatggaatacgcctggggcagggccgccgcagccatgctgttctgtggcttcataatccttgtcatctgtttcatcctgtcattttttgcactgtgtggcccccagatgctggtgtttctgagagtgatcggcggcctgctggctctggcagcggtgtttcaaattattagcctggtgatctaccccgttaagtacactcaaacctttaccctccacgccaatcccgctgtgacttatatatacaactgggcctatgggttcggctgggccgccacaattatccttattggatgcgccttcttcttttgctgcttgcctaactacgaagatgacctgcttggcaacgcgaagcctagatacttttacaccagcgcctag

SEQ ID NO: 211459 - DNA, 528 bp, Artificial Sequence
  derived and/or modified sequence
atgatccgctgtggcctggcctgtgagcgctgccgctggatcctgcccctgctgctgctgagtgaccacggccagaccagcagcctgtggtggaagtgcagccaggagggcggcggcagcggcagctatgaggagggctgccagagcctgatggagtatgcctggggccgggctgctgctgccatgctgttctgtggcttcatcatcctggtgatctgcttcatcctgtccttctttgccctgtgtggcccccagatgctggtgttcctgcgggtgattggaggcctgctggccctggccgctgtgttccagatcatcagcctggtgatctaccctgtgaagtacacccagaccttcaccctgcacgccaacccagctgtgacctacatctacaactgggcctacggcttcggctgggccgccaccatcatcctgattggctgtgccttcttcttctgctgcctgcccaactatgaagatgacctgctgggcaatgccaagccccgctacttctacaccagcgcctag

SEQ ID NO: 211460 - DNA, 582 bp, Artificial Sequence
  derived and/or modified sequence
atgatccgctgtggcctggcctgtgagcgctgccgctggatcctgcccctgctgctgctgagcgccatcgcctttgacatcatcgccctggccggccggggctggctgcagagcagtgaccacggccagaccagcagcctgtggtggaagtgcagccaggagggcggcggcagcggcagctatgaggagggctgccagagcctgatggagtatgcctggggccgggctgctgctgccatgctgttctgtggcttcatcatcctggtgatctgcttcatcctgtccttctttgccctgtgtggcccccagatgctggtgttcctgcgggtgattggaggcctgctggccctggccgctgtgttccagatcatcagcctggtgatctaccctgtgaagtacacccagaccttcaccctgcacgccaacccagctgtgacctacatctacaactgggcctacggcttcggctgggccgccaccatcatcctgattggctgtgccttcttcttctgctgcctgcccaactatgaagatgacctgctgggcaatgccaagccccgctacttctacaccagcgcctag

SEQ ID NO: 211461 - DNA, 528 bp, Artificial Sequence
  derived and/or modified sequence
atgatccggtgcggcctggcctgcgagcggtgccggtggatcctgcccctgttgcttttatccgaccacggacagacaagtagtctttggtggaaatgctcacaggaaggaggcggcagcggtagttatgaagagggctgccagtcattaatggaatatgcctgggggagagctgccgctgcaatgttattctgtgggttcattatcctggtgatatgtttcattttgtctttttttgccctctgcggacctcaaatgcttgtgttcctccgggtgataggcggcctccttgctctggccgccgtgtttcagatcataagtctcgttatttaccctgtgaagtatacacagaccttcaccctccacgccaacccagctgtcacatatatatacaattgggcatatgggttcggttgggccgccacgatcattttgattggttgcgcattctttttctgttgtttgccaaattatgaagacgacctcctggggaatgccaagccacgctatttctacacaagtgcctag

SEQ ID NO: 211462 - DNA, 582 bp, Artificial Sequence
  derived and/or modified sequence
atgatccggtgcggcctggcctgcgagcggtgccggtggatcctgccactgcttctccttagtgccattgcattcgacattattgctttggcaggacgcggatggctccaaagctctgatcacgggcagacatcatcgctgtggtggaagtgttctcaagaaggcggaggtagcgggagttacgaagaaggctgccagtcactgatggagtatgcctggggccgggctgccgccgccatgctattttgtgggttcatcattctggtcatatgtttcattctgtccttcttcgctctctgcggccctcagatgctcgtgtttctgcgggtcattggaggtttacttgcgctagcagctgtctttcagatcatttcactggtaatttatcccgtcaaatacacccagacttttacactccacgcgaatcccgctgtgacttacatctacaattgggcctatggcttcggctgggctgccactatcattttaatcggctgtgccttcttcttttgttgtctacctaactacgaagatgatttgctgggtaatgcaaagcccagatatttttatacctccgcctag

SEQ ID NO: 211463 - DNA, 1860 bp, Artificial Sequence
  derived and/or modified sequence
actctctgctgtcgcccgtcccgcgcgctcctccgacccgctccgctccgctccgctcggccccgcgccgcccgtcaacatgatccgctgcggcctggcctgcgagcgctgccgctggatcctgcccctgctcctactcagcgaccacggccagacgtcctcgctgtggtggaaatgctcccaagagggcggcggcagcgggtcctacgaggagggctgtcagagcctcatggagtacgcgtggggtagagcagcggctgccatgctcttctgtggcttcatcatcctggtgatctgtttcatcctctccttcttcgccctctgtggaccccagatgcttgtcttcctgagagtgattggaggtctccttgccttggctgctgtgttccagatcatctccctggtaatttaccccgtgaagtacacccagaccttcacccttcatgccaaccctgctgtcacttacatctataactgggcctacggctttgggtgggcagccacgattatcctgattggctgtgccttcttcttctgctgcctccccaactacgaagatgaccttctgggcaatgccaagcccaggtacttctacacatctgcctaacttgggaatgaatgtgggagaaaatcgctgctgctgagatggactccagaagaagaaactgtttctccaggcgactttgaacccattttttggcagtgttcatattattaaactagtcaaaaatgctaaaataatttgggagaaaatattttttaagtagtgttatagtttcatgtttatcttttattatgttttgtgaagttgtgtcttttcactaattacctatactatgccaatatttccttatatctatccataacatttatactacatttgtaagagaatatgcacgtgaaacttaacactttataaggtaaaaatgaggtttccaagatttaataatctgatcaagttcttgttatttccaaatagaatggactcggtctgttaagggctaaggagaagaggaagataaggttaaaagttgttaatgaccaaacattctaaaagaaatgcaaaaaaaaagtttattttcaagccttcgaactatttaaggaaagcaaaatcatttcctaaatgcatatcatttgtgagaatttctcattaatatcctgaatcattcattttagctaaggcttcatgttgactcgatatgtcatctaggaaagtactatttcatggtccaaacctgttgccatagttggtaaggctttcctttaagtgtgaaatatttagatgaaattttctcttttaaagttctttatagggttagggtgtgggaaaatgctatattaataaatctgtagtgttttgtgtttatatgttcagaaccagagtagactggattgaaagatggactgggtctaatttatcatgactgatagatctggttaagttgtgtagtaaagcattaggagggtcattcttgtcacaaaagtgccactaaaacagcctcaggagaataaatgacttgcttttctaaatctcaggtttatctgggctctatcatatagacaggcttctgatagtttgcaactgtaagcagaaacctacatatagttaaaatcctggtctttcttggtaaacagattttaaatgtctgatataaaacatgccacaggagaattcggggatttgagtttctctgaatagcatatatatgatgcatcggataggtcattatgattttttaccatttcgacttacataatgaaaaccaattcattttaaatatcagattattattttgtaagttgtggaaaaagctaattgtagttttcattatgaagttttcccaataaaccaggtattct

SEQ ID NO: 211464 - DNA, 2009 bp, Artificial Sequence
  derived and/or modified sequence
ggaatctaggtggggccgcccggagcggcgtcctcgggagccgcctccccgcggcctcttcgcttttgtggcggcgcccgcgctcgcaggccactctctgctgtcgcccgtcccgcgcgctcctccgacccgctccgctccgctccgctcggccccgcgccgcccgtcaacatgatccgctgcggcctggcctgcgagcgctgccgctggatcctgcccctgctcctactcagcgccatcgccttcgacatcatcgcgctggccggccgcggctggttgcagtctagcgaccacggccagacgtcctcgctgtggtggaaatgctcccaagagggcggcggcagcgggtcctacgaggagggctgtcagagcctcatggagtacgcgtggggtagagcagcggctgccatgctcttctgtggcttcatcatcctggtgatctgtttcatcctctccttcttcgccctctgtggaccccagatgcttgtcttcctgagagtgattggaggtctccttgccttggctgctgtgttccagatcatctccctggtaatttaccccgtgaagtacacccagaccttcacccttcatgccaaccctgctgtcacttacatctataactgggcctacggctttgggtgggcagccacgattatcctgattggctgtgccttcttcttctgctgcctccccaactacgaagatgaccttctgggcaatgccaagcccaggtacttctacacatctgcctaacttgggaatgaatgtgggagaaaatcgctgctgctgagatggactccagaagaagaaactgtttctccaggcgactttgaacccattttttggcagtgttcatattattaaactagtcaaaaatgctaaaataatttgggagaaaatattttttaagtagtgttatagtttcatgtttatcttttattatgttttgtgaagttgtgtcttttcactaattacctatactatgccaatatttccttatatctatccataacatttatactacatttgtaagagaatatgcacgtgaaacttaacactttataaggtaaaaatgaggtttccaagatttaataatctgatcaagttcttgttatttccaaatagaatggactcggtctgttaagggctaaggagaagaggaagataaggttaaaagttgttaatgaccaaacattctaaaagaaatgcaaaaaaaaagtttattttcaagccttcgaactatttaaggaaagcaaaatcatttcctaaatgcatatcatttgtgagaatttctcattaatatcctgaatcattcattttagctaaggcttcatgttgactcgatatgtcatctaggaaagtactatttcatggtccaaacctgttgccatagttggtaaggctttcctttaagtgtgaaatatttagatgaaattttctcttttaaagttctttatagggttagggtgtgggaaaatgctatattaataaatctgtagtgttttgtgtttatatgttcagaaccagagtagactggattgaaagatggactgggtctaatttatcatgactgatagatctggttaagttgtgtagtaaagcattaggagggtcattcttgtcacaaaagtgccactaaaacagcctcaggagaataaatgacttgcttttctaaatctcaggtttatctgggctctatcatatagacaggcttctgatagtttgcaactgtaagcagaaacctacatatagttaaaatcctggtctttcttggtaaacagattttaaatgtctgatataaaacatgccacaggagaattcggggatttgagtttctctgaatagcatatatatgatgcatcggataggtcattatgattttttaccatttcgacttacataatgaaaaccaattcattttaaatatcagattattattttgtaagttgtggaaaaagctaattgtagttttcattatgaagttttcccaataaaccaggtattctaaa

SEQ ID NO: 211465 - DNA, 528 bp, Artificial Sequence
  derived and/or modified sequence
atgattcgctgcggcttagcatgtgaaagatgccgatggatcctgccgctcctgctcctatccgaccatgggcagacgagctccttgtggtggaagtgctcccaggagggaggagggagtgggtcctatgaggagggatgccaatcactgatggaatatgcatggggaagagcggcagctgccatgctcttttgtggttttatcatcctggtcatatgctttatcctgtcctttttcgctctttgtgggccacaaatgttggtcttcctaagagttattgggggtctcctggccttggccgctgtatttcagatcatttctctggtaatatacccagtgaagtatacacagacatttactctgcacgcaaacccggctgttacatacatctacaattgggcctatggttttggatgggcggcaactataattctgattggctgcgccttttttttttgttgcctccccaactatgaagatgacctgcttggtaacgcaaagcccagatatttctacacctctgcctag

SEQ ID NO: 211466 - DNA, 582 bp, Artificial Sequence
  derived and/or modified sequence
atgatcaggtgcggacttgcctgcgaacgttgcagatggatcctcccactcctgttgctgtcagccattgctttcgacatcatcgccctggcagggaggggatggctccaaagcagtgatcacggtcaaacctcttccctgtggtggaagtgcagccaggagggaggcggttctggatcctatgaggagggttgtcagagtttaatggagtatgcgtggggtcgggctgcagccgctatgctcttttgcgggtttatcatcctcgtgatctgttttatcctttccttttttgccctctgtggtccccaaatgcttgtatttctgcgagtgattggagggctgctcgccctggccgctgtcttccagataatttcattggtgatctaccccgttaagtatactcagactttcacgctccacgctaatcctgcagttacatacatctataattgggcttacggatttgggtgggccgcaactattatcctcatcggctgcgccttcttcttctgttgtcttcccaactatgaagacgatctgctcggaaatgcaaagccccgttacttttacacttccgcatag

SEQ ID NO: 211467 - DNA, 591 bp, Artificial Sequence
  derived and/or modified sequence
atgatcagatgcggcctggcctgcgagagatgcagatggatcctgaccctgctgctgctgagcgccatcgccttcgacatcatcgccctggccggcagaggctggctgcagagcagcgacagagtgcagaccagcagcctgtggtggagatgcttcctgccccagggcagaagaagaagacagagagtgctgagaggcagactgccccagccccacggcgtgagagtgggcagcagcagcgccgccatgctgttctggggcgtgagcatcctggtgatctgcttcatcctgagcttcttcgtgctgtgcgtgccccagatcctggtgttcctgagagtgatcggcggcctgctggccctggccgccgtgttccagatcatcagcctggtgatctaccccgtgaagtacacccagcccagcaccttcatgcccagccccgccgtgaccagcatctacaactgggcctgcggcttcggctgggccgccatgatcatcctgatcggctgcgccttcttctgctgctgcctgcccagctgcgaggacgacctgctgggcaacaccaagcccagatacttctacaccagcgcctag

SEQ ID NO: 211468 - DNA, 591 bp, Artificial Sequence
  derived and/or modified sequence
atgatcagatgtggactcgcctgcgaacgatgccggtggatattgacattgctcctcctcagcgccatcgcattcgatatcattgcactcgcaggccgcgggtggctgcaatcgagcgacagggtccagacttcatcactatggtggagatgctttctgccccaagggcggagacgaaggcagagagttttacgtggcaggctgccccagcctcacggcgtgcgcgttgggtccagtagcgctgctatgctgttctggggagtttccatcctggtaatttgtttcatcctgtcgtttttcgtactctgtgtcccacaaattctggtattcctccgggtgattgggggcctgcttgccctggccgcagtctttcagataatcagcctagtaatctatcccgtcaaatacacccagccctcaacatttatgcctagcccggctgtgacctcaatctataactgggcttgcgggtttggctgggcagctatgatcattctgatcggctgtgctttcttttgttgctgcctgcccagctgcgaggacgatctcctaggaaataccaagccaaggtacttctatactagtgcatag

SEQ ID NO: 211469 - DNA, 591 bp, Artificial Sequence
  derived and/or modified sequence
atgatccgctgtggcctggcctgtgagcgctgccgctggatcctgaccctgctgctgctgagcgccatcgcctttgacatcatcgccctggccggccggggctggctgcagagcagtgacagagtgcagaccagcagcctgtggtggcgctgcttcctgccccagggcagaagaagacggcagagggtgctgcggggccgcctgccccagccccacggcgtgcgggtgggcagcagcagcgctgccatgctgttctggggcgtgtccatcctggtgatctgcttcatcctgtccttctttgtgctgtgtgtgccccagatcctggtgttcctgcgggtcatcggcggcctgctggccctggccgctgtgttccagatcatcagcctggtgatctaccctgtgaagtacacccagcccagcaccttcatgcccagccctgctgtgaccagcatctacaactgggcctgtggcttcggctgggccgccatgatcatcctgattggctgtgccttcttctgctgctgcctgcccagctgtgaagatgacctgctgggcaacaccaagccccgctacttctacaccagcgcctag

SEQ ID NO: 211470 - DNA, 591 bp, Artificial Sequence
  derived and/or modified sequence
atgatccggtgcggcctggcctgcgagcggtgccggtggatcctgaccctgctcctgctgtctgctatcgcatttgacattatcgcacttgccgggagggggtggctccaatcttctgatcgcgtccagaccagctctctatggtggagatgtttcctgccccagggtcgtcgtcggaggcagcgggtcctgcgtgggcgcttgccccagccgcatggtgtgcgggtcggaagctcttccgcagctatgctcttctggggggtgtcaatcctggtgatatgttttatcctgtcttttttcgtcttgtgcgtgcctcagatcctggtgtttctcagagtaatcggtggactactggccctggccgccgtattccagataatcagcttggtaatatatccggtaaagtatacgcagcctagcacgtttatgccttcccccgctgtgaccagcatctataactgggcatgtggctttggctgggctgccatgattattctgataggatgtgccttcttctgctgttgcttaccaagttgcgaggacgacctactgggtaacaccaagcctcgctatttctataccagtgcctag

SEQ ID NO: 211471 - DNA, 591 bp, Artificial Sequence
  derived and/or modified sequence
atgatcagatgtggtcttgcatgcgagagatgtcgctggattctgacgctcctgctcctgagtgccatagcttttgacattatcgcactcgccggaaggggctggttgcagagctctgacagagtgcagacttccagcctgtggtggaggtgcttcctacctcagggacgtcgaaggcgccagcgggtgttgcggggaaggttgccccagcctcacggagtaagagtcgggagcagtagtgctgcgatgctgttttggggagtgtcaattcttgtcatttgctttatactgagctttttcgtcctatgcgtgccacagattctagttttcttgcgtgtgatcggcggactcttggcactggccgctgtgtttcaaattattagcttggtaatctaccccgtcaagtacacccagccttctaccttcatgcctagccctgctgtaaccagtatctacaactgggcctgtgggttcggctgggccgctatgatcatcctcattgggtgcgcttttttttgctgttgcttgccatcatgtgaggacgatctcctgggcaacaccaagcctcggtacttctacacaagtgcctag

SEQ ID NO: 211472 - DNA, 2576 bp, Artificial Sequence
  derived and/or modified sequence
atacgagaattagcgactcccagccgccgcccgggcccgcgcgctcctccgccgcgctccgctcggctcctctcgaccccacaccgccggtcgacatgatccgctgcggcctggcctgcgagcgctgccgctggatcctgaccctgctcctactcagcgccatcgccttcgacatcatcgcgctggccggccgcggctggctgcagtcgagcgaccgcgtccagacgtcctcgctgtggtggagatgtttccttccacaggggcggcggcggcggcagcgggtcctaagaggacggctgccacagcctcatggagtacgcgtggggtcgagcagcgctgccatgcttttctggggcgtcagcatcctggtgatctgtttcatcctctccttcttcgtcctgtgtgtaccccagatacttgtcttcctaagagtgattggaggtctccttgccttggctgctgtgttccagatcatctccctggtaatttaccccgtgaagtacactcaaccttcaaccttcatgccaagccccgctgtcacttccatctataactgggcctgcggctttgggtgggcagccatgattatcctcattggctgtgctttcttctgctgctgcctccccagctgcgaagatgacctcctgggcaataccaagcccaggtacttctacacatccgcctaacttgggaatgagtgtgggagaaaatcgccactgccaagatggactccagaagaagaaactgtttctctaggctacttcgaacttattttttggcagtgttcatattctcaaactagtcaaaaatgctaaaataatttgggagaaaatatttttaaagtagtgttatagtttcatgttcatcttttattatgttttgtgaagttgtgtcttttcactaattacctatactatgccaatatttccttatatctacccataacatttatgctatgtttgtaagagaatatgaacatgaaacttaacactttataaggtaaaaatgagatggtttccaagatttaataattggatcaagttcttgttatttccaaatagaatggacttggtctgttaagggctaaggagaagaggaaggtaatggtaaaaattgtcaatgactggccgggtgtggtggctcacgcttgtaatctcagcactttgggaggccgaggcaggccaatcacctgaggtcacaagttcaagaccagcctggcaaacatggtgaaacgccgtctctactgaaaatacaaaaattagccaggcttggtggcacatgcctgtagtcccagctactggggaggctgaggcaggagaatcgcttgaaccagagaggtggaggttgcagtgaaccgagattgtgccattgcactacagcctggtcaacagagcaagactctgtctcaaaacaaacaaaaattgtcaatgaccaaacattctaaaagaaatgccaaaaaaaaagctttttttttcaagccttcaaactatttaaggaagcaaaatagtttcctaaatgcatattgtttgtgagaatttctcattaatatcctgaataattctttttttttttttgagacggagtctcactctgtctcccaggctggagtgtgatggcgtgatctcggctcactgcaagctctgcctctcgggttcacgctatcctcccgcctcagcctcccgagtagctgggactacaggcgtccaccaccacgcccggctaattttttgtatttttagtagagacagggttttaccgtgttagccatgatggtctcgatctcctgacctcgtgatctgcccacctcagcctcccaaagtgccgggattacaggcgtgagccaccgcgcccagccctgaataattcattcttgctaagcttcatgttgactctatatatcatctaagaaagtattgttttgtggtccaaacctgttgccgtggttagtaaggctttcttaggtgtgaaatatttagatgaaattttctcttttaaagttctgtatagggttagggtgttggaaaatgctatattaataaatctgtagtgttttgtgtttataggttcagaaccagagtaactggattgaaagatggactgatagattagatatatcagtctaatttatcatgactgatagatctggttaagttgtgtactaaaggattaggagagcccttcctgtcacaaaagtgccactaaaacagcctaaggagaaaaatggcttgcttttctaaacttcagatgtatctgggctctaatcatatagacaggcttctgatagattgcaactgtaagtagaaacctacatatagttaaaatcctggtctttcttggtaaacagatttaaaatgtctgatgtaaaacatgccacaggagaattcagggatttgagtttccctgaatagcatatatatgatgcatcaaatgggttattactattttttaccatttccacttacataatgaaaaacaattcattttaaatatcacattattattttgtaagtcatggaaaagggcaattgaagttttcattatgaagttttcccaataaaccaggaattctaaacttg

SEQ ID NO: 211473 - protein, 901 aa, Artificial Sequence
  derived and/or modified sequence
MAPTKPSFQQDPSRRERLQALRKEKSRDAARSRRGKENFEFYELAKLLPLPAAITSQLDKASIIRLTISYLKMRDFANQGDPPWNLRMEGPPPNTSVKGAQRRRSPSALAIEVFEAHLGSHILQSLDGFVFALNQEGKFLYISETVSIYLGLSQVELTGSSVFDYVHPGDHVEMAEQLGMKLPPGRGLLSQGTAEDGASSASSSSQSETPEPVESTSPSLLTTDNTLERSFFIRMKSTLTKRGVHIKSSGYKVIHITGRLRLRVSLSHGRTVPSQIMGLVVVAHALPPPTINEVRIDCHMFVTRVNMDLNIIYCENRISDYMDLTPVDIVGKRCYHFIHAEDVEGIRHSHLDLLNKGQCVTKYYRWMQKNGGYIWIQSSATIAINAKNANEKNIIWVNYLLSNPEYKDTPMDIAQLPHLPEKTSESSETSDSESDSKDTSGITEDNENSKSDEKGNQSENSEDPEPDRKKSGNACDNDMNCNDDGHSSSNPDSRDSDDSFEHSDFENPKAGEDGFGALGAMQIKVERYVESESDLRLQNCESLTSDSAKDSDSAGEAGAQASSKHQKRKKRRKRQKGGSASRRRLSSASSPGGLDAGLVEPPRLLSSPNSASVLKIKTEISEPINFDNDSSIWNYPPNREISRNESPYSMTKPPSSEHFPSPQGGGGGGGGGGGLHVAIPDSVLTPPGADGAAARKTQFGASATAALAPVASDPLSPPLSASPRDKHPGNGGGGGGGGGGAGGGGPSASNSLLYTGDLEALQRLQAGNVVLPLVHRVTGTLAATSTAAQRVYTTGTIRYAPAEVTLAMQSNLLPNAHAVNFVDVNSPGFGLDPKTPMEMLYHHVHRLNMSGPFGGAVSAASLTQMPAGNVFTTAEGLFSTLPFPVYSNGIHAAQTLERKED

SEQ ID NO: 211474 - DNA, 2706 bp, Artificial Sequence
  derived and/or modified sequence
atggcgcctaccaagccctctttccagcaggacccgagtagacgcgaacggctacaggcgctccgcaaggaaaagagtagagacgcggccagatcccggcgcggtaaggagaattttgagttctacgagctagctaaattgctccctctccccgccgcaatcacttctcagctagacaaggcatcaattatccggctgactatctcatatctcaaaatgcgagactttgcaaatcagggcgatcctccttggaatctccggatggagggccccccgcccaacacaagcgtgaagggtgcccagagaagacgttctccatctgccctagccatcgaggtgttcgaggctcacttgggctcccacatccttcaatccttggacgggtttgtgtttgcactgaatcaagaaggcaagttcctctatatctccgagacggttagtatctacttgggactcagccaagtcgagctaaccggctcatccgttttcgattatgttcaccctggggatcacgtggagatggccgaacagctcgggatgaagcttccacctggacggggcctcttgtcgcagggcactgccgaggacggcgcttcaagtgcatcttctagcagtcagagcgagacacccgaacctgtggagtccacgtctcctagcctgttgactacggataacaccctggaacgtagttttttcattcggatgaagagcacccttacaaaaaggggggtacatattaaatctagtggctacaaggttattcacatcaccggtagactccgcctccgggttagtttatctcacggccgcacagtgccaagccagatcatgggactggttgtggtggcccatgccctgcccccccccacgataaacgaggtcagaattgactgccacatgttcgttacacgtgttaacatggatctgaacattatttattgcgagaataggatcagcgactatatggatctcaccccggtggatatcgtggggaaacgctgctaccactttattcacgccgaagacgtggagggaattcgccactcgcatcttgatctgctgaataagggacaatgtgtgaccaaatactatcgttggatgcaaaaaaacggaggttatatttggattcagtcctcagctaccatcgcaataaatgctaagaacgccaacgagaagaatattatctgggtcaattatttgctgtctaatccggaatacaaagacacgccaatggatatcgcacaactgccccaccttcccgagaagacttccgagagctcggagacttctgacagcgagagtgattctaaggacacgtcaggaatcaccgaggataatgaaaactcaaagtcagacgagaaaggtaaccaatcggaaaactctgaggatccagaacccgacaggaaaaagagcggcaacgcgtgtgacaatgatatgaattgtaacgatgacggccacagcagctcaaatcctgattcccgggattcagatgattcctttgagcactctgactttgagaaccctaaggcgggcgaggacggctttggtgccctgggagcgatgcagatcaaggttgaacggtacgtcgaaagcgagagtgacttacgcttacagaactgcgaaagccttacttctgactccgctaaagactcagacagcgcgggcgaggccggggcacaagccagctctaaacatcagaaacgcaaaaagaggcggaaaagacaaaagggcggaagtgccagccgtcgtagactatcgagcgctagttcaccggggggcctcgatgctggtcttgtggaacctccaagactccttagcagcccaaactctgcgtccgtgctgaaaattaaaactgagatctcggagccaatcaatttcgacaatgatagttctatttggaattatcctcctaatagggaaatatcacggaatgaaagtccctactctatgacaaaaccaccatccagcgagcacttccccagcccacaagggggcggaggcgggggagggggtggggggggccttcatgttgctattccggatagtgtgctcactcctccaggagccgatggcgccgctgcgcgcaagacgcaatttggggcaagcgcaaccgctgccctggcacccgtggccagtgaccccctctcccctcctctctcagcctccccacgggataagcaccccggaaatgggggaggaggaggtgggggcggcgggggggctggaggcggtggcccctcagccagtaactctctgctttacactggcgacttagaggccttgcaaaggttgcaggctggcaacgtggtgttacccctggtgcatcgggttacgggtacgctggctgccacatcaacagccgctcagagggtctacaccaccggaactatcaggtacgccccagccgaggttaccctcgccatgcagtccaaccttctgccaaacgctcatgctgtgaatttcgtggacgtcaatagccccgggttcggcctcgaccctaaaacgccaatggagatgctgtatcaccacgtgcataggctgaatatgagtggaccctttggtggcgccgtgtcggctgcatctttgacccaaatgcctgccggaaatgttttcacaaccgcagaaggattgtttagtactctcccttttcccgtgtactcaaacggcatccacgcggctcagacactcgaacggaaagaagattag

SEQ ID NO: 211475 - DNA, 462 bp, Artificial Sequence
  derived and/or modified sequence
atgagagactttgcaaaccagggcgatcctccttggaatctgcgtatggaggggccgccgcctaatacatctgtgaagggcgcacaaagacgccggtctccctctgctcttgccattgaggtgttcgaggcacacctgggatcccacatccttcagagtttagacggtttcgtgtttgcactgaaccaggaaggaaagttcctgtacatctctgaaacagttagcatctatctggggctgtcacaggtagaactcaccggaagtagcgtcttcgactatgtgcatcctggcgatcacgtggaaatggctgaacaactgggcatgaagctgccccctggcagaggtctactgagtcaaggaacagccgaggacggcgccagctccgcttcctctagttcccagtccgagacccctgagccagtggtgtgctttccaccagccagcgaccagtttctgctgtag

SEQ ID NO: 211476 - DNA, 2706 bp, Artificial Sequence
  derived and/or modified sequence
atggcccccaccaagcccagcttccagcaggaccccagccggcgggagcggctgcaggccctgaggaaggagaagagcagagatgctgcccggagcagaagaggcaaggaaaattttgagttctatgagctggccaagctgctgcccctgcctgctgccatcaccagccagctggacaaggccagcatcatccggctgaccatctcctacctgaagatgagggactttgccaaccagggcgaccccccctggaacctgaggatggagggccccccacccaacacctctgtgaagggggcccagaggagaagaagccccagcgccctggccatcgaggtgtttgaggcccacctgggcagccacatcctgcagagcctggatggctttgtgtttgccctgaaccaggagggcaagttcctgtacatcagcgagaccgtgtccatctacctgggcctgagccaggtggagctgaccggcagctctgtgtttgattatgtgcaccctggggaccacgtggagatggccgagcagctgggcatgaagctgcccccaggccggggcctgctgagccagggcacagcagaagatggagccagcagcgccagcagcagcagccagagcgagaccccagagcctgtggagagcaccagccccagcctgctgaccacagacaacaccctggagaggagcttcttcatccgcatgaagagcaccctgaccaagaggggcgtgcacatcaagagcagcggctacaaggtgatccacatcaccggccgcctgcggctgcgggtgtccctgagccacggccgcacagtgcccagccagatcatgggcctggtggtggtggcccacgccctgcccccacccaccatcaatgaggtgagaattgactgccacatgtttgtgaccagggtgaacatggacctgaacatcatctactgtgaaaatcgcatcagtgactacatggacctgacccctgtggacatcgtgggcaagcgctgctaccacttcatccacgcagaagatgtggagggcatccgccacagccacctggacctgctgaacaagggccagtgtgtgaccaagtactaccgctggatgcagaagaatggaggctacatctggatccagagcagcgccaccatcgccatcaatgccaagaatgccaatgagaagaacatcatctgggtgaactacctgctgagcaaccctgagtacaaggacacccccatggacatcgcccagctgccccacctgcctgagaagaccagcgagagcagcgagaccagtgacagcgagagtgacagcaaggacaccagcggcatcacagaggacaatgaaaacagcaagagtgatgagaagggcaaccagagtgaaaattctgaggaccctgagccagacaggaagaagtctggaaatgcctgtgacaatgacatgaactgcaatgatgatggccacagcagcagcaacccagacagccgggacagtgatgacagctttgagcacagcgactttgagaaccccaaggccggggaggatggctttggagccctgggcgccatgcagatcaaggtggagcgctacgtggagagcgagagtgacctgcggctgcagaactgtgagagcctgaccagtgacagcgccaaggacagcgacagcgctggggaggccggggcccaggccagcagcaagcaccagaagaggaagaagaggaggaagaggcagaagggcggcagcgccagcagaagaaggctgagcagcgccagcagccctgggggcctggatgctggcctggtggagcccccccggctgctgagcagccccaacagcgcctctgtgctgaagatcaagacagagatcagcgagcccatcaactttgacaatgacagcagcatctggaactacccacccaaccgggagatcagcagaaatgaaagcccctacagcatgaccaagccacccagcagcgagcacttccccagcccccagggcggcggcggcggcggcggcggcggcggcggcctgcacgtggccatcccagacagcgtgctgaccccacctggagcagatggagctgctgccaggaagacccagtttggagccagcgccacagctgccctggcccctgtggccagtgaccccctgagcccccccctgagcgccagcccccgggacaagcaccctggaaatggaggcggcggcggcggcggcggcggcggggccggcggcggcggccccagcgccagcaacagcctgctgtacacaggagacctggaggccctgcagaggctgcaggccggaaatgtggtgctgcccctggtgcaccgggtgacaggcaccctggccgccaccagcacagctgcccagagggtgtacaccaccggcaccatccgctatgccccagctgaggtgaccctggccatgcagagcaacctgctgcccaatgcccatgctgtgaactttgtggatgtgaacagccctggcttcggcctggaccccaagacccccatggagatgctgtaccaccacgtgcaccggctgaacatgagcggcccctttggaggagctgtgtctgctgccagcctgacccagatgcctgctggaaatgtgttcaccacagctgagggcctcttcagcaccctgcccttccctgtgtacagcaatggcatccacgccgcccagaccctggagaggaaggaggactag

SEQ ID NO: 211477 - DNA, 462 bp, Artificial Sequence
  derived and/or modified sequence
atgagggactttgccaaccagggcgaccccccctggaacctgaggatggagggccccccacccaacacctctgtgaagggggcccagaggagaagaagccccagcgccctggccatcgaggtgtttgaggcccacctgggcagccacatcctgcagagcctggatggctttgtgtttgccctgaaccaggagggcaagttcctgtacatcagcgagaccgtgtccatctacctgggcctgagccaggtggagctgaccggcagctctgtgtttgattatgtgcaccctggggaccacgtggagatggccgagcagctgggcatgaagctgcccccaggccggggcctgctgagccagggcacagcagaagatggagccagcagcgccagcagcagcagccagagcgagaccccagagcctgtggtgtgcttccccccagccagtgaccagttcctgctgtag

SEQ ID NO: 211478 - DNA, 2706 bp, Artificial Sequence
  derived and/or modified sequence
atggcccccaccaagcccagcttccagcaggaccccagccggcgggaaaggttacaagccctgagaaaagagaagtcacgagacgcagctcgatccaggaggggcaaagaaaacttcgagttctatgagttagcgaagctgctgccactgcccgctgccattacaagtcagctggacaaggcgagcataattcgattgacgatttcatacttgaaaatgagggacttcgcaaaccaaggtgatccaccctggaacctccgaatggaggggccgccccctaacactagtgtgaaaggagcccaacgacgccggtcgccctccgccttagcaattgaagtattcgaggcacacctgggatcccatatccttcaatcactcgacggatttgtgtttgctctcaaccaagaagggaaattcttgtatatttctgagacagttagtatctacctcggactgagccaagtagagctgaccggctcatcagttttcgactacgttcaccctggggatcatgtcgaaatggctgagcagctgggcatgaaattaccaccaggacgcggcctgctaagtcagggcactgcagaagacggcgccagctcagcttcctcaagtagccagtccgagacccctgaacctgtggagagcactagcccaagccttttgacaactgacaataccctggagcggtctttcttcatccggatgaagtccactctgaccaagaggggggttcacatcaaatcttccggctacaaggttatccatatcaccggcaggctgcggctgcgcgtttccttgtcacatggccggacagtgccaagccagatcatgggactcgttgtcgtggcacacgccctcccaccaccaactatcaatgaagttcgaatcgattgccacatgttcgtcacacgggtcaatatggacctgaacattatctattgtgagaaccgcatctcggactatatggatctcaccccggttgatattgtgggtaaaagatgttatcactttatccatgccgaggatgtggagggcatcagacatagccacctggatttattaaataagggtcagtgtgtgactaaatactacaggtggatgcagaagaacggggggtatatctggatccagagctctgccactatagcaatcaatgcgaagaacgccaatgaaaaaaacattatttgggtcaattatttgctctctaaccccgaatataaggatacaccgatggacatagctcagcttccacatctgccagagaaaaccagtgagtccagtgaaaccagcgattccgaatctgattcaaaggacacatctggaataaccgaagacaatgagaactccaagtcagatgaaaaaggtaaccagtctgaaaatagtgaagaccctgaacctgaccgcaaaaaatcagggaatgcttgtgacaatgatatgaactgtaacgatgacggccatagcagtagcaatccggatagccgggatagtgatgattcgttcgaacacagtgacttcgaaaatccaaaggccggggaggacggttttggcgctttgggggcaatgcagattaaagtagaaaggtatgtcgagtcagagtccgatctcaggttgcagaattgcgagagcctgacctctgattccgccaaagactcggacagcgccggggaggccggagcgcaagcaagttcgaaacatcagaagaggaaaaagagaaggaagaggcagaagggcggttctgcgtctcgccgtcgcttgagttcagcatcaagcccgggtggcttggacgctggcctcgtggagcctccacgtctcctctcttcacctaattcagcttctgtgctgaaaattaagaccgagatcagtgagccaatcaacttcgataatgatagctctatttggaactatcccccaaacagagaaatttcacgtaacgaaagcccctactccatgacaaagcccccttcttctgaacactttccgtctccacagggcggtggaggagggggggggggaggcggtggcttgcatgtcgcaattcccgacagcgtgcttacccctcctggagctgatggggccgccgccagaaaaacacagtttggagccagtgctacagccgccctggctcccgtggccagcgacccgctgagtccacctttgtctgcaagtccacgggacaaacaccccgggaacggcggaggggggggaggaggaggagggggggctgggggggggggacctagtgcatctaactctttgctatacacaggggatctagaagccctccagcgtcttcaggctggaaacgtcgtcctgcctttggtccatcgcgtgactggaacacttgccgccactagcactgccgcgcagcgcgtatatacaactgggacgattaggtacgcccccgctgaagtcacactggcaatgcaatccaatttgctaccgaacgcgcacgcagtaaactttgtcgatgtcaacagccctggtttcgggctggaccccaagacaccaatggagatgctgtaccaccacgtccatcgcctgaacatgagcggtccgttcggcggcgccgtttctgcagcgagccttacacagatgccagctggcaacgtgtttactacagctgaaggccttttcagcactttgccgttccccgtctacagcaacggaatccacgccgctcagaccctggaaaggaaagaggattag

SEQ ID NO: 211479 - DNA, 462 bp, Artificial Sequence
  derived and/or modified sequence
atgcgggacttcgccaaccagggcgaccccccctggaacctgcggatggaagggccccccccaaacactagcgtgaaaggagcacagcgaagacggtcacccagtgctttagcaatagaagtgttcgaggcacaccttggaagccacatcctgcagtctctggatggctttgttttcgcactcaaccaagagggcaaattcctttacatcagtgaaaccgtctccatttacctcggattgtcgcaagtggagctcaccgggagctctgtctttgactatgttcatcctggggaccatgttgagatggcggagcaactgggcatgaaactccctcctggtaggggactcctatcccaaggaactgccgaggacggggcttcctctgcatcctcatcatcccagagcgagaccccagaaccagtggtttgcttcccacccgcatccgaccagttcttgctttag

SEQ ID NO: 211480 - DNA, 5847 bp, Artificial Sequence
  derived and/or modified sequence
ccgcccgcccacgccccccacccgggaggggggagagaggcaaaaagtaagagaggaaaaaaaatagcaggaagatggcgcccaccaagcccagctttcagcaggatccttccaggcgagaacgtttacaagcattgagaaaggagaaatcccgagatgctgctcgctcccgccggggaaaagaaaactttgagttctatgaattggccaagttgttgcctcttcctgcagccattaccagccagctcgacaaggcatccatcattcgacttacaattagctatctgaaaatgagggactttgctaaccagggggaccctccgtggaacttgcgaatggaaggccctccacctaacacatcagtaaaaggtgcacagcgaaggagaagccccagtgcactagccattgaagtatttgaagcacatttgggaagccacattttgcagtccctggatggctttgtatttgcactaaatcaggaaggaaaatttttgtacatttccgaaacagtctccatctacctaggcctctcacaagtggagctgacaggcagcagtgtctttgactatgtccaccccggagatcacgtggagatggctgagcagctgggcatgaagctcccccctgggcggggtctcctgtcacagggcactgctgaggacggagccagctcagcatcttcctcctctcagtcggagacccccgagccagtggagtcaaccagccccagtctgctaaccactgacaacactcttgagcgttcctttttcatccgaatgaaatctactctgaccaaacgcggtgtgcacatcaaatcatcaggatataaggtgattcacataacaggccggctacgcctgagagtgtcgctgtcccacgggaggaccgtccccagccaaatcatgggtctcgtggttgttgcgcatgccttgcctccccctacgatcaatgaagtcagaattgactgccatatgttcgtcactcgagtaaatatggacctcaatatcatttactgtgaaaataggattagtgattatatggatctgacccctgtagatatcgtagggaagagatgctaccacttcatccatgctgaagacgtggagggcatcaggcacagtcacttggacttgctgaataagggtcagtgtgtgacaaagtactatcgctggatgcagaagaacggaggatatatttggatacagtccagtgccaccatagctattaatgccaagaatgcaaatgaaaagaatatcatctgggtgaattaccttcttagcaatcctgagtacaaggacacacccatggacatcgcacagctcccccatctgccggagaaaacttccgaatcctcggagacatccgactctgagtcagactctaaagacacctcaggtattacagaggacaacgagaactccaagtccgacgagaaggggaaccagtccgagaacagcgaagacccggagcccgaccggaagaagtcgggcaacgcgtgtgacaacgacatgaactgcaacgacgacggccacagctccagtaacccggacagccgcgacagcgacgacagcttcgagcactcggactttgagaaccccaaggcgggcgaggacggcttcggtgctctgggcgcgatgcagatcaaggtggagcgctacgtggagagcgagtcggacctgcggctgcagaactgcgagtcactcacgtccgacagcgccaaggactcggacagcgcaggcgaggcgggcgcgcaggcctccagcaagcaccagaagcgcaagaaaaggcggaaacggcaaaagggcggcagcgccagccgccggcgcctgtccagcgcgtcgagcccaggcggcctggacgcgggcctggtggagcccccgcggctgctgtcctcccccaacagtgcctcggtgctcaagatcaagacggagatctcagaacccatcaatttcgacaatgacagcagcatctggaactacccgcccaaccgggagatctccaggaacgagtccccctacagcatgaccaagccccccagctctgagcacttcccgtccccgcagggcggcggcggtgggggtggcggtggcggggggctgcacgtggccattcccgactcggtcctcaccccgcccggcgccgacggcgcggccgcccgcaagactcagttcggcgcctcggccaccgcggccctggcccccgtcgcctccgacccgctgtcacccccgctctcggcgtccccgcgggacaagcaccccgggaacggcggcgggggcgggggcgggggcggcggcgcggggggcggcggccccagcgcgtccaactccttgctgtacactggggacctggaggcgctgcagaggttgcaggcgggcaacgtcgtgctcccgctggtgcacagggtgaccgggaccctggccgccaccagcacggccgcgcagagggtctacaccacgggcaccatccgctacgcgcccgccgaggtgaccctggccatgcagagcaacctgctgcccaacgcgcacgctgttaacttcgtggacgttaacagccccggctttggcctcgaccccaagacgcccatggagatgctctaccaccacgtgcaccggctcaacatgtcaggaccgttcggcggcgcagtgagcgcagctagcctgacgcagatgcccgccggcaacgtgttcaccacggccgagggactcttctccacgctgcccttccccgtctacagcaacggcatccacgcggcacagactctggagcgcaaggaggactgaggcgccgcccgtcctgggcccggccaggccccgcttggaggaggcatcgtcggcattttcgtttagacctttaattctagcactttgaattcgagcaggtcagcgtcttctctcgccacgacggtccccattccaccccctctttctttcacctgacttattctttcgtgtaaagatatgtttattttttgccttcagagggtcagacgaccagttgcctgccgttttgtcttcttctaaggtgtgtgttgggttgttttgctttcctttgcatctttattaagatgtctttcatgtgtatatgcctctgccatagaatactcagtcttgtggtcaagagagttctcaagtgacaaccattggggtttcttcataaagatcttgatatgatcaagatggaaagagacaagcataaacaatgtgccctgtttgactaagtcaaatgaaatagggtggtttttgtttctgttcctaattcctttaaaaaatagggggaatagtattttagaattttatgcagaatttaattctctttttacggttaagattttaagattttcttacttgcacataaaaataatttgggttcttaaacttaatttctggcctgtgactagaatgtttaaaaaaaaaaaagtcggactaaatgttaattactgaaacattaacttaatttctaaaaccatggtgctatcatttattaatctgtaatgtcttcatacaaaatgcagctcctgggctgggttttgggggaaaaaaaaaaaatgtgttctgtcctggtctggagtccgttgctgcagtctccttggttagttaagacaaagccctcattaacgtttgctgcaggacttaaaattttttacctcccaactaacaaacatagcctcacattaaatttaatgggtcagtaaagccccttttaaaggggctgctggaaaactcaatcaaactgatttgaggagcagtttaggtacatactgccttttgtttagctttttgttttccttactcagtctaactgaggctaattttgcaacttcaataacacttcggagtaaaagaaggaaaatatttaacatgtttttggtttttttcatttcttgcttaaaacaaaaaggaaggttgtatttggggggactggtttgatttgatggaatttctttccctttggttcttatttctgggttgaaaccaataagttttaaaactaaagaatgggttaataagcttcagacagataactgcaactgaaaactgcacattaagtaaaaaaaaaaaaaaagaaaaaaaaaagaaaaagaaaaagaaaaaaaatcctattttgtctttgttgccagaaatcagtgtggtgtcaaacactccaaatgactgtcaagtataaattcttcttccacttcatttttggcagctgtttgttaaggcatctaataacagatgtgagaactgtaatgtgtacaatgtgtatgtgtccttggctgtcagtcccattgcagtttcaatgtgtgtttctatatgcagtatatactaagctaatgtagttgttttgtcctttgtcttatctgtgctctatctctagtccggagtggtacagtcccattcctgcagtcctagtgaatcagtgattcttgggggttagtgggttttgtgtggtggccttcctctgtaatgtcaccctatgctgcttctactgtctgtgaatcttccgttttaccttttaaaattcctgctgttgctttgctggtgtatattctccctacctctcctctctttccctccctttcccatctccccctctccctcctcttcattccttccccatccccaaaatctctttcattctcagagataaaaagactcttaactagctcaaggttaatggagccatttttcccacaacggaattctgggtatgactctgtcttctggagtgcaacacaaagcactgaagaataatgctcagatatattaaataaattgatgccatatagcctcagttgttaacattcccagagtcccttgtgctctacctataagcagtgggtgcttttctttggtttcctttcaggttggctgatggagcaatatataaagcaattaccagtgagacagaaaattctttcaaaggtcaaccaacatttttaagaaacaaaatgggaggggataatggaatctagaattgtcatatatatttgtttacttgtgcaatgctaatatagtaactcggctgtcctttgaatatcactgtgttgagtagattcctctaggacctttgatttcatgagttgggcccaaaccgtggtggaataataacaaaaagaagttaaatgccacaaattttaatagtgagcttacttgaaggatttaagtaggtttaggaggtgaagaaggccgatggagaaatttacagattaattttggaagctctactctagctatcgaacaatcaaaggaatgcacctatcagctacaaagaacagctagacagctgttttttttcttttataaatgtttctgtgttgtgtcaaaatgatttctggtgatttaaactaacagataatcacagctgctgtctaaattcatagtgttgaaaattacaaaatgaaaaaaaaaaaaaaaacacttcattacctgtgaagactgtgtctgtgtttttaactatttcttgtacaaatatatgaaaacttttatgaggagactggtgccaagtagctgaataatggggaaagggatattctgttcgtaaaaatcttagcagtgttaccaactctacgatatatatataaaaaaataattaaaacgttacaaagcgacagctatggtacatttgttttgtgtgaagctaaccggacctaacttcctgagtgcctggcttattttgaaacattttttttcattgaccattgataatgctgcaaatcagaaatgtacatacttcatttacaacagggttctttttatacttttgtagattctcatacatgtcacatacatggttgtctttatgtaacttaattttttcatccgcaggtgccattttcataataaacttctcttggatttgttacta

SEQ ID NO: 211481 - DNA, 2531 bp, Artificial Sequence
  derived and/or modified sequence
gattttgtcacctgagactgctgttactctgaaaatgatagcattaacttgtctaattctgagaaagacatttgttagctaatgtagactattaatagagcaaacataaaactggttgggtattagcctagcaagtatctgaccagagcattatggcattacttagattacatagatattcagtaagatatttcaggtgtgatttctgcagtgaatacagtgtttacaccagaaaacaatgtcaggaatcctataatgtaatagggaatattattcaccatagtatattaaaagagaacggagccttgctgctgaaccaattttgatctcttcctttggtcttccttccttccttgtttctctctttcttattatttcataatgaaaaaaaagaatgctagactcaaatatttacagtgctttcagaattcaataaaatgcatacataaaaatgattttaatagtaccttgatactgaaaatattatctagctacttatcattgtggtctgatttttaaatttatttctcatcagacacaatacagagcaattcagagcaggtagaattctcctgtcagatgctcacacacaacttcagttgtgccagattctgccctcagcaatgtgagcaaacttcaaacagaaatgcacatgaatagttgaaggaaaatgctggatcccacctgttgcctcttctgggaagtaatatgtctataatgtttataaattttaataacccatacagcgctttatctttcaatattaaatttatattttcctaaagtttgacttctttgggcaatatattttattctctagtatcttagaaaatcaatctactaatgtatgtccattaataaataagtatgctcttatcaagcagttatcagcacatttataaaattacattgaaatcttcattttaaatatgatgttttcttcatctaactgaacgtgctgtgatctttattgagggctggaaacatatttgttgattctgacaaggtgaattgtattcgtgtttaccttctgctccccaagattataattgaaatgaatttttcaaaatagttccttttgatgaagatcccatactgatgaaagttaaatgaacagaagtattagtttgaaatagatacacgaatgtaagcccaacttataaattgattctagttgataatatcaagctacgcctgtaaaccttctgttaggtcttagaaacaataaatacacctcaatgcatggacaattgaaggaaaaaaaccttaacaagtaaaacacaatttttactcattggacttgagtttacaaaatgtaaggccagagttagagtttatggctttagtggacattttctggaactcattttactgtcactctctagttttgaaatagtttttggtagaattttggtgggaaaaaaggaaatacaaagaaagcagtatttgaatgatgacagagtcacatattctaaaccacacattctcactcctttgatttcagtttacaagcattgagaaaggagaaatcccgagatgctgctcgctcccgccggggaaaagaaaactttgagttctatgaattggccaagttgttgcctcttcctgcagccattaccagccagctcgacaaggcatccatcattcgacttacaattagctatctgaaaatgagggactttgctaaccagggggaccctccgtggaacttgcgaatggaaggccctccacctaacacatcagtaaaaggtgcacagcgaaggagaagccccagtgcactagccattgaagtatttgaagcacatttgggaagccacattttgcagtccctggatggctttgtatttgcactaaatcaggaaggaaaatttttgtacatttccgaaacagtctccatctacctaggcctctcacaagtggagctgacaggcagcagtgtctttgactatgtccaccccggagatcacgtggagatggctgagcagctgggcatgaagctcccccctgggcggggtctcctgtcacagggcactgctgaggacggagccagctcagcatcttcctcctctcagtcggagacccccgagccagtggtttgcttcccaccagcgagtgatcagtttcttctgtaggacccctgtcaggaagaacatgcctggatcctacttcagagagaactcagccagggcaaggggctcttgtggctttttgggtgggtgtgagttcatagaggggaaaatcaatactgtaccaggatttagacaatttagcaaaatgcatgaggcagtactttggatgatgaataactacagctgcatggctaacccattggttgtgtaaagtatgggttatcatgttttgtctaaattttcaggcaaaatctagcctgttttgtggcattaggatcatcattatagtagtatgatttttatgctattatacttacgctatgtcccgaatgtttttaaggccagcaaaatggaaacagtagagtacttgcctgaatgcaaataaacttcagtttcaactta

SEQ ID NO: 211482 - DNA, 2706 bp, Artificial Sequence
  derived and/or modified sequence
atggcccctaccaagcccagctttcagcaagatcctagtcggagagagcgcctacaagccctgcgcaaagaaaagagcagagacgccgctcggagtcggcgtgggaaggagaacttcgagttctatgaactcgctaagctgctgcccctgcccgctgcaattacctcccaactcgacaaggcgtctatcattaggctgactattagttatctcaagatgcgggattttgcaaatcagggagatcccccatggaatttgcggatggaggggcctccacccaacacatctgtcaagggagcccagagacggcgaagtccctccgccctcgcaatagaggtcttcgaagcacacctgggctcccatattcttcaatctctagacggctttgtattcgcgttgaaccaggaaggcaaatttctgtacatcagtgaaactgtgagtatctaccttggactgagtcaagtagaactcaccgggtcaagtgtattcgactacgtccacccaggcgaccatgtggaaatggcagagcagctaggtatgaaactgcccccaggcaggggactgctgtcacaggggaccgccgaggatggcgcaagttctgcctcttcctccagccaaagcgaaaccccggagcccgtagagtctacctcccccagcctgcttacaacagacaatacactggagagatcattctttattcgaatgaaatctacactgaccaagcgcggagtgcacattaaatcctctgggtacaaagtcattcacattacgggaagactccggctgcgggttagcctgtcccacggacggaccgtcccttcgcagataatgggactcgtggtggttgcacatgcgttgcctccgccaacgatcaacgaagtccgcatagactgtcatatgttcgtcacaagagtgaacatggacctcaacattatctattgcgaaaaccgcatcagtgactacatggacctgacccctgtggatatagtgggtaaacgatgttatcatttcatccatgctgaagacgtcgaggggatcaggcactcacacttggacctgctgaataagggacagtgcgtcacaaaatactatcgttggatgcaaaagaacggcggatatatctggattcagtcttcagccacaatcgctatcaacgctaaaaacgccaacgaaaagaacatcatatgggtgaactaccttttatcaaacccagagtacaaggacacaccgatggatatcgctcagcttccgcatctgcccgagaagacaagcgagtcctctgagacctctgattcagaatcagattctaaggacacctcaggaattactgaagataatgaaaattccaagtcagatgaaaaaggcaatcagagcgagaatagcgaggaccccgagccagatagaaaaaagtccggtaatgcctgcgacaacgatatgaactgtaatgatgacggccactcaagttcaaaccctgattccagggactcagatgattcttttgagcattcagatttcgagaatcctaaagctggggaggacggcttcggggcactcggcgctatgcagataaaagtcgagaggtatgtggagtccgagagtgatcttaggctgcaaaattgtgaatctctaacttccgacagcgcgaaggattcagactcagcaggcgaagcgggtgcacaggcaagctccaaacatcagaaaagaaagaaacgacgcaaacgacagaaaggcggttccgccagcagacgtcggctgagctccgccagtagtccgggagggctcgacgcaggcctggtggagccgccaaggttgttgtcttcacccaattcggcgtcagtactcaagattaaaactgaaatttctgagcccattaatttcgacaatgacagtagtatctggaactatcccccaaatcgagaaatcagccgcaacgaaagcccttattcgatgacaaaaccacccagcagcgagcactttcctagcccgcagggaggcggagggggagggggtggtggaggcggactgcacgtagccatccccgacagcgtattgactccgcctggggctgatggggcagcggctcggaagacccagtttggtgctagcgcgacggccgcactggcaccagtcgcctctgatccgctgtcaccccctctcagtgcctcccctagggacaaacatcctggcaatggaggagggggtggcggtgggggtggcggtgctggaggcggaggaccatctgcctccaatagcctgctgtacaccggcgacttagaggctctgcaacgactacaggctggaaacgtcgtgttacccttggtgcatcgcgtaacaggcactctggccgcaacatcaacagctgctcagcgggtttacacaacaggcacaataagatatgctccagccgaggtcactctagccatgcagtcaaatctgctgcccaacgctcacgctgtgaactttgtggatgtaaactctcccggatttggactggacccaaaaactcctatggagatgctttatcatcacgtgcaccggctcaatatgtccggcccatttggcggtgctgtatcagcggcttctcttacacagatgcctgccggtaacgttttcaccaccgcagagggcctgttctccactctccccttccccgtgtatagcaatggcatacatgcggcacagacactggagcggaaggaggactag

SEQ ID NO: 211483 - DNA, 462 bp, Artificial Sequence
  derived and/or modified sequence
atgagagacttcgccaaccagggcgacccaccttggaacttgcggatggagggtcccccaccaaatacctctgtcaaaggagcccagcggaggaggagcccctcggcactggccattgaagtgttcgaagcccacctcgggtcccacattctgcagtctctggatggctttgtgtttgccttgaaccaggagggaaagttcttgtacatttcagaaaccgtgagtatttatctgggactaagtcaggtggagctgaccggaagctcagtgttcgactacgttcaccccggagaccatgtcgagatggccgaacaacttggtatgaagctcccccctgggaggggtctgctgtcccagggaacggctgaagatggggcatcctcagcctcaagttcatcacaaagtgagacaccagaacctgtggtgtgttttcccccagccagcgaccaattcctcctgtag

SEQ ID NO: 211484 - DNA, 2706 bp, Artificial Sequence
  derived and/or modified sequence
atggcccccaccaagcccagcttccagcaggaccccagcagaagagagagactgcaggccctgagaaaggagaagagcagagacgccgccagaagcagaagaggcaaggagaacttcgagttctacgagctggccaagctgctgcccctgcccgccgccatcaccagccagctggacaaggccagcatcatcagactgaccatcagctacctgaagatgagagacttcgccaaccagggcgaccccccctggaacctgagaatggagggccccccccccaacaccagcgtgaagggcgcccagagaagaagaagccccagcgccctggccatcgaggtgttcgaggcccacctgggcagccacatcctgcagagcctggacggcttcgtgttcgccctgaaccaggagggcaagttcctgtacatcagcgagaccgtgagcatctacctgggcctgagccaggtggagctgaccggcagcagcgtgttcgactacgtgcaccccggcgaccacgtggagatggccgagcagctgggcatgaagctgccccccggcagaggcctgctgagccagggcaccgccgaggacggcgccagcagcgccagcagcagcagccagagcgagacccccgagcccgtggagagcaccagccccagcctgctgaccaccgacaacaccctggagagaagcttcttcatcagaatgaagagcaccctgaccaagagaggcgtgcacatcaagagcagcggctacaaggtgatccacatcaccggcagactgagactgagagtgagcctgagccacggcagaaccgtgcccagccagatcatgggcctggtggtggtggcccacgccctgcccccccccaccatcaacgaggtgagaatcgactgccacatgttcgtgaccagagtgaacatggacctgaacatcatctactgcgagaacagaatcagcgactacatggacctgacccccgtggacatcgtgggcaagagatgctaccacttcatccacgccgaggacgtggagggcatcagacacagccacctggacctgctgaacaagggccagtgcgtgaccaagtactacagatggatgcagaagaacggcggctacatctggatccagagcagcgccaccatcgccatcaacgccaagaacgccaacgagaagaacatcatctgggtgaactacctgctgagcaaccccgagtacaaggacacccccatggacatcgcccagctgccccacctgcccgagaagaccagcgagagcagcgagaccagcgacagcgagagcgacagcaaggacaccagcggcatcaccgaggacaacgagaacagcaagagcgacgagaagggcaaccagagcgagaacagcgaggaccccgagcccgacagaaagaagagcggcaacgcctgcgacaacgacatgaactgcaacgacgacggccacagcagcagcaaccccgacagcagagacagcgacgacagcttcgagcacagcgacttcgagaaccccaaggccggcgaggacggcttcggcgccctgggcgccatgcagatcaaggtggagagatacgtggagagcgagagcgacctgagactgcagaactgcgagagcctgaccagcgacagcgccaaggacagcgacagcgccggcgaggccggcgcccaggccagcagcaagcaccagaagagaaagaagagaagaaagagacagaagggcggcagcgccagcagaagaagactgagcagcgccagcagccccggcggcctggacgccggcctggtggagccccccagactgctgagcagccccaacagcgccagcgtgctgaagatcaagaccgagatcagcgagcccatcaacttcgacaacgacagcagcatctggaactacccccccaacagagagatcagcagaaacgagagcccctacagcatgaccaagccccccagcagcgagcacttccccagcccccagggcggcggcggcggcggcggcggcggcggcggcctgcacgtggccatccccgacagcgtgctgaccccccccggcgccgacggcgccgccgccagaaagacccagttcggcgccagcgccaccgccgccctggcccccgtggccagcgaccccctgagcccccccctgagcgccagccccagagacaagcaccccggcaacggcggcggcggcggcggcggcggcggcggcgccggcggcggcggccccagcgccagcaacagcctgctgtacaccggcgacctggaggccctgcagagactgcaggccggcaacgtggtgctgcccctggtgcacagagtgaccggcaccctggccgccaccagcaccgccgcccagagagtgtacaccaccggcaccatcagatacgcccccgccgaggtgaccctggccatgcagagcaacctgctgcccaacgcccacgccgtgaacttcgtggacgtgaacagccccggcttcggcctggaccccaagacccccatggagatgctgtaccaccacgtgcacagactgaacatgagcggccccttcggcggcgccgtgagcgccgccagcctgacccagatgcccgccggcaacgtgttcaccaccgccgagggcctgttcagcaccctgcccttccccgtgtacagcaacggcatccacgccgcccagaccctggagagaaaggaggactag

SEQ ID NO: 211485 - DNA, 462 bp, Artificial Sequence
  derived and/or modified sequence
atgagagacttcgccaaccagggcgaccccccctggaacctgagaatggagggccccccccccaacaccagcgtgaagggcgcccagagaagaagaagccccagcgccctggccatcgaggtgttcgaggcccacctgggcagccacatcctgcagagcctggacggcttcgtgttcgccctgaaccaggagggcaagttcctgtacatcagcgagaccgtgagcatctacctgggcctgagccaggtggagctgaccggcagcagcgtgttcgactacgtgcaccccggcgaccacgtggagatggccgagcagctgggcatgaagctgccccccggcagaggcctgctgagccagggcaccgccgaggacggcgccagcagcgccagcagcagcagccagagcgagacccccgagcccgtggtgtgcttcccccccgccagcgaccagttcctgctgtag

SEQ ID NO: 211486 - protein, 728 aa, Artificial Sequence
  derived and/or modified sequence
ATDNDAGTFGEVSYFFSDDPDRFSLDKDTGLIMLIARLDYELIQRFTLTIIARDGGGEETTGRVRINVLDVNDNVPTFQKDAYVGALRENEPSVTQLVRLRATDEDSPPNNQITYSIVSASAFGSYFDISLYEGYGVISVSRPLDYEQISNGLIYLTVMAMDAGNPPLNSTVPVTIEVFDENDNPPTFSKPAYFVSVVENIMAGATVLFLNATDLDRSREYGQESIIYSLEGSTQFRINARSGEITTTSLLDRETKSEYILIVRAVDGGVGHNQKTGIATVNITLLDINDNHPTWKDAPYYINLVEMTPPDSDVTTVVAVDPDLGENGTLVYSIQPPNKFYSLNSTTGKIRTTHAMLDRENPDPHEAELMRKIVVSVTDCGRPPLKATSSATVFVNLLDLNDNDPTFQNLPFVAEVLEGIPAGVSIYQVVAIDLDEGLNGLVSYRMPVGMPRMDFLINSSSGVVVTTTELDRERIAEYQLRVVASDAGTPTKSSTSTLTIHVLDVNDETPTFFPAVYNVSVSEDVPREFRVVWLNCTDNDVGLNAELSYFITGGNVDGKFSVGYRDAVVRTVVGLDRETTAAYMLILEAIDNGPVGKRHTGTATVFVTVLDVNDNRPIFLQSSYEASVPEDIPEGHSILQEDLASPCISPAPPRRAFQSSGEKETSQFPGKELRREPGPSKAQNRAAFTEPLAEAPLLGSKQAQEERAPLPREQAQQLQGSEGEKGGP

SEQ ID NO: 211487 - DNA, 3345 bp, Artificial Sequence
  derived and/or modified sequence
atggtgaaatcccccatgaatcgtgagctggttgccacatacgaagtgacactgtccgtcatcgataatgcttcagatctgcctgagcgctccgtctccgtcccaaatgctaaactcaccgtgaacgtgctggacgtgaatgacaatacacctcagtttaagcctttcgggatcacgtattacatggagcgcatactggaaggcgccacacccgggactacgcttattgccgtggccgccgtcgatccggataaaggtttgaatggcttggtgacatatactctgctggatctggtccctccagggtatgtgcagttggaagactcttccgccggtaaagttattgcgaatcgtacagtggattacgaagaggtccactggttaaattttactgttcgggcctcggataatggctctccgccccgcgctgctgaaattcccgtctacctcgaaatcgttgatattaacgataacaatccaatctttgaccagcctagttatcaggaggccgtctttgaggacgtgcccgtgggcacaattattctgactgtcacggcaactgatgccgattcagggaatttcgctctcatagaatactccctcggcgacggagaatcgaagttcgcgatcaatccaaccaccggcgatatctatgttctgagtagccttgaccgtgagaagaaagatcactacattctcacagcactcgccaaagataatcccggtgatgttgcttccaacaggcgcgaaaactccgtgcaagttgtcatccaggtgctcgacgttaatgactgtaggccacaattctccaagcctcagtttagcacaagtgtctacgagaatgagcccgccggcacttccgtgattacgatgatggccactgatcaggatgagggccccaacggagaattaacctacagtttggaggggcccggagtcgaggcgttccatgtagatatggacagcggtctggtcaccactcagagacccttacaaagttatgaaaaattttcacttacagtggtcgcaactgacgggggggagccaccactctggggcacaactatgctccttgtagaggtaattgacgtgaacgacaaccgtccagtgttcgtacggccacctaatgggacgattctgcacatccgtgaggagatccctcttcggtccaatgtgtacgaagtttatgccaccgacaaggacgagggccttaacggtgccgtacggtacagcttcttgaaaactgcgggaaatcgtgattgggaattcttcattattgaccccatctccggactcatacaaactgcacagcgcctggacagggaatctcaggcagtgtatagtctcattctggtagcaagcgatctcgggcagcccgtcccctatgagaccatgcaacccctccaggtggctcttgaagacattgatgataatgagcctttgtttgtgcgtccacctaaagggtcaccccaataccagctcttgacagtgccagagcactcaccaaggggtacgctcgttggaaacgtaacaggtgcggtcgacgcagatgagggtcccaatgctatcgtgtactattttatcgccgccgggaacgaggagaagaactttcatcttcaacctgatgggtgcctcctggtgctccgggacctggatagagagagggaggctatctttagctttatcgtaaaagcaagcagcaacagatcatggactcctcctcggggcccatcgccgactctggatttagtggccgacctgacactgcaggaagtaagagtggtgcttgaagacatcaatgaccagcctccccgattcaccaaggccgagtacacagcaggtgtggcgacggatgctaaggtgggctcggagttaattcaggtgctagcccttgatgctgacatcggaaacaactcgctcgtattttactccatcctcgctatccactacttcagggctctggctaacgatagcgaggatgtcggacaggtattcaccatgggttctatggatggcatcctgcggaccttcgatctttttatggcttactcgcctggctatttcgtggttgacatcgtggcccgcgacttggccggccacaatgatacggctatcatcggtatttacatccttagagacgaccagagggtcaaaatagtgattaacgagattccggatcgagtccgcggattcgaggaagaatttatccacctcttgagcaatatcactggtgctattgtgaatacagacaacgtgcagtttcacgtggacaaaaaaggccgcgttaacttcgctcagacagaactgctcattcatgtcgtgaacagggacactaaccggatcttagatgtggacagagtgattcagatgattgatgagaacaaggagcagctgcgaaacctttttagaaattacaacgttctagacgtgcagcctgccatcagcgtccgccttcccgacgatatgagtgctctgcagatggccattattgtcctggccatcttgctgtttctggccgccatgttgttcgtcctgatgaactggtattaccgcaccgttcacaaaaggaagctgaaagccattgtcgccggatctgccggcaatcgtgggtttatcgacatcatggacatgccaaacaccaataagtattcttttgacggggcgaatcctgtgtggttggacccgttttgccgcaatctggaacttgcagcccaggctgaacacgaggacgatctgccagagaatctttcagaaattgcagatctctggaacagtcccaccagaacacatggtacattcggacgggagcctgccgccgtcaagccggatgacgacaggtatctgagagccgcgattcaagaatatgacaatatcgcaaaactggggcagatcatcagagaaggcccaattaaagggagtctcttgaaagtcgtgctggaggattacctacgcctcaagaaactcttcgcccaacgcatggtgcaaaaagcctcctcgtgtcacagctccatcagtgagttaatccagactgaactcgacgaagaacctggcgaccactctcctggtcagggcagcttacggtttaggcataagcccccggtcgagttgaaaggaccggatggcatccatgtggttcatgggagcactggtaccttgcttgccaccgacctgaattcgttgccagaggaagaccagaaaggcctcggccggagcctggagaccctcaccgccgctgaggctacagcatttgaaaggaacgcccgcaccgaatctgccaaatccaccccactccacaagctccgagacgtgatcatggaaacacctctcgagatcaccgagctatag

SEQ ID NO: 211488 - DNA, 3639 bp, Artificial Sequence
  derived and/or modified sequence
atgggacgacacgttgccacatcctgccacgtggcctggctccttgtactgatctccggctgctgggggcaggtgaaccgcctgccattcttcaccaatcacttcttcgatacctaccttttgatcagtgaggacacaccagtgggatccagcgttactcagctcctagctcaggacatggataatgatccactcgtttttggcgtctcgggcgaagaggccagcagattcttcgccgtagaaccggacacaggtgtggtatggctccgccagccactggaccgggaaactaagtcagagttcactgtggagtttagtgttagcgatcaccaaggcgtgatcaccagaaaagtgaatatccaggttggagacgtgaacgacaatgcccctaccttccataaccagccctattcagtgagaatccccgagaataccccagtgggcactccaattttcattgtgaacgccactgaccctgatctgggagccggcgggtcggttctgtactcctttcaaccgccttcccagttttttgctattgactctgcgcgcggaatcgtcaccgtgatccgtgagctggactacgagaccactcaggcttaccagctgactgtgaatgcaaccgaccaggacaaaacacggcctctcagcacactggccaatctggccatcataatcaccgacgtgcaggacatggacccaatattcattaatctcccctactctactaacatctacgagcacagtcccccaggcacaacggtcaggatcattacagccattgaccaggataagggccgaccacggggaattggctataccattgtctccggtaatacaaattcaattttcgccctggactacatctcaggcgttctgacgcttaacggactgctcgatagggagaaccctctatattcacacggatttatcttgacagtcaagggcactgaactgaatgacgatagaactccttctgacgcaaccgtgaccacaacttttaacatcctcgttattgacatcaacgacaatgcccctgagttcaacagctctgaatactcagtcgccataaccgaactggcacaagttggctttgcattacccctgttcatccaggttgttgacaaagacgagactcagggcctaaattccatgtttgaggtctacttggtcgggaacaattcgcaccacttcattatttcacccacctcagtccagggcaaagccgacatccgcataagagtcgcaatccctcttgactacgaaacggtggatcggtacgactttgacctgttcgctaacgaatctgtgcccgaccacgtcggctacgccaaagtgaaaatcacactgattaatgagaacgacaatcggccaatcttcagtcagcctctgtataacatctcactgtatgaaaacgtcacagttgggaccagcgtcctcacggtcctagccactgacaatgacgccgggacatttggagaggtttcatatttcttctccgatgacccggatcggtttagtctggacaaggataccgggctgataatgcttatcgccagattggattatgagttaattcaaagattcaccttaaccatcattgctcgggatggtggcggggaagagaccactggccgggtgagaatcaatgtgctggatgtgaatgacaatgttccaacttttcagaaagacgcttatgttggcgctctacgagaaaatgagccatctgttactcaactcgttagactgagggccactgatgaagactctccccctaacaatcaaatcacatattcaattgtttctgcatctgccttcggctcttactttgacattagcctgtacgagggctacggtgtgatctctgtctcacggcctctggattacgagcagatctctaacgggctgatctatcttaccgttatggctatggatgctggcaatccccccctcaattcgaccgtgccggtaaccatcgaagtgtttgatgagaacgacaaccctccaactttcagcaaacctgcctacttcgtgagcgtggtggagaatattatggctggagccactgtactgttcttgaatgctaccgatctcgatcgttccagggagtatgggcaagaatcaatcatatacagccttgagggcagcacccagttcagaattaacgcccgatccggagaaataactaccacaagtctgctggaccgggagactaaatcagagtatattttgatagtgcgcgcagttgatgggggggttggccacaaccagaagactggcatagccacggtcaacattacacttctggacattaatgataaccacccgacatggaaggatgctccatattacatcaatctggttgagatgactccacctgactccgacgtgacaaccgtagtagcggtggaccctgacctgggcgagaacgggacgctcgtctactctattcagcccccgaacaagttctattcgctgaatagcaccacgggcaaaattagaacaactcacgccatgctggacagggagaacccagaccctcacgaggccgagcttatgcggaagatcgttgtctcagtcaccgattgtggaaggccaccgctgaaggcgacgtcctccgccacggtattcgtgaatctattagatctaaacgataacgaccccacctttcagaacttgccatttgttgcagaggtactggaggggatccccgccggcgtttcaatatatcaagtggtcgcgatcgaccttgatgagggtctgaatggtctggtgagctatcgtatgcccgtcggaatgcctagaatggactttctgatcaattcaagctcgggggtggtagttaccacgaccgaactggatagagaaaggattgcagaataccagttgcgcgtggtggcttctgatgctggcacgccaacgaaatcctcgacatcaaccttaaccatccatgtcctggacgtgaacgatgagacacctactttctttcccgctgtgtataatgtttccgtgagtgaggatgtgccccgcgagtttagagttgtttggctaaattgcactgacaatgacgtgggtttaaacgctgagttgagttatttcatcaccggtggaaatgtcgatgggaagttctctgtgggttacagggatgccgtagtgcggacagtggtcggattggacagggagacaaccgctgcctatatgttgattctggaagctatcgataatggtcctgtaggcaaacgtcacaccgggaccgctacagtgttcgttacagtgctggacgtcaatgataaccgccccatcttcctgcagtcgtcctacgaggcgtctgtcccggaggacatcccggaagggcactctattcttcaagaagaagacctcgcctctccttgcatatcacccgcacccccgagaagagcatttcaatcctcaggggagaaagagaccagccagttccccggtaaagaactgaggagggaacctggccctagtaaggcacagaatcgcgcagcctttaccgagcctcttgccgaagcgccactgctcggcagtaagcaggcccaagaggaacgcgcccccctgcctagagagcaagctcagcagctgcagggttcagagggcgagaagggcggcccctag

SEQ ID NO: 211489 - DNA, 2187 bp, Artificial Sequence
  derived and/or modified sequence
gctactgacaacgacgccggcacattcggcgaggtgtcctatttcttcagcgatgaccctgaccggttttctctcgataaggacaccggtctgataatgctgattgctagactggactatgagttgattcagagattcacactgaccattatagctagggacggaggaggcgaggaaactacagggcgcgtgcggattaacgttcttgacgttaacgacaatgtacccacttttcagaaagacgcttacgtcggggctctgagagagaacgagccatccgttactcaactggtgaggttacgagcaacagatgaggattctccgcctaataaccagattacatactccatcgtcagcgcgtctgcattcggctcatacttcgacatcagcctgtacgaaggatatggcgtgatttccgttagccgtcctctcgattacgaacagatctctaatggtttaatctacttgacagtgatggccatggacgccggaaatcctcccctaaactccactgtcccagtgaccatcgaagtatttgacgaaaatgataaccctccaacattcagtaaacccgcgtacttcgtcagcgtggtagagaacataatggctggggcaactgtgctgttcctcaatgccacagatcttgatagaagccgagagtatggacaggagtcaataatttactctctggagggatccacacagttccgcattaatgccagaagcggagagatcactactacgtcactgttagatcgtgagaccaagtccgagtatatcctcattgtgcgcgctgtcgatggcggagtgggacacaaccagaagaccggaatcgccactgtaaacatcacgctcctggacatcaatgacaatcatccaacttggaaggatgccccatactacataaatttggtcgagatgactccccccgactccgatgttacaaccgtggtcgctgttgaccccgacctcggggagaatgggactctcgtctacagcatccagccccctaataagttctactctcttaactcaaccaccggcaagatcagaactacgcacgccatgttagatagggagaatcccgatccccacgaggccgagcttatgcgcaaaattgttgtgagtgtgactgactgtggaaggccaccgctgaaagctacatctagcgcgacggtgtttgtgaacctccttgatttgaacgataacgaccccaccttccagaacctgccattcgtcgctgaggttctggagggcatcccggccggggtttctatatatcaggtggtggcaattgatttggatgaaggcctgaatgggttggtttcgtatcgcatgcccgtaggcatgcctcgtatggacttcctaattaactccagcagtggagtcgttgtaactacaactgagctggatcgcgaacgaattgcagaataccagctacgtgttgtggcctccgacgctgggacgcccaccaagagctccacttcaacccttacaattcatgtgcttgacgtcaacgacgagactccgaccttcttcccggccgtgtacaatgtcagcgtcagcgaagacgtgcctcgagagtttcgggttgtgtggttaaactgtacagacaacgatgtgggtttgaacgccgaactgtcctattttattaccggcggaaatgtggatggtaaattttcagtgggctatcgagatgccgtggtgagaaccgtggttgggctagatcgtgagactaccgcggcttacatgctaattctagaggcaattgacaatggcccagtggggaagcgacacacgggtactgccaccgtatttgtcaccgtcttggacgtaaatgacaatcgcccaatctttctacagagctcgtacgaggcttccgtgcctgaggatatccctgagggccatagcatccttcaagaagatttggccagtccttgtatcagccccgcgccgccgaggcgggcattccagtcaagcggagagaaagagacaagtcagtttcctggcaaggagctgcggagagagcccggcccaagcaaagcgcagaacagagcagcgttcactgagccccttgccgaggcgcctctgttgggctctaagcaggcacaagaagagcgcgctcccctcccccgtgagcaggcacagcagctgcagggctccgagggagaaaagggtggtccatag

SEQ ID NO: 211490 - DNA, 3345 bp, Artificial Sequence
  derived and/or modified sequence
atggtgaagagccccatgaaccgggagctggtggccacctatgaggtgaccctgtctgtgattgacaatgccagtgacctgcctgagaggtctgtgtctgtgcccaatgccaagctgactgtgaatgtgctggatgtgaatgacaacaccccccagttcaagcccttcggcatcacctactacatggagcgcatcctggagggcgccaccccaggcaccaccctgattgctgtggccgctgtggaccctgacaagggcctgaatggcctggtgacctacaccctgctggacctggtgcccccaggctacgtgcagctggaggacagcagcgctgggaaggtgattgccaacagaacagtggactatgaggaggtgcactggctgaacttcaccgtgcgggccagtgacaatggcagcccccccagggctgctgagatccctgtgtacctggagatcgtggacatcaatgacaacaaccccatctttgaccagcccagctaccaggaggccgtgtttgaagatgtgcctgtgggcaccatcatcctgactgtgacagccacagatgctgacagcggcaactttgccctgattgagtacagcctgggagatggagagagcaagtttgccatcaaccccaccaccggggacatctacgtgctgagcagcctggaccgggagaagaaggaccactacatcctgacagccctggccaaggacaaccctggagatgtggccagcaacagaagagagaacagcgtgcaggtggtgatccaggtgctggatgtgaatgactgccggccccagttcagcaagccccagttcagcacctctgtgtatgaaaatgaacctgctggcaccagcgtcatcaccatgatggccacagaccaggatgagggccccaatggagagctgacctacagcctggagggccctggggtggaggccttccacgtggacatggacagcggcctggtgaccacccagaggcccctgcagagctatgagaagttcagcctgactgtggtggccacagatggaggagagccccccctgtggggcaccaccatgctgctggtggaggtgattgatgtgaatgacaacagacctgtgtttgtgcggccccccaacggcaccatcctgcacatccgggaggagatccccctgcggagcaatgtgtatgaggtgtatgccacagacaaggatgagggcctgaatggagctgtgcgctacagcttcctgaagacagctggcaacagagactgggagttcttcatcatcgaccccatcagcggcctcatccagacagcccagaggctggaccgggagagccaggccgtgtacagcctcatcctggtggccagtgacctgggccagcctgtgccctatgagaccatgcagcccctgcaggtggccctggaggacattgatgacaatgagcccctgtttgtgcggccccccaagggcagcccccagtaccagctgctgactgtgcctgagcacagcccccggggcaccctggtgggcaatgtgactggagctgtggatgctgatgagggccccaatgccatcgtgtactacttcatcgctgctggaaatgaggagaagaacttccacctgcagccagatggctgcctgctggtgctgcgggacctggaccgggagcgggaggccatcttctccttcatcgtgaaggccagcagcaacagatcctggaccccaccccggggccccagccccaccctggacctggtggccgacctgaccctgcaggaggtgcgggtggtgctggaggacatcaatgaccagcccccacgcttcaccaaggccgagtacacagctggggtggccacagatgccaaggtgggcagcgagctgatccaggtgctggccctggatgctgacatcggcaacaacagcctggtgttctacagcatcctggccatccactacttccgggccctggccaatgacagtgaagatgtgggccaggtgttcaccatgggctccatggatggcatcctgcggacctttgacctcttcatggcctacagccctggctactttgtggtggacatcgtggcccgggacctggccggccacaatgacacagccatcatcggcatctacatcctgagagatgaccagagggtgaagatcgtcatcaatgagatcccagacagagtgcggggctttgaggaggagttcatccacctgctgagcaacatcactggagccatcgtgaacacagacaacgtgcagttccacgtggacaagaagggccgggtgaactttgcccagacagagctgctgatccacgtggtgaacagagacaccaaccgcatcctggatgtggacagagtcatccagatgattgatgagaacaaggagcagctgaggaacctcttcaggaactacaacgtgctggatgtgcagcctgccatctctgtgcggctgcctgatgacatgtctgccctgcagatggccatcatcgtgctggccatcctgctcttcctggccgccatgctgtttgtgctgatgaactggtactacagaacagtgcacaagaggaagctgaaggccatcgtggccggcagcgctggcaacagaggcttcatcgacatcatggacatgcccaacaccaacaagtacagctttgatggagccaaccctgtgtggctggaccccttctgcaggaacctggagctggccgcccaggccgagcatgaagatgacctgcctgagaacctgtctgaaattgctgacctgtggaacagccccaccaggacccacggcaccttcggccgggagcctgctgctgtgaagccagatgatgaccgctacctgcgggccgccatccaggagtatgacaacatcgccaagctgggccagatcatccgggagggccccatcaagggcagcctgctgaaggtggtgctggaggactacctgcggctgaagaagctgtttgcccagaggatggtgcagaaggccagcagctgccacagcagcatcagcgagctgatccagacagagctggatgaggagcccggggaccacagccctggccagggcagcctgcgcttccgccacaagccccctgtggagctgaagggcccagatggcatccacgtggtgcacggcagcacaggcaccctgctggccacagacctgaacagcctgcctgaggaggaccagaagggcctgggccgcagcctggagaccctgacagctgctgaggccacagcctttgaaagaaatgccaggacagaaagtgccaagagcacccccctgcacaagctgagagatgtgatcatggagacccccctggagatcacagagctgtag

SEQ ID NO: 211491 - DNA, 3639 bp, Artificial Sequence
  derived and/or modified sequence
atgggccgccacgtggccaccagctgccacgtggcctggctgctggtgctgatcagcggctgctggggccaggtgaaccggctgcccttcttcaccaaccacttctttgacacctacctgctgatcagcgaggacacccctgtgggcagctctgtgacccagctgctggcccaggacatggacaatgaccccctggtgtttggagtgtctggagaggaggccagccgcttctttgctgtggagccagacaccggggtggtgtggctgcggcagcccctggaccgggagaccaagtctgagttcaccgtggagttctctgtgtctgaccaccagggcgtcatcaccaggaaggtgaacatccaggtgggagatgtgaatgacaatgcccccaccttccacaaccagccctacagcgtgcgcatccctgagaacacccctgtgggcacccccatcttcatcgtgaatgccacagatcctgacctgggcgccggcggctctgtgctgtacagcttccagccccccagccagttctttgccatcgacagcgcccggggcatcgtgaccgtcatccgggagctggactatgagaccacccaggcctaccagctgactgtgaatgccacagaccaggacaagacccggcccctgagcaccctggccaacctggccatcatcatcacagatgtgcaggacatggaccccatcttcatcaacctgccctacagcaccaacatctatgagcacagccccccaggcaccaccgtgcgcatcatcacagccatcgaccaggacaagggccggccccggggcatcggctacaccatcgtgtctggcaacaccaacagcatctttgccctggactacatcagcggcgtgctgaccctgaatggcctgctggaccgggagaaccccctgtacagccacggcttcatcctgactgtgaagggcacagagctgaatgatgacaggacccccagtgatgccaccgtgaccaccaccttcaacatcctggtgattgacatcaatgacaatgcccctgagttcaacagcagcgagtacagcgtggccatcacagagctggcccaggtgggctttgccctgcccctcttcatccaggtggtggacaaggatgagacccagggcctgaacagcatgtttgaggtgtacctggtgggcaacaacagccaccacttcatcatcagccccacctctgtgcagggcaaggctgacatccgcatccgggtggccatccccctggactatgaaacagtggacagatatgactttgacctgtttgccaatgaatctgtgcctgaccacgtgggctacgccaaggtgaagatcaccctcatcaatgaaaatgacaaccggcccatcttcagccagcccctgtacaacatcagcctgtatgaaaatgtgacagtgggcacctctgtgctgactgtgctggccacagacaatgatgctggcaccttcggggaggtgtcctacttcttcagtgatgatcctgaccgcttcagcctggacaaggacaccggcctcatcatgctgattgcccggctggactatgagctgatccagcgcttcaccctgaccatcatcgccagagatggcggcggggaggagaccaccggccgggtgcgcatcaacgtgctggatgtgaatgacaacgtgcccaccttccagaaggatgcctacgtgggcgccctgcgggagaatgagcccagcgtgacccagctggtgcggctgcgggccacagatgaggacagcccccccaacaaccagatcacctacagcatcgtgtctgccagcgccttcggcagctactttgacatcagcctgtatgagggctacggcgtcatctctgtgtcccggcccctggactatgagcagatcagcaatggcctcatctacctgactgtgatggccatggatgctggcaacccccccctgaacagcacagtgcctgtgaccatcgaggtgtttgatgaaaatgacaacccccccaccttcagcaagccagcctactttgtgtctgtggtggagaacatcatggccggggccaccgtgctcttcctgaatgccacagacctggacaggagccgggagtatggccaggagagcatcatctacagcctggagggcagcacccagttccgcatcaatgcccggtctggagagatcaccaccaccagcctgctggaccgggagaccaagtctgagtacatcctgattgtgcgggctgtggatggcggcgtgggccacaaccagaagacaggaattgccaccgtgaacatcaccctgctggacatcaatgacaaccaccccacctggaaggatgccccctactacatcaacctggtggagatgaccccaccagacagtgatgtgaccaccgtggtggccgtggaccctgacctgggagaaaatggcaccctggtgtacagcatccagccccccaacaagttctacagcctgaacagcaccaccgggaagatccgcaccacccacgccatgctggacagagaaaatccagacccccatgaggccgagctgatgaggaagatcgtggtgtctgtgacagactgtggccggccccccctgaaggccaccagcagcgccaccgtgtttgtgaacctgctggacctgaatgacaatgaccccaccttccagaacctgccctttgtggccgaggtgctggagggcatcccagctggggtgtccatctaccaggtggtggccatcgacctggatgagggcctgaatggcctggtgtcctacaggatgcctgtgggcatgcccaggatggacttcctgatcaacagcagcagcggcgtggtggtgaccaccacagagctggaccgggagagaattgctgagtaccagctgcgggtggtggccagtgatgctggcacccccaccaagagcagcaccagcaccctgaccatccacgtgctggatgtgaatgatgagacccccaccttcttccctgctgtgtacaacgtgtctgtgtctgaagatgtgccccgggagttccgggtggtgtggctgaactgcacagacaatgatgtgggcctgaatgctgagctgagctacttcatcactggaggaaatgtggatggcaagttctctgtgggctacagagatgctgtggtgaggacagtggtgggcctggaccgggagaccacagctgcctacatgctgatcctggaggccatcgacaatggacctgtgggcaagaggcacactggaacagccaccgtgtttgtgacagtgctggatgtgaatgacaaccggcccatcttcctgcagagcagctatgaggcctctgtgcctgaggacatccctgagggccacagcatcctgcaggaggaggacctggccagcccctgcatcagccctgccccaccccggcgggccttccagagcagcggggagaaggagaccagccagtttcctgggaaggagctgcggcgggagcccggccccagcaaggcccagaacagagctgccttcacagagcccctggccgaggcccccctgctgggcagcaagcaggcccaggaggagcgggcccccctgccccgggagcaggcccagcagctgcagggcagcgagggggagaagggcggcccctag

SEQ ID NO: 211492 - DNA, 2187 bp, Artificial Sequence
  derived and/or modified sequence
gccacagacaatgatgctggcacctttggagaggtgtcctacttcttcagtgatgatcctgaccgcttcagcctggacaaggacaccggcctcatcatgctgattgcccggctggactatgagctgatccagcgcttcaccctgaccatcatcgccagagatggcggcggggaggagaccaccggccgggtgcgcatcaacgtgctggatgtgaatgacaacgtgcccaccttccagaaggatgcctacgtgggcgccctgagagaaaatgagcccagcgtgacccagctggtgcggctgcgggccacagatgaggacagcccccccaacaaccagatcacctacagcatcgtgtctgccagcgccttcggcagctactttgacatcagcctgtatgagggctatggagtcatctctgtgtcccggcccctggactatgagcagatcagcaatggcctcatctacctgactgtgatggccatggatgctggcaacccccccctgaacagcacagtgcctgtgaccatcgaggtgtttgatgaaaatgacaacccccccaccttcagcaagccagcctactttgtgtctgtggtggagaacatcatggccggggccaccgtgctcttcctgaatgccacagacctggacaggagccgggagtatggccaggagagcatcatctacagcctggagggcagcacccagttccgcatcaatgcccggagcggggagatcaccaccaccagcctgctggaccgggagaccaagtctgagtacatcctgattgtgcgggctgtggatggaggagtgggccacaaccagaagacaggcatcgccaccgtgaacatcaccctgctggacatcaatgacaaccaccccacctggaaggatgccccctactacatcaacctggtggagatgaccccaccagacagtgatgtgaccaccgtggtggccgtggaccctgacctgggggagaatggcaccctggtgtacagcatccagccccccaacaagttctacagcctgaacagcaccaccgggaagatccgcaccacccacgccatgctggaccgggagaacccagacccccatgaagctgagctgatgaggaagatcgtggtgtctgtgacagactgtggccggccccccctgaaggccaccagcagcgccaccgtgtttgtgaacctgctggacctgaatgacaatgaccccaccttccagaacctgccctttgtggccgaggtgctggagggcatcccagctggggtgtccatctaccaggtggtggccatcgacctggatgagggcctgaatggcctggtgtcctacaggatgcctgtgggcatgcccaggatggacttcctgatcaacagcagcagtggagtggtggtgaccaccacagagctggaccgggagagaattgctgagtaccagctgcgggtggtggccagtgatgctggcacccccaccaagagcagcaccagcaccctgaccatccacgtgctggatgtgaatgatgagacccccaccttcttccctgctgtgtacaacgtgtctgtgtctgaagatgtgccccgggagttccgggtggtgtggctgaactgcacagacaatgatgtgggcctgaatgctgagctgagctacttcatcaccggcggcaatgtggatggcaagttctctgtgggctacagagatgctgtggtgaggacagtggtgggcctggaccgggagaccacagctgcctacatgctgatcctggaggccatcgacaatggacctgtgggcaagaggcacactggaacagccaccgtgtttgtgacagtgctggatgtgaatgacaaccggcccatcttcctgcagagcagctatgaggcctctgtgcctgaggacatccctgagggccacagcatcctgcaggaggacctggccagcccctgcatcagccctgccccaccccggcgggccttccagagcagcggggagaaggagaccagccagtttcctgggaaggagctgcggcgggagcccggccccagcaaggcccagaacagagctgccttcacagagcccctggccgaggcccccctgctgggcagcaagcaggcccaggaggagcgggcccccctgccccgggagcaggcccagcagctgcagggcagcgagggggagaagggcggcccctag

SEQ ID NO: 211493 - DNA, 3345 bp, Artificial Sequence
  derived and/or modified sequence
atggtgaagagccccatgaaccgggagctggtggccacctacgaggttaccctatccgtgattgacaatgctagcgatctgcctgaaaggagcgtgtccgtgccgaacgccaagttaacagttaacgtgctggatgtgaacgataataccccccaatttaaaccctttggcataacttattatatggaacgcattcttgagggtgcgacccccgggacaactctcatagctgtcgcagctgtcgaccctgacaagggactcaacgggctcgtgacttatacattacttgacctggtcccaccaggttatgttcaactggaggatagcagcgccggaaaagtaatcgctaaccggaccgtagactacgaagaggtacactggttaaattttactgtaagagcctctgacaatggcagccccccgcgggcagccgaaatacctgtgtaccttgagattgtggatattaacgataataaccccatattcgatcaacctagttatcaggaggccgtgttcgaagacgtgcccgtgggaaccatcattctcactgtgaccgccaccgacgcagattcaggtaacttcgccctcattgaatacagcttaggagacggagagtccaaatttgctattaatcccactactggcgatatttatgttctttcttcacttgacagggagaaaaaggaccactatatactaactgccctcgccaaggacaacccaggagacgttgcgagcaataggagggaaaatagcgtgcaggtggtgatacaagtgttggatgtgaacgattgccgtccacagttttcaaagccacagttttctacttctgtttatgaaaacgagcccgcgggaacatctgtaatcacgatgatggcaactgaccaggacgagggcccaaatggggaacttacctactccttagaagggcctggtgtggaggctttccatgtagacatggatagcggcctggtaacgactcagaggccactgcagagttacgaaaaattcagcctcaccgtagtagcaaccgatggtggtgaacctcctctgtggggtactactatgctactggtggaagttatagacgttaatgacaaccgtcctgtgttcgtaaggcccccaaacggcacaattctacacattcgcgaggagattcccctgcggtctaatgtctacgaagtctacgcgaccgataaagacgaaggcctgaatggagccgtgcggtatagctttctcaagactgccgggaaccgggactgggagtttttcatcatcgaccctattagcggtctgatccaaactgcccaacgactggacagggaatctcaagcagtctactccctcatcctcgtcgcaagcgacctcggacagcccgtgccttatgagaccatgcaacccctgcaagttgccctagaagacatagatgataatgagccactcttcgtgagacctcccaagggtagcccccagtaccagctgctcaccgtgccagagcactcccctcgcgggaccctcgtgggcaacgtcactggggccgtagatgcagacgaagggcccaacgccattgtgtactattttatcgccgccgggaacgaggaaaagaactttcatcttcagcccgacggctgtttgctcgtgttgcgggatcttgatcgtgagcgggaggcaatcttttcatttatagttaaggctagctctaacaggtcatggacgccacctagggggcccagccctacactggacttggtggccgatctaacactgcaggaggtccgggttgtactggaggacatcaatgatcagcctccgcgatttacgaaggcggagtatacggccggcgtggccaccgacgctaaggtgggttctgagttgatccaagttctggccctcgacgccgacataggcaacaatagccttgtgttctattctattcttgcaatccactacttccgtgcactggcgaatgacagtgaagacgtagggcaggtattcaccatggggagcatggatggtatcctgcggacctttgacctcttcatggcatactcacccggctatttcgtggtggacattgtcgccagggaccttgcaggccacaacgataccgctattattgggatatacattctcagagacgatcagcgggtgaaaatagtgattaatgagatacctgacagagtcagagggttcgaagaagagtttattcacttactttccaacattactggagctatcgttaatacagacaacgttcagttccacgtggacaagaagggcagagttaattttgcccagacagaactacttattcacgtcgtcaaccgggacaccaatagaatcttagacgtcgaccgagtgatccaaatgattgacgagaataaggaacagttaaggaacttatttcgaaattacaacgttctagacgtgcagcccgctatatcagttagacttcctgacgatatgagcgctctccagatggccattatcgtgctggctatactgcttttcctggccgctatgctcttcgtactcatgaactggtattatcggacagtccacaagcggaagctcaaggccattgtggctgggagtgcaggtaatcgcggatttatagatattatggatatgcccaacactaacaagtattcgttcgatggggccaaccctgtgtggcttgaccccttctgccgcaatctggagctagcagcgcaggcagaacacgaagatgacctgccagaaaatctgtcggagatagcagacctgtggaacagccctactagaacgcacggcactttcggcagagaacctgccgccgtgaagccagatgacgaccgctacctgagggccgccatacaggagtatgacaatattgcgaagctgggccagatcatacgagaaggaccaatcaaggggtcgctcctgaaggtggtgctggaagactaccttcgcctgaagaagctcttcgcacagaggatggtgcaaaaggcaagtagttgtcattcgagcataagtgagttgatacagaccgagttagacgaggagccaggggatcactcccctggtcagggcagtctccgtttccgccataaacctcctgttgagcttaaaggcccggatgggatccacgtggtgcatggaagtacaggaactttgctggccactgaccttaatagcctccctgaggaagatcaaaaagggctgggtagatcactcgaaacacttacagcagcggaggcaacagcctttgaaagaaacgctcggaccgagtctgccaagagtacgcctctccataagctgagagatgtcattatggaaacaccactcgagatcactgaactgtag

SEQ ID NO: 211494 - DNA, 3639 bp, Artificial Sequence
  derived and/or modified sequence
atgggccggcacgtggccaccagctgccacgtggcctggctgctggttttaattagtggctgctggggacaggtcaacaggttacccttcttcaccaaccactttttcgacacgtatctactgatcagcgaggacaccccggtgggctcatccgttacacagctgctcgcccaagatatggataacgatccactcgtgttcggcgtgtcgggcgaggaagcaagccgcttttttgccgttgagcctgacactggggtggtgtggctgagacagcccctggacagagaaactaaaagcgaattcaccgtggagttctctgtcagtgatcatcagggcgtcattacccgaaaagtcaatatccaggtgggcgatgtaaatgataatgcgccgaccttccataatcagccatactccgtgcgtattccagagaatacgcctgtcggcacgcccattttcatagtgaacgctaccgacccggacctgggggcgggagggtccgttctctatagctttcagccgccctctcagttttttgcaatagatagcgcacgtggcatagttaccgtcatacgcgagcttgactacgagacaacccaggcctaccaactgactgtgaacgctaccgatcaggataagactcgcccgctctcgacactggcaaacctagctatcatcatcaccgatgtgcaggatatggatcccatattcataaacctgccatacagcacaaatatctatgagcactctccacccgggaccaccgttagaattataaccgccattgatcaggacaagggtcggccaaggggaataggctatacaatagttagtgggaatacaaactcaatcttcgccttagactatatttcaggggtcctaacattgaacgggttattggaccgcgagaatcccctgtattcccacggctttatcctcacggtcaaggggactgagctgaacgacgatcgaacacccagcgacgccaccgtcaccacaactttcaacattctggtgatagatataaatgacaatgcacccgagtttaactccagcgagtactctgtggcgattactgaacttgcccaggtgggtttcgcactaccactattcattcaggtagtggataaggatgagacacaaggcctgaactcaatgtttgaggtgtacctggtcggcaataactcacatcactttataatctcccccacatccgtgcaaggcaaagctgatattaggatccgggtcgccataccacttgattacgagaccgtcgatagatacgactttgatctctttgctaacgaaagtgtccccgaccatgttggttacgcaaaggttaagattacgctgataaatgagaacgataacaggccaatattttcccagcctctgtacaatatctccctgtacgagaacgttactgtgggtacttccgtactgactgtgcttgccacagacaacgacgcaggaacttttggcgaggtctcctatttcttctccgacgaccccgaccggttttcccttgataaggacacgggactgattatgcttatcgcccgcctggattacgaacttatccagaggttcacactcactatcatagcaagggatggcgggggtgaggaaacaactggacgcgtccgaatcaatgtgctcgacgttaatgataacgttcccaccttccagaaggatgcatatgtgggggccttgcgtgaaaatgagccctctgtgacgcagctggtgcgcctgagagccactgacgaggacagcccgccgaataaccagatcacttacagcatcgtctctgccagcgcttttggctcctattttgacatctctctatacgagggttatggggtaatctcagtgtctagaccactggactacgagcagatctccaacggactcatctacctgaccgtgatggccatggatgccgggaatcctcccctgaattctacggtgcccgttacgattgaagtgttcgatgagaacgacaatcctcctactttttctaagcccgcctatttcgtgagcgtcgtcgaaaatatcatggccggggctaccgtgctttttctgaatgccactgacctggacaggtccagagagtatgggcaagaaagcattatctactctctggagggctcaacgcagttccggatcaacgccaggtccggtgagatcactaccacaagcctgcttgaccgggagaccaaatctgagtacattctgatagtacgggcagtagacggaggagttggacacaatcagaagaccgggattgccacagtaaatattaccctattagatattaacgataatcatcctacttggaaagacgccccatactatattaacctcgtggaaatgacgccgccggattccgacgtcactacggtggtggcagtggatcccgacctgggtgaaaacggcaccctcgtatacagcattcagccacccaacaaattctattctcttaactcaaccactggtaagatcaggactacacacgcaatgctggatcgggagaaccctgaccctcatgaggccgaactcatgcgtaagatcgtggtgagcgtaaccgattgcggtcgtcctcctctgaaagccaccagttcagccacagttttcgtgaacttgttagacctgaatgacaatgaccccaccttccagaatctgccatttgtggccgaggttcttgaaggaatccctgcaggggtgtctatctaccaagttgtcgccatcgacttggacgagggactgaatggattagtgagctatagaatgccagtgggcatgccgcgtatggattttttaatcaactcttccagcggcgtcgtcgtgaccactactgagcttgaccgagagagaatcgctgaatatcagctccgggttgtggcgtccgatgctggcactccgaccaaaagctctaccagtactctgacaatccacgttctggatgtgaacgacgaaactcctacattcttcccggctgtgtacaatgtcagcgtgtcagaagacgttccacgggaattccgggtcgtatggttgaactgtacagataatgacgtgggcctgaatgctgagctgtcttattttattactggtgggaatgtagacgggaagttcagcgtaggttatcgcgacgccgtggtgcgtacagtcgtaggcttggacagagagaccactgccgcttacatgctgatcctggaagccatcgataacggacccgtcgggaaaaggcacaccggaacagcaactgtgtttgtgacagtattggacgtgaacgataaccggcctattttcctccagtcttcctacgaggcctctgtccccgaagacatccccgaaggacacagcatcctgcaggaggaagaccttgctagcccctgcattagcccggcaccccctagacgcgcctttcagtctagcggggaaaaggagacaagccagtttcccgggaaagagctccggagggagccgggaccgtccaaggcgcagaatagagctgcctttaccgaaccactcgctgaggctcctttattggggagtaaacaggctcaggaggaaagagctccactcccaagagagcaggcacagcagctccagggaagcgaaggggagaaggggggcccatag

SEQ ID NO: 211495 - DNA, 2187 bp, Artificial Sequence
  derived and/or modified sequence
gccaccgacaacgacgccggcaccttcggcgaggtgagctacttcttttctgacgacccagacagattctcgcttgataaagacactgggttgattatgctgatcgccaggctggactacgagctgatacaaagattcaccctcaccataatcgcacgcgacgggggcggcgaagagaccacaggtcgcgtgaggataaacgtgctggatgttaatgataatgtgcccacattccagaaggacgcttatgtgggcgcccttcgcgaaaatgagccctctgttactcagctggtcaggttaagagccacggacgaggactctccgcctaataatcagatcacatactctatcgtctccgcttccgcttttggatcctacttcgacatcagcctttacgaaggctacggggtgatttccgtctcgcggcctctagattacgaacagatcagcaatggtctcatctacctcactgtaatggctatggacgccggcaacccccctctcaacagcaccgtgcctgtcactattgaggttttcgatgagaacgataatccgccaacattttcgaagcccgcctatttcgtgtccgtggtagaaaatattatggccggcgcaaccgtgctgtttcttaacgccaccgacttagaccggtctagggagtatggccaggagagcattatctattcacttgagggcagcacccagttcaggattaacgctcgatcaggggaaattaccaccacatcactcctcgatcgggagacaaagtccgaatacatactgatcgtgagagctgtggacggcggggtgggccataatcagaaaacagggatcgcgacagtgaatattacgttgctcgatatcaatgataatcacccgacctggaaggacgctccatactatattaacctggttgagatgacgcctccggactcggacgtgacgactgtcgtggccgtggatcctgacctgggagagaacggcacactcgtgtactccattcagcccccaaataagttctattccctcaacagtaccaccgggaagatccgtacaacccacgccatgctcgaccgtgagaacccagacccgcacgaagcagagctcatgcggaagattgtggtgagcgtcacagattgcggcaggccccccttgaaagccacttctagtgccaccgtgtttgtgaacctgctggatctgaatgataacgaccctacttttcaaaatctgcctttcgtcgctgaagtgctggagggtataccggctggtgtaagcatctatcaggtcgtggccattgacctggacgaggggcttaacggcctagtgagttacagaatgcccgttggcatgcctagaatggatttccttatcaatagcagcagtggagtggtggttacaacgacagaattggatagggaacggattgccgagtatcagttgagggttgtcgcttctgatgccgggacccccacgaaaagctccacttctaccctgacaatccatgtccttgacgtaaatgatgaaacccccaccttcttcccggcagtgtataacgtctccgttagtgaggacgtgcctcgcgagtttagagtagtgtggttgaactgtaccgacaacgacgtgggtttaaatgcagagctgtcttatttcatcactggcgggaatgtggacggaaagttcagcgtggggtacagagacgctgtggtaagaacagttgtcgggcttgaccgagagactaccgctgcgtatatgctgatactggaggcaatcgacaatggaccagtcgggaaaagacacaccggcaccgccactgttttcgtgacggttctagatgtcaatgacaacagacccatctttctgcagagtagctatgaagcatccgtacccgaggacattcctgaagggcactccattttgcaggaggacttggcctcaccttgtattagccccgcccccccgaggcgcgcttttcagagctccggcgagaaggagacctcccagtttcccggtaaggaactgcgcagagaaccgggaccttctaaggctcagaacagggcagcctttacagaacccttggccgaggctccactcctgggcagtaaacaggcgcaggaggagcgggctcctcttcctcgagaacaggcccagcaactccaaggaagtgaaggcgaaaaggggggtccctag

SEQ ID NO: 211496 - DNA, 3345 bp, Artificial Sequence
  derived and/or modified sequence
atggttaagtcccccatgaaccgcgagctggttgctacttacgaggtaactctgtctgtcatcgacaatgcctctgatctacccgagcgatcagtgagcgtgcctaatgctaagctgaccgttaacgtccttgacgtgaacgacaacacgccgcagttcaaaccatttgggatcacctattatatggaacgtatcctggagggcgcaacccctggcacgaccctcatcgccgtggccgcagttgaccccgataaaggcttgaacggattagtgacttacacgctgctcgatcttgtgcccccaggctatgtacagctggaagacagttcggccggtaaggtcatcgcgaatcggaccgtcgactatgaggaggtgcactggctcaactttacggtgcgagcaagcgacaatgggtcgcctccccgagcagccgaaatcccagtttacctggaaatagtggacattaatgataacaaccccatcttcgatcaacccagctatcaagaagcggtgttcgaagatgtgccagtcggtaccatcatcctgaccgtgacagccaccgacgcagatagcggaaattttgccctgatcgagtattctctgggagacggagaaagtaagttcgccatcaatccaacaactggtgacatctatgtgttatctagcctggacagagaaaaaaaggaccactatatactgacagccctcgccaaggataaccctggcgacgtagccagtaacagacgcgaaaacagtgtgcaagttgttatacaggtgctggacgtaaacgactgtcgtcctcagttctcgaagccacagttttcaacttcggtatacgaaaatgaaccagccggaacttctgtcatcactatgatggccacagaccaggacgaaggtccaaacggggaactgacttattcgctggaagggccaggcgtggaggcattccacgtcgacatggattctgggctggtcacaactcagagacctttacagtcttacgaaaagttttccctaaccgtggtggctacggatggaggagaacctccgctctgggggacgaccatgcttctcgtggaggtcatcgatgtgaatgataatcgaccagtgtttgtcagaccacccaatggcacgatattacacatcagggaagagatcccactcagaagtaatgtctacgaggtgtatgccacggacaaggacgagggtttgaacggagccgtgcgctacagcttcctcaaaacagccggtaacagagactgggaattttttatcatcgatccaataagcgggctcatacaaacagcgcagcgcctcgatcgcgaatctcaggcagtttattctttgattttagtggcttctgatctaggccagccggtcccgtatgaaacgatgcaacccctgcaggtggccctggaggacatcgacgacaatgagcctcttttcgtgaggcctccaaaaggaagcccgcagtatcaattgcttacggtgccagaacattccccaaggggtacactggtggggaatgttacaggggctgttgatgctgatgagggcccaaacgccatcgtttattacttcatcgctgcaggaaacgaggagaagaatttccacctccagccagacggatgtctgctggtccttagggacctggatagggagcgcgaggccatctttagtttcatcgtgaaagcttcatccaatcgcagctggacgccacctaggggtcccagtcccaccctggacttggttgcggatttgactctgcaggaagtgcgagtcgtcctggaggatatcaacgatcagcctccaagatttactaaggctgagtacaccgcaggcgtagcaactgacgctaaggtgggctcagagctgatacaggtccttgcgctggacgcagacatcggaaacaacagtctggttttctattcaattctcgcaatccattacttccgggcactcgccaatgattctgaagacgttggacaagtctttacgatgggatcaatggacggtatcctcaggaccttcgaccttttcatggcttatagccctggttactttgtggtggatatcgtggctagagatctggctgggcacaacgacacagcgattatcggcatttatatcctgcgcgacgaccagcgagtcaaaatcgtgatcaacgagatcccagatcgggtccggggttttgaggaggagtttattcatctgttatctaatattaccggcgcaattgttaatacagacaatgttcagttccatgtggataagaagggacgggtcaactttgctcagacagagttgctgatacatgtggttaatcgtgatactaatagaatccttgacgtggacagagttatccagatgatcgatgaaaataaggaacagctccggaacctatttcggaattacaatgttctagacgtccagccagctatctccgttcgactccccgacgacatgtcagctctccagatggctatcatcgtgctagcaatactgctcttcttggcagcaatgctgttcgtcttaatgaactggtattatcgcacagtccataagagaaagttgaaagctattgtagctggctcagccggaaatcggggattcattgacatcatggatatgcccaacactaataagtactctttcgacggggcaaacccagtgtggttggatccattttgccgcaatttggaactggcggcacaggcagagcacgaggatgatctgcccgaaaatctaagtgagattgctgacctgtggaacagccctactagaacccacggaacattcggccgtgaacccgctgccgtcaaaccagatgacgaccgctacctgcgtgctgccattcaagaatacgataatattgccaaattgggccagataattcgggaaggacctataaagggttccttactgaaagttgtactcgaagattatcttcgcctcaagaaactttttgcccagaggatggtgcagaaggctagcagctgccattcatcaatttcagaactgattcagaccgagctcgatgaggaacctggagatcacagtcctggccaaggaagccttaggtttcggcataaaccgcctgtggagctgaaaggtcccgacggcattcacgtagtacacgggagtaccgggacactccttgcgacggacctcaactctctgcccgaggaagatcaaaaaggcctagggagatcactcgagacactgaccgctgctgaagctactgcattcgaaaggaacgcaaggacggaaagcgccaagtccaccccccttcataagctgcgcgatgtgatcatggaaactcctctggagattactgagctatag

SEQ ID NO: 211497 - DNA, 3639 bp, Artificial Sequence
  derived and/or modified sequence
atggggaggcacgtcgcaacctcctgtcacgtggcttggttactcgttctgatcagcggctgctgggggcaggtgaatcgattaccattcttcaccaatcatttctttgatacctacttactgatatccgaagatacacccgtggggagcagcgtcactcagcttttggcccaggacatggataacgatcccctggtctttggggtctccggcgaggaggcttcgaggttcttcgctgtcgagcccgacacgggagttgtgtggctcaggcagccactggatagagagacaaagtctgaatttaccgttgaattctcagtgagcgaccaccagggagtgattacgcgaaaggtgaacatccaggtcggggacgtaaacgacaacgccccaacttttcacaatcagccgtacagtgtgcgcattccagaaaatacccccgtgggaacgccgattttcattgtcaacgctacagaccccgacctgggtgccggaggcagcgtattatactccttccagccaccctcccagttctttgcgatcgatagtgccaggggaatagtgaccgttatacgcgaattggactacgagaccacccaggcttaccaacttaccgtgaatgcaacagaccaagacaagacaagacctctcagcaccttggcaaatttggccatcattattactgacgtccaggacatggatccaatattcataaacctgccttactccaccaacatctacgagcattcacccccaggtacgacggtgaggataatcactgccatcgatcaggacaaggggagacccaggggaattgggtacactattgtgagtggaaacaccaacagcatctttgccctggattacatctcgggggtcctgactttgaatggccttctagaccgggagaatcctctgtactcgcacggtttcattctgacggtaaaaggaaccgagttgaacgacgacaggactccatcagatgcaacggtgactacaacttttaacattttggtgattgatattaatgataatgcccctgaattcaactcctctgaatactcagtggcaattacagaactggcgcaggtgggatttgcactcccgctctttattcaggtggttgataaagatgagacccaaggactaaactctatgtttgaagtttacttagtgggcaacaactcacaccatttcatcatttctccaacctctgttcagggcaaggcggatatccgaatccgggtggcaatccctctggattatgagaccgttgacaggtacgacttcgatttattcgctaatgagtcagtgccagaccatgttggatatgccaaagtgaagatcaccctgattaacgagaatgataatcgtccaatcttcagccagcctctttacaacatttctctgtatgaaaatgtcacagtcggtacatctgtcctgacggtacttgctacggacaacgacgctggtacctttggtgaagtgtcctacttctttagcgacgacccagataggttcagcctggacaaggatactggtctgataatgctaatcgcaaggttggactacgagcttatccaacgatttaccctcaccatcattgcccgagatggtggcggagaggagactaccggccgagtgcgcatcaacgtgctggacgttaatgacaacgtacctacctttcaaaaagacgcttacgtgggcgctttaagggaaaacgagccaagcgtgacccaactggtccgccttcgagccaccgatgaagactctcctcccaataaccagatcacttactctatcgtgagtgctagtgccttcgggtcctactttgatataagtttgtatgaaggttacggtgttatcagcgtgtcgagacccctcgattacgaacagattagtaacgggctgatttatctgactgtgatggccatggacgccggaaatcctccattgaattctacagtgcccgtcaccatcgaggtttttgacgaaaacgacaaccctccaacttttagcaaacccgcatacttcgttagcgtggtcgagaatatcatggccggtgccacagttttattcctgaatgccacagatctcgatcggtctcgagagtacgggcaggagtccatcatatacagcctggagggatctactcaatttcggattaacgcgaggagtggcgagattacgaccactagcttgctggatagggagacaaaaagtgaatatattctaatcgtgagggcggtggacggtggggtcggtcacaatcagaaaaccggcatcgcaacagtgaatatcaccctccttgacatcaacgacaatcaccctacgtggaaggatgctccatactacatcaatctggttgagatgacaccccctgacagcgatgtcaccaccgtagttgctgtggaccctgatctcggcgagaacggaacacttgtctattctatccaaccaccaaacaaattttatagcttaaatagtaccacggggaagattaggaccactcacgctatgctcgacagggagaatcctgatcctcatgaggcagaactcatgaggaagatcgttgtatccgtgactgactgcggaaggccgcctttgaaggctacgagctcagccaccgtctttgtgaacctcttggacttgaatgataacgacccaacattccaaaacctccccttcgtggctgaggtgttggagggcattccagcgggtgtatccatttatcaggtggtagccattgatctcgatgagggcctcaacggactagtgtcctatcgaatgcctgtcgggatgccgagaatggactttttaatcaactcatcgtcaggcgttgtggttaccaccacagagttagaccgcgaacgaatagccgagtatcagcttagagtggttgccagcgatgcgggtacccctacgaagagttcaacgtctacgctgacaattcatgtgctggatgtgaatgatgaaacgccaaccttcttcccagccgtttataacgtctctgttagtgaagacgtccctagggagtttcgggtggtatggttaaattgtactgataacgacgtgggtttgaatgcagagcttagctactttattactggtggtaacgttgatgggaagttctcagtcggctatcgcgatgccgtcgttcggactgtggtcggcctggatcgtgagacaactgcggcttacatgctgatcctggaagccatcgataatggaccagttggcaaacggcataccggcaccgcaacggtgtttgtcacagtgctggatgtcaatgacaataggccaatttttctacaatcttcctatgaggcttccgtgcctgaggatatcccagagggacatagcatcctgcaggaagaggacctggccagcccctgcatttctcctgccccaccaagacgggcattccagagctcaggggagaaggagaccagccagttcccgggaaaggaattgcgccgagagcctggtccatcaaaagcacagaatcgcgcagccttcacagagccactggcagaggccccattgctggggagtaaacaagctcaggaggagagagcccctctacctcgagagcaggcccaacaactacaggggtcagagggcgagaagggagggccatag

SEQ ID NO: 211498 - DNA, 2187 bp, Artificial Sequence
  derived and/or modified sequence
gcaaccgataacgacgcaggaacgtttggcgaagtttcatacttcttcagtgatgacccagatcggttttcactagacaaagataccggcctgatcatgctgatcgcacgcttagactatgagctgatacagcgtttcaccctgactattattgctcgtgacggcggtggggaggaaacaactggacgggtacggatcaatgttctggatgtgaatgacaatgtcccaacttttcagaaggacgcatatgttggcgcattgagagagaatgaacccagtgttacgcaactggttaggttacgcgctactgatgaagattccccaccaaataaccagatcacatactctattgtctcagcctctgcttttggcagttatttcgatatatccctctatgaaggatacggtgttatttccgtctcccgacctctcgactacgagcagattagcaacgggctaatctacttgacagttatggccatggatgcgggaaacccacccctaaattccacagtgcctgtcacgatcgaggtcttcgatgagaatgacaatccaccaaccttcagcaagccagcctatttcgtaagcgtggtagagaatatcatggccggagccactgtcttgttcttgaatgcgaccgatcttgataggagccgagagtacgggcaggagtccattatttacagcctggaaggttcgactcagtttcggatcaacgccaggagcggcgagattactaccaccagcctgctggatagagagactaaatcagagtacattttgatcgttagggcagtggatggaggggtgggacataatcagaagacgggaatcgcaaccgtgaatatcaccttgctggacatcaacgataaccaccccacgtggaaggacgcgccttactacatcaacctggttgaaatgactccccctgactctgacgttactacagttgtcgcggtggatcctgacctaggagagaatggaacactagtttattctatccagccgcctaacaaattctatagcctgaacagcaccaccgggaagattagaacaacacatgcgatgctggatagagaaaacccggacccccatgaagcagaactgatgcgcaaaatcgttgtgagcgtcacggattgtggcagaccgcctctgaaggccacctcaagtgcgactgttttcgtgaatcttctcgaccttaatgacaacgatccaacctttcaaaatcttccatttgtagccgaggtattagaaggcattcctgccggagtgtccatataccaggtcgtcgcaattgatctggatgaaggcctcaatgggctggtgagctacagaatgcccgtggggatgcccagaatggattttcttattaattcttcttccggtgttgtcgttacaacaacggagttagatagagagcgcatcgccgaatatcagcttagagtcgtcgcaagtgacgcaggtactcctactaagtcctccacatcaacattgacaatccacgtgcttgacgtaaatgacgagaccccaacctttttccctgccgtctataacgtgagcgtgtcagaggatgtaccacgcgagtttcgtgttgtgtggctcaactgcacagacaacgatgtcgggctgaacgccgaactgtcttacttcataaccggtggcaacgttgacggtaagtttagcgtcggctacagagacgccgttgtcagaacagtggtcgggctggatcgcgagacaacagccgcttacatgctgatacttgaggctatcgacaacgggccagttgggaagagacacacaggcactgccactgtgttcgtgacagtgctggacgttaacgataatagacctatttttctacagtctagttacgaagccagtgtgcctgaagacatccccgaggggcactcaatcctgcaagaggatctcgcgtctccgtgtatcagccctgcccctccaaggcgggcattccagtcctcaggagaaaaagagacatcacagtttccagggaaggagttacgcagggaaccgggtccctcgaaggctcagaacagggccgcatttacagaacccctggccgaggcgcctctcttaggcagcaagcaagcccaggaagaaagggctcctctgcccagagagcaagcccaacagctgcaaggtagcgagggggaaaaaggcggaccctag

SEQ ID NO: 211499 - DNA, 4329 bp, Artificial Sequence
  derived and/or modified sequence
ccctgctgcaccctgaactaactgatgttaaccctcttctctcttcctcatggctggcaggcccacaggtttgagctctgtttctctgtcacttcccacctcatctcttctctgcctcaccccattgccttcctccatgcccaccacacccccaccacccttcctgtcctgtggggcctgggccaaggccgtggcccagcctttgcagactgaatgcagccgccctctccccatcctcgctccccagcctgggggacagggagcgagagtaggaagaggaggaggaggaggaggaggaggcggcccagggatctgtaatggtgaagtcccccatgaatcgggagctggttgccacctatgaggtcactctctcagtgattgacaatgccagcgacctaccagagcgctctgtcagtgtgccaaatgccaagctgactgtcaacgtcctggacgtcaatgacaatacgccccagttcaagccctttgggatcacctactacatggagcggatcctggagggggccacccctgggaccacactcattgctgtggcagccgtggaccctgacaagggccttaatgggctggtcacctacaccctgctggacctggtgcccccagggtatgtccagctggaggactcctcggcagggaaggtcattgccaaccggacagtggactacgaggaggtgcactggctcaactttaccgtgagggcctcagacaacgggtccccgccccgggcagctgagatccctgtctacctggaaatcgtggacatcaatgacaacaaccccatctttgaccagccctcctaccaggaggctgtctttgaggatgtgcctgtgggcacaatcatcctgacagtcactgccactgatgctgactcaggcaactttgcactcattgagtacagccttggagatggagagagcaagtttgccatcaaccccaccacgggtgacatctatgtgctgtcttctctggaccgggagaagaaggaccactatatcctgactgccttggccaaagacaaccctggggatgtagccagcaaccgtcgcgaaaattcagtgcaggtggtgatccaagtgctggatgtcaatgactgccggccacagttctccaagccccagttcagcacaagcgtgtatgagaatgagccggcgggcacctcggtcatcaccatgatggccactgaccaggatgaaggtcccaatggagagttgacctactcacttgagggccctggcgtggaggccttccatgtggacatggactcgggcttggtgaccacacagcggccactgcagtcctacgagaagttcagtctgaccgtggtggccacagatggtggagagcccccactctggggcaccaccatgctcctggtggaggtcatcgacgtcaatgacaaccgccctgtctttgtgcgcccacccaacggcaccatcctccacatcagagaggagatcccgctgcgctccaacgtgtacgaggtctacgccacggacaaggatgagggcctcaacggggcggtgcgctacagcttcctgaagactgcgggcaaccgggactgggagttcttcatcatcgacccaatcagcggcctcatccagactgctcagcgcctggaccgcgagtcgcaggcggtgtacagcctcatcttggtggccagcgacctgggccagccagtgccatacgagactatgcagccgctgcaggtggccctggaggacatcgatgacaacgaaccccttttcgtgaggcctccaaaaggcagcccccagtaccagctgctgacagtgcctgagcactcaccacgcggcaccctcgtgggcaacgtgacaggcgcagtggatgcagatgagggccccaacgcgatcgtgtactacttcatcgcagccggcaacgaagagaagaacttccatctgcagcccgatgggtgtctgctggtgctgcgggacctggaccgggagcgagaagccatcttctccttcatcgtcaaggcctccagcaatcgcagctggacacctccccgtggaccctccccaaccctcgacctggttgctgacctcacactgcaggaggtgcgcgttgtgctagaggacatcaacgaccagccaccacgcttcaccaaggctgagtacactgcaggggtggccaccgacgccaaggtgggctcagagttgatccaggtgctggccctggatgcagacattggcaacaacagccttgtcttctacagcattctggccatccactacttccgggcccttgccaacgactctgaagatgtgggccaggtcttcaccatggggagcatggacggcattctgcgcaccttcgacctcttcatggcctacagccccggctacttcgtggtggacattgtggcccgagacctggcaggccacaacgacacggccatcatcggcatctacatcctgagggacgaccagcgcgtcaagatcgtcattaacgagatccccgaccgtgtgcgcggcttcgaggaggagttcatccacctgctctccaacatcactggggccattgtcaatactgacaatgtgcagttccatgtggacaagaagggccgggtgaactttgcgcagacagaactgcttatccacgtggtgaaccgcgataccaaccgcatcctggacgtggaccgggtgatccagatgatcgatgagaacaaggagcagctacggaatcttttccggaactacaacgtcctggacgtgcagcctgccatctctgtccggctgccggatgacatgtctgccctgcagatggcgatcatcgtcctggctatcctcctgttcctggccgccatgctctttgtcctcatgaactggtactacaggactgtacacaagaggaagctcaaggccattgtggctggctcagctgggaatcgtggcttcatcgacatcatggacatgcctaacaccaacaagtactcctttgatggagccaaccctgtgtggctggatcccttctgtcggaacctggagctggccgcccaggcggagcatgaggatgacctaccggagaacctgagtgagatcgccgacctgtggaacagccccacgcgcacccatggaacttttgggcgtgagccagcagctgtcaagcctgatgatgaccgatacctgcgggctgccatccaggagtatgacaacattgccaagctgggccagatcattcgtgaggggccaatcaagggctcgctgctgaaggtggtcctggaggattacctgcggctcaaaaagctctttgcacagcggatggtgcaaaaagcctcctcctgccactcctccatctctgagctgatacagactgagctggacgaggagccaggagaccacagcccagggcagggtagcctgcgcttccgccacaagccaccagtggagctcaaggggcccgatgggatccatgtggtgcacggcagcacgggcacgctgctggccaccgacctcaacagcctgcccgaggaagaccagaagggcctgggccgctcgctggagacgctgaccgctgccgaggccactgccttcgagcgcaacgcccgcacagaatccgccaaatccacacccctgcacaaacttcgcgacgtgatcatggagacccccctggagatcacagagctgtgactagacagggaagccttgtgggtgtgagcagcacccatccaccgtcccctcccagggagcaagggcagggacagggccggtcgggggggaccctccaaggccaggccttggggacaaccttggcttggccctggcagcccgcatcagctgctcagatcccacttttgccagacgctcattcagcatctgacctctaccttcataagatctgttatttttataagaaaaccaaacaaaaatgttaagcatctaaggacaaggtaaggagggtcactggggcccaagagtctggggaccagcttggctcaggctgagctgaaagaggccaaacaggccctcctccctcccagctccaccccgcaagcaccatcccctccggctaagcaggcgcaagggaggcccagcgcggacatcccctgctggccggacacccgactccagtccaagtctcgctacatttccgccacatccctctctgctggacgtccaggtggaggtggcatccccacgtggacaagaaagtcaatgtcaatgaacaagcattctctccatttcactggcttcccaaatgtgtgcccagcttataaacagaagtgactgatgttccctccggttttgaatgtggagtgtttgtgtgtgttccttttttaaattaagttattccctc

SEQ ID NO: 211500 - DNA, 5747 bp, Artificial Sequence
  derived and/or modified sequence
gcaactgacaatgatgcaggcacctttggggaagtcagctacttcttcagtgatgaccctgacaggttctcgctggacaaggacacgggactcatcatgctgattgccaggctggactatgagctcatccagcgcttcaccctgacgatcattgcccgggacgggggcggcgaggagaccacaggccgggtcaggatcaatgtgttggatgtcaacgacaacgtgcccaccttccagaaggatgcctacgtgggtgctctgcgggagaacgagccttctgtcacacagctggtgcggctccgggcaacagatgaagactcccctcccaacaaccagatcacctacagcattgtcagtgcatctgcctttggcagctacttcgacatcagcctgtacgagggctatggagtgatcagcgtcagtcgccccctggattatgaacagatatccaatgggctgatttatctgacggtcatggccatggatgctggcaacccccctctcaacagcaccgtccctgtcaccatcgaggtgtttgatgagaatgacaaccctcccaccttcagcaagcccgcctacttcgtctccgtggtggagaacatcatggcaggagccacggtgctgttcctgaatgccacagacctggaccgctcccgggagtacggccaggagtccatcatctactccttggaaggctccacccagtttcggatcaatgcccgctcaggggaaatcaccaccacgtctctgcttgaccgagagaccaagtctgaatacatcctcatcgttcgcgcagtggacgggggtgtgggccacaaccagaaaactggcatcgccaccgtaaacatcaccctcctggacatcaatgacaaccaccccacgtggaaggacgcaccctactacatcaacctggtggagatgacccctccagactctgatgtgaccacggtggtggctgttgacccagacctgggggagaatggcaccctggtgtacagcatccagccacccaacaagttctacagcctcaacagcaccacgggcaagatccgcaccacccacgccatgctggaccgggagaaccccgacccccatgaggccgagctgatgcgcaaaatcgtcgtctctgttactgactgtggcaggccccctctgaaagccaccagcagtgccacagtgtttgtgaacctcttggatctcaatgacaatgaccccacctttcagaacctgccttttgtggccgaggtgcttgaaggcatcccggcgggggtctccatctaccaagtggtggccatcgacctcgatgagggcctgaacggcctggtgtcctaccgcatgccggtgggcatgccccgcatggacttcctcatcaacagcagcagcggcgtggtggtcaccaccaccgagctggaccgcgagcgcatcgcggagtaccagctgcgggtggtggccagtgatgcaggcacgcccaccaagagctccaccagcacgctcaccatccatgtgctggatgtgaacgacgagacgcccaccttcttcccggccgtgtacaatgtgtctgtgtccgaggacgtgccacgcgagttccgggtggtctggctgaactgcacggacaacgacgtgggcctcaatgcagagctcagctacttcatcacaggtggcaacgtggatgggaagttcagcgtgggttaccgcgatgccgttgtgagaaccgtggtgggcctggaccgggagaccacagccgcctacatgctcatcctggaggccatcgacaacggccctgtagggaagcgacacacgggcacagccaccgtgttcgtcactgtcctggatgtgaatgacaaccggcccatctttctgcagagcagctatgaggccagcgtccctgaggacatccctgaaggccacagcatcttgcaggaagacttggcctccccctgcatatctcccgccccacccagaagggcctttcagagtagcggggagaaagagacgtcacaatttcccggaaaggagttgagaagagagccagggcccagcaaggcccagaacagagctgctttcacagagcccttggccgaggctcccctcttgggaagtaaacaggcacaagaagaaagggctcctttgcccagggagcaggcgcaacagctccaaggctcagagggagagaagggaggaccctgaaaacaatttgggtgtgcacccacacctctgcccagaggcctcagttgctgggtggggagggaggcccggagtgaatgagtctctttaccaactatggggtttccgactcggaggctgagccaaacagggaatctgggcctgcccactggggcaggctcccgggcttgggagggacagaagcgtgggaggctggcaatgctcccctccctgcatcgggaccaggaggcgggcaggaaagggctggggagcagggagctgactcccagaaacacagagagcccagaaagccctgaggatttgcgagagtgtggtggctagctccagaaggaggaagtagagggttctctcgatcagggcctcagcttgtgaggacttggagcatacccccctggcctggtgcctgaaacccaattgagagccctccccctcctggacttttccttcttcaggcctcagggcagcctcaacccccaccccaacctccaggaagacagtgcctagtggccagcagggcctgctggtgaggtggatggctacaggctgaatccagcctaggatttgcagggaggccccaggggaagcaaaccaggaagaggttactgagcaggaagggaggaaggaacaaaacccttagggaggaggcctgccccactttctaaacccaaagacttggtttctatttacacaatactactcttactgaaatcctagagccagcgagttaatatagggcagccctgagttctcccatttctcagggagaaatgcagcgtctcaggatgacttctccaaggtcctcttggtaagtttcttgtgaagccggactcactttttgagatcagattgacttggaaggaagggacagtgggcttctccaatagagcctgcttggagagaaatctttctagagtcatctgagggaagatgaggctctgtgttatgccagcttccaccaagactcctgcctcagagggtggggacacacccaggctgggccacgcttcactctgtacacagaagcctcatacttctgtgcacagaactggggagtcaaagtgaggggctggacaatgtctggctctctgcaagctcccaagctggtaggaaagagaagacatagacaaaaaggacccatgctgccaagagaatgttccttttcctccccaagagaggtaggagacagtaggggcggctccaggcaggagggcttcacagagtgggtgtgtgtgaagcataagccacagttagtgggtgacaggtctttcagttttcctggagttttggatcaagatgaggctagaaagattaattggagccagctcccagagggcactgcacactgcgctgaggagctttggctatatccatttggcattagggagccagtgaaggttttggagctggggagtggcaagccagagctcactccttggggagacgtggctggctgcactgtgggtcacagcaggatgggggtggggcagctttgtggtgggatcctggccagctgactgggacaggagctgggcagcccaggtcctccctctgcccacccttcaaatttgggacctgaccaaagtgtttaaccctcgcgttgtgaggagaggtcaagggtttgggattctgagaagcccatcctggggtgggactgctttgacgggtcatcagcaaagcactcaccaaaaccacagatagcatccctagtgtgggcaggacttgggaccccacagctgtcctggagaggtccagaccatcccaccctcggggaggctgccgctttccctgggtgaggtgtggagctgctgtgagctgtcctcctccgagtccaggtggcatcacctccagctgctggaaatgccctgcctcttgccactctgtcacagcacccgccctggcctctgaagggagcctcctcgatcatcttcaatcccttcctgattgatcccaacgtgggtgccctgaagaggggccaccaagacggctgccaagaccatgcttggagagccctgtttgctcctcctcccagctggcacccaggcatctgttccaccaggagggaggcagctgctcccacagggcaccaggcagatgctggcagcacccgggaaacccaaggaagagagccccgaggttttgccccagcactgggccagcacagatgccaggacagtgtcttggccccggtgtaggctgagcatttcacttgactaaagggaacctttgccatttggcaacttctccatgctgggctttggcacctggagggcaaggcttctgtggcgagcgagggtgctgcttctaggaggtggttacgagccccaggttgtaccctgtggagcctcaggccaaaggcccagatgaccacgagtgcacatctcttgaccagaagtctttcatcaagcagcagcgagggggtctgcagagaggaaggtgctcttctgaggatcatctttgggaaagggcgctggcctgggcatgcaaggagcttcggggggtgagtgtgtgtcccagactgcttgggccactgtcttcctgcagcctgcagcaccggtctctgaagcaggaggatctacaggtagacctagggggatgtgggggcatgtttgtggacaccccattacatcttggtagattccatgtagtcacagtggctgcggttgtcctcggggcccggcaggggctgtcgagggacggtgggccggccatggcggaagctgtgcagggagaggcgcaaggagcccaggcgcttccagagccggagctggggctcactggggctcccagggtggtggggcatgcactcgtgagccctgcggcggctcgggtccagcgcggccggcttgcagagcgtcatgaacagcagacaggtggccagcaggaggaagatgcaggccagggcgatgagcatggggagggggtcagttgcctctgcaagggtcccgggagtgacgggagctgagagaaaggcgagggggctgatggctggggagctggcgaggctggggccctctgtgctcatggctcctgcaacagcaacaagacagaagctcaaaggcagatcagctggacccagggcagcgggtatagggaagacttacctagggaatgtggatgggggcaaggcactgttaaactggacagcatcatggccacatcacaggttaagacagcaaggtccagagacatcacaagtctaagtgtacacacagctgagcagtgatggagctgggcccaagctcaggccctcttcctgttccaccctgtgcccatctgccatgcagacaagagggcggtggcctgtccgcattttcaaatcaatcctcatgaatcatcacagggtcttaggcctggaaacttaagaccaactctgtcaataacttgctctgtggccaggaacgagttatggatggtaagaggccgcagctgccagggtccctagcagtaatctaataccaaagctgcaaactgggggcccacgggtgtgtttagttgggtccttgccatgtttttatcaatgtaattatgaatattttcaaaataataacagatttcacaaaaat

SEQ ID NO: 211501 - DNA, 3345 bp, Artificial Sequence
  derived and/or modified sequence
atggtgaagagccccatgaacagagagctggtggccacctacgaggtgaccctgagcgtgatcgacaacgccagcgacctgcccgagagaagcgtgagcgtgcccaacgccaagctgaccgtgaacgtgctggacgtgaacgacaacaccccccagttcaagcccttcggcatcacctactacatggagagaatcctggagggcgccacccccggcaccaccctgatcgccgtggccgccgtggaccccgacaagggcctgaacggcctggtgacctacaccctgctggacctggtgccccccggctacgtgcagctggaggacagcagcgccggcaaggtgatcgccaacagaaccgtggactacgaggaggtgcactggctgaacttcaccgtgagagccagcgacaacggcagcccccccagagccgccgagatccccgtgtacctggagatcgtggacatcaacgacaacaaccccatcttcgaccagcccagctaccaggaggccgtgttcgaggacgtgcccgtgggcaccatcatcctgaccgtgaccgccaccgacgccgacagcggcaacttcgccctgatcgagtacagcctgggcgacggcgagagcaagttcgccatcaaccccaccaccggcgacatctacgtgctgagcagcctggacagagagaagaaggaccactacatcctgaccgccctggccaaggacaaccccggcgacgtggccagcaacagaagagagaacagcgtgcaggtggtgatccaggtgctggacgtgaacgactgcagaccccagttcagcaagccccagttcagcaccagcgtgtacgagaacgagcccgccggcaccagcgtgatcaccatgatggccaccgaccaggacgagggccccaacggcgagctgacctacagcctggagggccccggcgtggaggccttccacgtggacatggacagcggcctggtgaccacccagagacccctgcagagctacgagaagttcagcctgaccgtggtggccaccgacggcggcgagccccccctgtggggcaccaccatgctgctggtggaggtgatcgacgtgaacgacaacagacccgtgttcgtgagaccccccaacggcaccatcctgcacatcagagaggagatccccctgagaagcaacgtgtacgaggtgtacgccaccgacaaggacgagggcctgaacggcgccgtgagatacagcttcctgaagaccgccggcaacagagactgggagttcttcatcatcgaccccatcagcggcctgatccagaccgcccagagactggacagagagagccaggccgtgtacagcctgatcctggtggccagcgacctgggccagcccgtgccctacgagaccatgcagcccctgcaggtggccctggaggacatcgacgacaacgagcccctgttcgtgagaccccccaagggcagcccccagtaccagctgctgaccgtgcccgagcacagccccagaggcaccctggtgggcaacgtgaccggcgccgtggacgccgacgagggccccaacgccatcgtgtactacttcatcgccgccggcaacgaggagaagaacttccacctgcagcccgacggctgcctgctggtgctgagagacctggacagagagagagaggccatcttcagcttcatcgtgaaggccagcagcaacagaagctggaccccccccagaggccccagccccaccctggacctggtggccgacctgaccctgcaggaggtgagagtggtgctggaggacatcaacgaccagccccccagattcaccaaggccgagtacaccgccggcgtggccaccgacgccaaggtgggcagcgagctgatccaggtgctggccctggacgccgacatcggcaacaacagcctggtgttctacagcatcctggccatccactacttcagagccctggccaacgacagcgaggacgtgggccaggtgttcaccatgggcagcatggacggcatcctgagaaccttcgacctgttcatggcctacagccccggctacttcgtggtggacatcgtggccagagacctggccggccacaacgacaccgccatcatcggcatctacatcctgagagacgaccagagagtgaagatcgtgatcaacgagatccccgacagagtgagaggcttcgaggaggagttcatccacctgctgagcaacatcaccggcgccatcgtgaacaccgacaacgtgcagttccacgtggacaagaagggcagagtgaacttcgcccagaccgagctgctgatccacgtggtgaacagagacaccaacagaatcctggacgtggacagagtgatccagatgatcgacgagaacaaggagcagctgagaaacctgttcagaaactacaacgtgctggacgtgcagcccgccatcagcgtgagactgcccgacgacatgagcgccctgcagatggccatcatcgtgctggccatcctgctgttcctggccgccatgctgttcgtgctgatgaactggtactacagaaccgtgcacaagagaaagctgaaggccatcgtggccggcagcgccggcaacagaggcttcatcgacatcatggacatgcccaacaccaacaagtacagcttcgacggcgccaaccccgtgtggctggaccccttctgcagaaacctggagctggccgcccaggccgagcacgaggacgacctgcccgagaacctgagcgagatcgccgacctgtggaacagccccaccagaacccacggcaccttcggcagagagcccgccgccgtgaagcccgacgacgacagatacctgagagccgccatccaggagtacgacaacatcgccaagctgggccagatcatcagagagggccccatcaagggcagcctgctgaaggtggtgctggaggactacctgagactgaagaagctgttcgcccagagaatggtgcagaaggccagcagctgccacagcagcatcagcgagctgatccagaccgagctggacgaggagcccggcgaccacagccccggccagggcagcctgagattcagacacaagccccccgtggagctgaagggccccgacggcatccacgtggtgcacggcagcaccggcaccctgctggccaccgacctgaacagcctgcccgaggaggaccagaagggcctgggcagaagcctggagaccctgaccgccgccgaggccaccgccttcgagagaaacgccagaaccgagagcgccaagagcacccccctgcacaagctgagagacgtgatcatggagacccccctggagatcaccgagctgtag

SEQ ID NO: 211502 - DNA, 3639 bp, Artificial Sequence
  derived and/or modified sequence
atgggcagacacgtggccaccagctgccacgtggcctggctgctggtgctgatcagcggctgctggggccaggtgaacagactgcccttcttcaccaaccacttcttcgacacctacctgctgatcagcgaggacacccccgtgggcagcagcgtgacccagctgctggcccaggacatggacaacgaccccctggtgttcggcgtgagcggcgaggaggccagcagattcttcgccgtggagcccgacaccggcgtggtgtggctgagacagcccctggacagagagaccaagagcgagttcaccgtggagttcagcgtgagcgaccaccagggcgtgatcaccagaaaggtgaacatccaggtgggcgacgtgaacgacaacgcccccaccttccacaaccagccctacagcgtgagaatccccgagaacacccccgtgggcacccccatcttcatcgtgaacgccaccgaccccgacctgggcgccggcggcagcgtgctgtacagcttccagccccccagccagttcttcgccatcgacagcgccagaggcatcgtgaccgtgatcagagagctggactacgagaccacccaggcctaccagctgaccgtgaacgccaccgaccaggacaagaccagacccctgagcaccctggccaacctggccatcatcatcaccgacgtgcaggacatggaccccatcttcatcaacctgccctacagcaccaacatctacgagcacagcccccccggcaccaccgtgagaatcatcaccgccatcgaccaggacaagggcagacccagaggcatcggctacaccatcgtgagcggcaacaccaacagcatcttcgccctggactacatcagcggcgtgctgaccctgaacggcctgctggacagagagaaccccctgtacagccacggcttcatcctgaccgtgaagggcaccgagctgaacgacgacagaacccccagcgacgccaccgtgaccaccaccttcaacatcctggtgatcgacatcaacgacaacgcccccgagttcaacagcagcgagtacagcgtggccatcaccgagctggcccaggtgggcttcgccctgcccctgttcatccaggtggtggacaaggacgagacccagggcctgaacagcatgttcgaggtgtacctggtgggcaacaacagccaccacttcatcatcagccccaccagcgtgcagggcaaggccgacatcagaatcagagtggccatccccctggactacgagaccgtggacagatacgacttcgacctgttcgccaacgagagcgtgcccgaccacgtgggctacgccaaggtgaagatcaccctgatcaacgagaacgacaacagacccatcttcagccagcccctgtacaacatcagcctgtacgagaacgtgaccgtgggcaccagcgtgctgaccgtgctggccaccgacaacgacgccggcaccttcggcgaggtgagctacttcttcagcgacgaccccgacagattcagcctggacaaggacaccggcctgatcatgctgatcgccagactggactacgagctgatccagagattcaccctgaccatcatcgccagagacggcggcggcgaggagaccaccggcagagtgagaatcaacgtgctggacgtgaacgacaacgtgcccaccttccagaaggacgcctacgtgggcgccctgagagagaacgagcccagcgtgacccagctggtgagactgagagccaccgacgaggacagcccccccaacaaccagatcacctacagcatcgtgagcgccagcgccttcggcagctacttcgacatcagcctgtacgagggctacggcgtgatcagcgtgagcagacccctggactacgagcagatcagcaacggcctgatctacctgaccgtgatggccatggacgccggcaacccccccctgaacagcaccgtgcccgtgaccatcgaggtgttcgacgagaacgacaacccccccaccttcagcaagcccgcctacttcgtgagcgtggtggagaacatcatggccggcgccaccgtgctgttcctgaacgccaccgacctggacagaagcagagagtacggccaggagagcatcatctacagcctggagggcagcacccagttcagaatcaacgccagaagcggcgagatcaccaccaccagcctgctggacagagagaccaagagcgagtacatcctgatcgtgagagccgtggacggcggcgtgggccacaaccagaagaccggcatcgccaccgtgaacatcaccctgctggacatcaacgacaaccaccccacctggaaggacgccccctactacatcaacctggtggagatgaccccccccgacagcgacgtgaccaccgtggtggccgtggaccccgacctgggcgagaacggcaccctggtgtacagcatccagccccccaacaagttctacagcctgaacagcaccaccggcaagatcagaaccacccacgccatgctggacagagagaaccccgacccccacgaggccgagctgatgagaaagatcgtggtgagcgtgaccgactgcggcagaccccccctgaaggccaccagcagcgccaccgtgttcgtgaacctgctggacctgaacgacaacgaccccaccttccagaacctgcccttcgtggccgaggtgctggagggcatccccgccggcgtgagcatctaccaggtggtggccatcgacctggacgagggcctgaacggcctggtgagctacagaatgcccgtgggcatgcccagaatggacttcctgatcaacagcagcagcggcgtggtggtgaccaccaccgagctggacagagagagaatcgccgagtaccagctgagagtggtggccagcgacgccggcacccccaccaagagcagcaccagcaccctgaccatccacgtgctggacgtgaacgacgagacccccaccttcttccccgccgtgtacaacgtgagcgtgagcgaggacgtgcccagagagttcagagtggtgtggctgaactgcaccgacaacgacgtgggcctgaacgccgagctgagctacttcatcaccggcggcaacgtggacggcaagttcagcgtgggctacagagacgccgtggtgagaaccgtggtgggcctggacagagagaccaccgccgcctacatgctgatcctggaggccatcgacaacggccccgtgggcaagagacacaccggcaccgccaccgtgttcgtgaccgtgctggacgtgaacgacaacagacccatcttcctgcagagcagctacgaggccagcgtgcccgaggacatccccgagggccacagcatcctgcaggaggaggacctggccagcccctgcatcagccccgccccccccagaagagccttccagagcagcggcgagaaggagaccagccagttccccggcaaggagctgagaagagagcccggccccagcaaggcccagaacagagccgccttcaccgagcccctggccgaggcccccctgctgggcagcaagcaggcccaggaggagagagcccccctgcccagagagcaggcccagcagctgcagggcagcgagggcgagaagggcggcccctag

SEQ ID NO: 211503 - DNA, 2187 bp, Artificial Sequence
  derived and/or modified sequence
gccaccgacaacgacgccggcaccttcggcgaggtgagctacttcttcagcgacgaccccgacagattcagcctggacaaggacaccggcctgatcatgctgatcgccagactggactacgagctgatccagagattcaccctgaccatcatcgccagagacggcggcggcgaggagaccaccggcagagtgagaatcaacgtgctggacgtgaacgacaacgtgcccaccttccagaaggacgcctacgtgggcgccctgagagagaacgagcccagcgtgacccagctggtgagactgagagccaccgacgaggacagcccccccaacaaccagatcacctacagcatcgtgagcgccagcgccttcggcagctacttcgacatcagcctgtacgagggctacggcgtgatcagcgtgagcagacccctggactacgagcagatcagcaacggcctgatctacctgaccgtgatggccatggacgccggcaacccccccctgaacagcaccgtgcccgtgaccatcgaggtgttcgacgagaacgacaacccccccaccttcagcaagcccgcctacttcgtgagcgtggtggagaacatcatggccggcgccaccgtgctgttcctgaacgccaccgacctggacagaagcagagagtacggccaggagagcatcatctacagcctggagggcagcacccagttcagaatcaacgccagaagcggcgagatcaccaccaccagcctgctggacagagagaccaagagcgagtacatcctgatcgtgagagccgtggacggcggcgtgggccacaaccagaagaccggcatcgccaccgtgaacatcaccctgctggacatcaacgacaaccaccccacctggaaggacgccccctactacatcaacctggtggagatgaccccccccgacagcgacgtgaccaccgtggtggccgtggaccccgacctgggcgagaacggcaccctggtgtacagcatccagccccccaacaagttctacagcctgaacagcaccaccggcaagatcagaaccacccacgccatgctggacagagagaaccccgacccccacgaggccgagctgatgagaaagatcgtggtgagcgtgaccgactgcggcagaccccccctgaaggccaccagcagcgccaccgtgttcgtgaacctgctggacctgaacgacaacgaccccaccttccagaacctgcccttcgtggccgaggtgctggagggcatccccgccggcgtgagcatctaccaggtggtggccatcgacctggacgagggcctgaacggcctggtgagctacagaatgcccgtgggcatgcccagaatggacttcctgatcaacagcagcagcggcgtggtggtgaccaccaccgagctggacagagagagaatcgccgagtaccagctgagagtggtggccagcgacgccggcacccccaccaagagcagcaccagcaccctgaccatccacgtgctggacgtgaacgacgagacccccaccttcttccccgccgtgtacaacgtgagcgtgagcgaggacgtgcccagagagttcagagtggtgtggctgaactgcaccgacaacgacgtgggcctgaacgccgagctgagctacttcatcaccggcggcaacgtggacggcaagttcagcgtgggctacagagacgccgtggtgagaaccgtggtgggcctggacagagagaccaccgccgcctacatgctgatcctggaggccatcgacaacggccccgtgggcaagagacacaccggcaccgccaccgtgttcgtgaccgtgctggacgtgaacgacaacagacccatcttcctgcagagcagctacgaggccagcgtgcccgaggacatccccgagggccacagcatcctgcaggaggacctggccagcccctgcatcagccccgccccccccagaagagccttccagagcagcggcgagaaggagaccagccagttccccggcaaggagctgagaagagagcccggccccagcaaggcccagaacagagccgccttcaccgagcccctggccgaggcccccctgctgggcagcaagcaggcccaggaggagagagcccccctgcccagagagcaggcccagcagctgcagggcagcgagggcgagaagggcggcccctag

SEQ ID NO: 211504 - protein, 270 aa, Artificial Sequence
  derived and/or modified sequence
MAPWGKRLAGVRGVLLDISGVLYDSGAGGGTAIAGSVEAVARLKRSRLKVRFCTNESQKSRAELVGQLQRLGFDISEQEVTAPAPAACQILKEQGLRPYLLIHDGVRSEFDQIDTSNPNCVVIADAGESFSYQNMNNAFQVLMELEKPVLISLGKGRYYKETSGLMLDVGPYMKALEYACGIKAEVVGKPSPEFFKSALQAIGVEAHQAVMIGDDIVGDVGGAQRCGMRALQVRTGKFRPSDEHHPEVKADGYVDNLAEAVDLLLQHADK

SEQ ID NO: 211505 - DNA, 813 bp, Artificial Sequence
  derived and/or modified sequence
atggccccctggggcaagagactggccggcgtgagaggcgtgctgctggacatcagcggcgtgctgtacgacagcggcgccggcggcggcaccgccatcgccggcagcgtggaggccgtggccagactgaagagaagcagactgaaggtgagattctgcaccaacgagagccagaagagcagagccgagctggtgggccagctgcagagactgggcttcgacatcagcgagcaggaggtgaccgcccccgcccccgccgcctgccagatcctgaaggagcagggcctgagaccctacctgctgatccacgacggcgtgagaagcgagttcgaccagatcgacaccagcaaccccaactgcgtggtgatcgccgacgccggcgagagcttcagctaccagaacatgaacaacgccttccaggtgctgatggagctggagaagcccgtgctgatcagcctgggcaagggcagatactacaaggagaccagcggcctgatgctggacgtgggcccctacatgaaggccctggagtacgcctgcggcatcaaggccgaggtggtgggcaagcccagccccgagttcttcaagagcgccctgcaggccatcggcgtggaggcccaccaggccgtgatgatcggcgacgacatcgtgggcgacgtgggcggcgcccagagatgcggcatgagagccctgcaggtgagaaccggcaagttcagacccagcgacgagcaccaccccgaggtgaaggccgacggctacgtggacaacctggccgaggccgtggacctgctgctgcagcacgccgacaagtag

SEQ ID NO: 211506 - DNA, 813 bp, Artificial Sequence
  derived and/or modified sequence
atggccccctggggtaaaagactggctggggtgcgtggtgtcctgctggatatctcaggagtgctgtacgactctggagcgggcggcgggacggctattgccggctctgtcgaggctgtagcccgactcaagagaagccgtctgaaggtgaggttctgtaccaacgagtcgcagaaatcaagggcagagcttgtgggacagctacagcgcctggggttcgatatctcggagcaggaggtgacagcaccagccccagccgcctgccaaatattaaaggagcagggccttaggccatacctgctgattcacgacggggtgagatctgaatttgaccaaatcgatacgagtaaccctaactgcgtcgtaatagccgacgcgggggagtcattcagctaccagaacatgaataatgcattccaggttctgatggagcttgagaaacccgtgcttatctccctaggtaaaggaagatattacaaggagacctcgggacttatgctggatgtgggtccatatatgaaagctcttgagtacgcctgcgggatcaaagccgaggtagtggggaaaccctcacccgaattttttaaatctgcactgcaggcgataggtgtggaggctcatcaggcggtgatgatcggcgatgacattgtgggagacgttggcggcgcccagcggtgcggaatgagagcactgcaggtacgcacgggtaagttccgacccagcgatgaacaccacccggaggtcaaggctgatggatacgttgacaaccttgccgaagctgtcgaccttcttctacagcacgcagataaatag

SEQ ID NO: 211507 - DNA, 1622 bp, Artificial Sequence
  derived and/or modified sequence
gcggagctgaggagcagggccgggcgccatggcaccgtggggcaagcggctggctggcgtgcgcggggtgctgcttgacatctcgggcgtgctgtacgacagcggcgcgggcggcggcacggccatcgccggctcggtggaggcggtggccagactgaagcgttcccggctgaaggtgaggttctgcaccaacgagtcgcagaagtcccgggcagagctggtggggcagcttcagaggctgggatttgacatctctgagcaggaggtgaccgccccggcaccagctgcctgccagatcctgaaggagcaaggcctgcgaccatacctgctcatccatgacggagtccgctcagaatttgatcagatcgacacatccaacccaaactgtgtggtaattgcagacgcaggagaaagcttttcttatcaaaacatgaataacgccttccaggtgctcatggagctggaaaaacctgtgctcatatcactgggaaaagggcgttactacaaggagacctctggcctgatgctggacgttggtccctacatgaaggcgcttgagtatgcctgtggcatcaaagccgaggtggtggggaagccttctcctgagtttttcaagtctgccctgcaagcgataggagtggaagcccaccaggccgtcatgattggggacgatatcgtgggcgacgtcggcggtgcccagcggtgtggaatgagagcgctgcaggtgcgcaccgggaagttcaggcccagtgacgagcaccatccggaagtgaaggctgatgggtacgtggacaacctcgcagaggcagtggacctgctgctgcagcacgccgacaagtgatggcctcctgggagagccccgcctcctccacccctgcctctcctccacccctgcctcccctccacccctgcctctcctccacccgcccaggagagccccacctcctccacccctgcctctcctccacccctgcctcccctccacctgccccagtgcccagaccaaccaaggccctgacagccctgccttctgccctctgccctgcatgggcaggcatttgttccctacctgggtggcctgctcccctgcctgggccctgacttcagctccctgtagtgaagtccaggagggtgggacaggcctgtcaggcctctgggaatctcccaaatcccagaactcaccactcaccatgggcctttaaatgcagtaaactccacctaaccagattcaggggcactatgcccactgcctcctcttcagactctttgcatttcagtgaagagcctggaagaaacccaggggcctcctatgcacagatcttgcagcccagaaccaagtcagcctccctgcgactgcccaggcacactgcccaccaccccacccccgaaacaatgccagcccgctgctttttctatcctcccagtcacctttgcagacaaagaccaggggcagctcccgagggcactgtgaaggctcccatgccacacagtgagaactgtagcctctgcgtccaaggcacacagggtactttctggacccactgctggacagacttgaaggtgtcatgcccggtgtgtgcaggaggaaactaacagttcagtaaactctgccttgaccagca

SEQ ID NO: 211508 - DNA, 813 bp, Artificial Sequence
  derived and/or modified sequence
atggccccctggggcaagaggctggccggcgtgcggggcgtgctgctggacatctctggagtgctgtatgattctggagctgggggcggcacagccatcgccggctctgtggaggccgtggcccggctgaagaggagccggctgaaggtgcgcttctgcaccaatgaaagccagaagagcagagctgagctggtgggccagctgcagaggctgggctttgacatcagcgagcaggaggtgacagccccagccccagctgcctgccagatcctgaaggagcagggcctgcggccctacctgctgattcatgatggagtgcgctcagaatttgaccagattgacaccagcaaccccaactgtgtggtgattgctgatgctggggagagcttctcctaccagaacatgaacaatgccttccaggtgctgatggagctggagaagcctgtgctgatcagcctgggcaagggccgctactacaaggagaccagcggcctgatgctggatgtgggcccctacatgaaggccctggagtatgcctgtggcatcaaggccgaggtggtgggcaagcccagccctgagttcttcaagagcgccctgcaggccatcggcgtggaggcccaccaggccgtgatgattggagatgacatcgtgggagatgtgggcggggcccagagatgtggcatgagggccctgcaggtgaggacaggcaagttccggcccagtgatgagcaccaccctgaggtgaaggcagatggctacgtggacaacctggccgaggccgtggacctgctgctgcagcacgccgacaagtag

SEQ ID NO: 211509 - DNA, 813 bp, Artificial Sequence
  derived and/or modified sequence
atggccccctggggcaagcggctggccggcgtgcggggcgtgctgttggacataagcggcgtgctctacgatagtggagccggcgggggtacagccatcgctgggtctgttgaagcagttgcgagactcaagaggagtcgtctcaaggttcggttctgcaccaatgaaagtcagaaatctcgcgctgagctggtgggccagcttcagaggctcggatttgatatttctgagcaggaagtgaccgccccagcgccagctgcttgtcaaatcctgaaggagcaaggtctaaggccatatctcctaatccacgacggcgtaaggtctgagtttgaccaaatcgataccagcaaccccaactgcgtggtgattgctgatgctggggagtccttcagttatcagaacatgaacaatgccttccaagtgcttatggaactggaaaaaccagtcctcatcagtctagggaaaggccgttattataaagagacatctgggctgatgcttgatgtgggcccatatatgaaggcccttgagtatgcctgtgggattaaagcggaagttgtaggcaagccttctccagagttttttaaatccgctttgcaggccatcggggttgaagctcaccaggccgtcatgattggagatgacatcgtgggtgatgtggggggcgcacagcggtgtggcatgcgggcccttcaagtcagaacagggaagttcagaccatccgacgaacaccacccagaagtcaaggctgatggttatgttgacaaccttgcggaggccgttgacctactgctgcagcatgccgataaatag

SEQ ID NO: 211510 - DNA, 813 bp, Artificial Sequence
  derived and/or modified sequence
atggccccttgggggaagcggctggcaggcgttaggggagtgctgctcgacataagcggagtgctgtacgacagtggagccggaggcggaactgcaattgctggtagcgtagaggcggtggcacgtctcaaaagatcccggctgaaggtacgattctgcacaaatgagagccaaaagtccagggctgagctggtaggtcaactgcaacggcttggtttcgatatctctgagcaggaggtcaccgccccagcgcctgccgcttgccagatcctcaaggagcagggattacgcccttaccttttgattcatgatggggtccggtccgaatttgatcagatcgatacgagcaatcctaactgcgttgtgatcgccgacgcgggtgagtcattttcctatcagaacatgaataacgcctttcaggtcctcatggagctcgagaagcctgtgctcatttcactgggaaagggtaggtattataaagagactagtgggttaatgctggatgtgggcccttatatgaaagcgctcgagtacgcttgcggaatcaaggctgaggtggtgggcaagccttcacccgagttctttaaatcagccttgcaagctatcggcgtggaagctcatcaggcagtgatgatcggggacgacatcgtgggcgacgtgggaggggctcagcggtgcggcatgagggcgctgcaggtccgtactggcaaatttagacctagcgacgaacaccatcccgaagtgaaggccgacggttacgtagataatctcgccgaggctgtggatctcttactgcagcacgctgataagtag

SEQ ID NO: 211511 - protein, 138 aa, Artificial Sequence
  derived and/or modified sequence
MKLPIFIADAFTARAFRGNPAAVCLLENELDEDMHQKIAREMNLSETAFIRKLHPTDNFAQKNMNSTLTFVTLSGELRARRAEDGIVLDLPLYPAHPQDFHEVEDLIKTAIGNTLVQDICYSPDTQKLLVRLSDVYNR

SEQ ID NO: 211512 - protein, 288 aa, Artificial Sequence
  derived and/or modified sequence
MKLPIFIADAFTARAFRGNPAAVCLLENELDEDMHQKIAREMNLSETAFIRKLHPTDNFAQSSCFGLRWFTPASEVPLCGHATLASAAVLFHKIKNMNSTLTFVTLSGELRARRAEDGIVLDLPLYPAHPQDFHEVEDLIKTAIGNTLVQDICYSPDTQKLLVRLSDVYNRSFLENLKVNTENLLQVENTGKVKGLILTLKGEPGGQTQAFDFYSRYFAPWVGVAEDPVTGSAHAVLSSYWSQHLGKKEMHAFQCSHRGGELGISLRPDGRVDIRGGAAVVLEGTLTA

SEQ ID NO: 211513 - protein, 255 aa, Artificial Sequence
  derived and/or modified sequence
MHQKIAREMNLSETAFIRKLHPTDNFAQSSCFGLRWFTPASEVPLCGHATLASAAVLFHKIKNMNSTLTFVTLSGELRARRAEDGIVLDLPLYPAHPQDFHEVEDLIKTAIGNTLVQDICYSPDTQKLLVRLSDVYNRSFLENLKVNTENLLQVENTGKVKGLILTLKGEPGGQTQAFDFYSRYFAPWVGVAEDPVTGSAHAVLSSYWSQHLGKKEMHAFQCSHRGGELGISLRPDGRVDIRGGAAVVLEGTLTA

SEQ ID NO: 211514 - DNA, 867 bp, Artificial Sequence
  derived and/or modified sequence
atgaagctgccaatttttatcgccgatgcttttacagcaagagctttcagagggaaccccgctgccgtctgcctgctcgaaaatgaattggatgaggacatgcaccagaagatcgcaagagaaatgaatctgtccgaaaccgccttcatcagaaagctacatccaactgataatttcgctcagtcctcctgcttcggcctccgttggttcactccggcgtctgaggtgcctctgtgcgggcacgcaacactggccagcgccgccgtcctttttcataaaatcaaaaacatgaacagcacacttacattcgtcacactctcaggcgagctcagagccaggcgggctgaggacgggatcgtgttggacttgccgctctatccagctcaccctcaggatttccatgaagtcgaggatctgattaagacagcaatcggtaataccctcgttcaggatatctgctattctcctgatacgcagaaattgcttgtcaggctgtccgatgtttacaataggtccttcctggagaacctgaaagtgaataccgagaatcttctccaagtcgagaatactggaaaggtgaaggggttgatcctgaccctcaaaggagagccaggtgggcagacccaggcttttgacttctactctcgatacttcgcaccctgggtcggtgtggcagaggacccggtaactggatcagctcacgcagtgcttagcagttattggagtcaacacttaggcaagaaagaaatgcacgcctttcagtgtagtcataggggaggagaactgggaatttccctgcggcctgatggaagagtcgatattcggggcggcgcagccgtcgtactcgagggcaccctgaccgcttag

SEQ ID NO: 211515 - DNA, 768 bp, Artificial Sequence
  derived and/or modified sequence
atgcatcagaaaatcgcgcgagaaatgaacctcagcgaaactgcctttatccgcaagctccaccccaccgataatttcgcccaaagcagctgttttgggctgagatggttcacaccagcctcggaggtcccactctgtgggcacgccacactcgctagcgcggctgtgttattccacaagattaaaaatatgaattctactctgacttttgttaccctgtcgggcgagctcagggcccgccgcgccgaggacggcatcgtcctggatctgcctttataccccgcacaccctcaagactttcacgaggtcgaggaccttattaaaaccgctataggtaacaccctcgtgcaggacatttgttattcaccagacactcagaagttgctggtgagactgtccgatgtgtacaataggtctttcctcgaaaacctgaaggtcaacacagagaacctgctgcaggtcgagaatacgggtaaagtgaagggcctgattctgactctcaaaggcgaaccaggaggacagacacaagccttcgacttctacagtaggtactttgccccatgggtgggggtcgccgaggaccctgtgacaggatcagcccacgctgttctgagctcttactggagccagcacctcggcaaaaaagaaatgcacgcattccaatgtagccaccgcggcggggaattggggattagcctccgccccgacggcagagtggatatcagagggggtgccgcagtcgtactcgagggcacattgaccgcctag

SEQ ID NO: 211516 - DNA, 867 bp, Artificial Sequence
  derived and/or modified sequence
atgaagttgccaatctttatcgccgacgccttcaccgctcgcgctttccgcgggaatccagctgctgtgtgcctgttggagaacgaactggatgaagatatgcaccagaagatagcccgagagatgaacctgtcagagaccgccttcattcgaaagttacatccaaccgataactttgcccagtccagttgttttggcctcaggtggttcacccccgcaagcgaagtgcctttgtgtggccacgcgacactggcctcggccgcggttctgtttcataagatcaagaacatgaactccactctgacctttgtcacattgtcaggcgaactcagagcacgtagagcagaggacggaatcgtcctcgatctcccactgtaccctgcccatcctcaggactttcacgaagtcgaggacctcatcaaaactgccatcggtaatacactggtgcaagacatctgctattcccctgatacccagaagcttttagtgcgtctgagcgacgtctataatagatccttcttggagaacctgaaggtcaacacagagaacttgttgcaggtggaaaatacaggaaaggtaaagggactaatcctgactctcaagggggagcctggcggccagacccaagccttcgatttctacagtcgctactttgctccgtgggtgggggtggcggaagatccagttacaggaagtgcccacgccgttctgtctagctactggtcccaacatctgggcaagaaggaaatgcatgccttccagtgctcccaccggggcggagaactcggaattagccttagacctgatggccgcgtggacattcgtggcggggccgctgtggtgcttgagggaaccctcacagcatag

SEQ ID NO: 211517 - DNA, 867 bp, Artificial Sequence
  derived and/or modified sequence
atgaagctgcccatcttcatcgcagatgccttcaccgcccgggccttccggggcaacccagctgctgtgtgcctgctggagaatgagctggatgaggacatgcaccagaagatcgcccgggagatgaacctgtctgaaacagccttcatcaggaagctgcaccccacagacaactttgcccagagcagctgcttcggcctgcgctggttcaccccagccagcgaggtgcccctgtgtggccacgccaccctggccagcgctgctgtgctcttccacaagatcaagaacatgaacagcaccctgacctttgtgaccctgtctggagagctgcgggccaggagagcagaagatggcatcgtgctggacctgcccctgtacccagcccacccccaggacttccacgaggtggaggacctgatcaagacagccatcggcaacaccctggtgcaggacatctgctacagcccagacacccagaagctgctggtgcggctgagtgatgtgtacaacagaagcttcctggagaacctgaaggtgaacacagagaacctgctgcaggtggagaacacaggcaaggtgaagggcctcatcctgaccctgaagggggagcccggcggccagacccaggcctttgacttctacagccgctactttgccccctgggtgggcgtggccgaggaccctgtgacaggcagcgcccatgctgtgctgagcagctactggagccagcacctgggcaagaaggagatgcacgccttccagtgcagccacagaggaggagagctgggcatcagcctgcggccagatggccgggtggacatccggggcggcgctgctgtggtgctggagggcaccctgacagcctag

SEQ ID NO: 211518 - DNA, 768 bp, Artificial Sequence
  derived and/or modified sequence
atgcaccagaagatcgcccgggagatgaacctgtctgaaacagccttcatcaggaagctgcaccccacagacaactttgcccagagcagctgcttcggcctgcgctggttcaccccagccagcgaggtgcccctgtgtggccacgccaccctggccagcgctgctgtgctcttccacaagatcaagaacatgaacagcaccctgacctttgtgaccctgagcggggagctgcgggcccggcgggcagaagatggcatcgtgctggacctgcccctgtacccagcccacccccaggacttccacgaggtggaggacctgatcaagacagccatcggcaacaccctggtgcaggacatctgctacagcccagacacccagaagctgctggtgcggctgagtgatgtgtacaacagaagcttcctggagaacctgaaggtgaacacagagaacctgctgcaggtggagaacacaggcaaggtgaagggcctcatcctgaccctgaagggggagcccggcggccagacccaggcctttgacttctacagccgctactttgccccctgggtgggcgtggctgaagatcctgtgactggaagtgcccatgctgtgctgagcagctactggagccagcacctgggcaagaaggagatgcacgccttccagtgcagccaccggggcggggagctgggcatcagcctgcggccagatggccgggtggacatccggggcggcgctgctgtggtgctggagggcaccctgacagcctag

SEQ ID NO: 211519 - DNA, 867 bp, Artificial Sequence
  derived and/or modified sequence
atgaagctgcccatcttcatcgccgacgccttcaccgcccgggcctttcggggaaatcccgccgctgtgtgtttgttggagaacgagctggatgaagacatgcaccagaagattgctagggagatgaacctgagcgagaccgcctttatccgcaagcttcaccccaccgataactttgcccagagcagctgctttgggcttcgctggtttacacccgcaagtgaggtaccgttatgtgggcatgccaccctagcctccgccgcagtcttgtttcacaagatcaaaaatatgaactccacactgacctttgtgacgctgtcaggggaactgagggctcgccgcgctgaggatgggatcgtgctggatcttcccctgtatcctgctcacccacaagattttcatgaagtggaagacttgattaagactgccattgggaatacgttggtgcaggacatctgctattcccccgatacacagaaactccttgtccgcctttccgacgtgtacaaccgatcgttcttggagaacttgaaagttaacacagaaaatcttttacaggttgagaatacagggaaggtgaagggcttgattttgacattaaagggggagcctggggggcagacacaagcttttgacttctactcacggtatttcgctccttgggtcggggtcgctgaggatcccgtaacagggagcgcccacgccgtgttaagcagctactggagccagcatttgggcaaaaaagaaatgcacgcatttcagtgcagccacaggggcggcgaattaggtatcagcctgcgacccgatggtcgagtcgacattagagggggagccgcagtcgtccttgaagggacactgactgcttag

SEQ ID NO: 211520 - DNA, 768 bp, Artificial Sequence
  derived and/or modified sequence
atgcaccagaagatcgcccgggagatgaacctgagcgagaccgcctttattcggaagctgcatccgactgataactttgcgcaatcatcttgcttcggcctcagatggttcacacccgcctcagaggtgccactctgtgggcatgcaaccctcgcaagcgcagccgttctcttccataaaattaagaatatgaactcaactcttacattcgtaactttgtctggcgagctgcgagccaggcgtgccgaggatggtattgtgcttgacctgccgctttaccccgcccatccgcaggattttcatgaagtcgaggatttaataaagaccgccattgggaatactctggtacaggacatatgctattcccctgacacacagaagctcctggtgaggctgtctgacgtgtataaccgatccttcctggagaacctgaaggttaacacagagaacctgctccaggtcgagaacaccggcaaggtcaaggggctgatcctcactctgaagggagagcccgggggacagacccaggctttcgatttttactcccgatattttgccccctgggttggagtagcagaggaccccgttactgggagtgctcacgctgtcttatcctcctattggagccaacacttgggcaagaaagaaatgcatgctttccaatgctcccaccggggtggggagctaggcattagcctgcgccccgacggacgcgttgatattcgagggggggccgctgtcgtcttggagggcactctgaccgcctag

SEQ ID NO: 211521 - DNA, 867 bp, Artificial Sequence
  derived and/or modified sequence
atgaagctgcccatcttcatcgccgacgccttcaccgcccgggcctttcgggggaatcccgcggcagtgtgtctgcttgaaaatgagttagatgaggatatgcatcagaagattgcaagggaaatgaaccttagcgagacagctttcatccgcaaactgcatccgactgacaattttgcacagtcatcctgctttggtctgcggtggtttacccctgcctccgaggtgcctctctgtgggcatgcaaccctcgcctccgcggccgttctcttccacaagataaaaaacatgaactcgactctaacatttgtcacattatcaggcgaattgcgcgcacgccgagccgaagacggcatcgtgcttgatctgcctttgtacccggcccatccgcaagatttccacgaggttgaggatttaattaaaaccgctattggcaatacactggtgcaggacatctgctattccccagacactcaaaaactactggtgcgcctgtccgacgtttacaaccggtcctttctggagaacctcaaggtgaatacggaaaatttactgcaggtggagaataccggcaaggttaagggtctgattctcacactcaaaggggagccaggaggccaaacccaggcctttgatttttactctcgctacttcgctccctgggtgggggtcgccgaggaccctgtgacgggcagcgcgcacgcggtcctctcttcatattggtctcagcaccttgggaagaaggagatgcatgcattccagtgcagccaccgtgggggggaactgggcatatcactgcggccagatggccgggtggacatcagaggtggagccgccgttgtgcttgagggtacgttaaccgcatag

SEQ ID NO: 211522 - DNA, 2165 bp, Artificial Sequence
  derived and/or modified sequence
gcctcctttgtcctggatttgggagttgagcaccttcgtcgccattggctttcctcccccagctccagcctctctcatcttgggaatctgcgtcagaagtcactcgcagtcccgtcagcccagaagaagacgtaaagcaggctaccagcaattttgagaacttgcaaaaacagcttgcaaggaaaatgaagcttcctattttcatagcagatgcattcacagcaagagcatttcgtgggaatcctgctgctgtttgcctcctagaaaatgaattggatgaagacatgcatcagaaaattgcaagggagatgaacctctctgaaactgcttttatccgaaaactgcacccgacagacaactttgcacaaagttcctgctttggactgagatggtttacaccagcgagtgaggtcccactctgtggccatgccaccctggcttctgcagctgtgctgtttcacaaaataaaaaacatgaatagcacgctcacgtttgtcactctgagtggagaactaagggccagacgagcagaggatggcatcgtcctggacttgcctctttatccagcccacccccaggacttccatgaagtagaggacttgataaagactgccataggcaacacactggtccaggacatctgttattctccagatacccaaaagctcctcgtccgcctcagtgacgtttacaacaggtcgtttctggagaacctgaaagtgaacacggagaatctgctgcaagttgaaaacacagggaaggtgaaagggcttattcttacccttaaaggagagcctggtgggcagacccaagcatttgacttttactcaagatattttgcaccgtgggttggtgtggctgaagacccagtgacagggtctgcacacgctgttctcagcagctactggtcccagcatctggggaagaaagaaatgcatgcttttcagtgttcccaccgaggaggagagctgggaatttcccttcgtccagacggaagggttgacattagaggaggtgcagctgttgttttagagggcacactgacagcctagaggtggttatgctgtgacgctgctgtctctaaccaccaagtattttctgcttaaaaagaaatgtaaggggctgcctttagcaaatgtgcgtagtagtctacttaatcctcatgttaaaaatcgaaaaatgggccaggcgcagtggctcatgcctgtaatcgtagcactttgagaggccaaggtgggtggatcacctgaggtcaggggttcgacaccagcctggccaacatggtgaaacctcgtctctactacaaatacaaaaattagctgggtgtggtgccacatgcctgtaattccagctacttgggaggctgaggcatggagaatcgcttgaacccaggaggcagaagttgcagtgagcagagatcacaccactgcactccagcctgggcaacagagtaagactccatccacacacacacacacacacacaaaattgaaaagtgaagacattttaatggagatttaatagtgcttccagactaatgaactaatggagttttggctccactcatgagtgtatttgaaatgtaagtaaccagctacaaagaataatgtcacttcatttgattatgactaccaatcaagagaaggaggaatacatttctgaggagtgatactaaaccatttgagcttaaatgagtacctgattttgcagccattaaaatgagtcaataactatgtggaaatatagaaaaatattttataatataatactaagaaagaggacagtaggccataaagtgttagcagtgttatgctatgtctatataaataagcatgggccattaaaaatagcaaactgaaaacagttcatgtgtggggggcaagtttagaagtaattttaatgtatctaagaagtgatttcctttattgttgtactcaggtacgaagactaaaaatcaggatgaatccagaaaattaacacaaaaaagtatgtattaggctacttcctgtcatagtgaaattaaacactcaaagtaatgtaatctcagctgggcgtggcggctcatgcctgtaatcccagcactttggcaggacaaggcaggaggatcacttgaacctaggagttcgagaccagcctgggcaacacagcgagaacttgtctctatt

SEQ ID NO: 211523 - DNA, 2449 bp, Artificial Sequence
  derived and/or modified sequence
aagtgccttgaattccttggtaattatttccttttaagcgtgtaactcttattattgctaaactgctttttaagttaatggtagttgttgtccaaaggaagtctgatctgtgtttttgaaacctcaatgatcgtctgtttctaattaaggaattggatgaagacatgcatcagaaaattgcaagggagatgaacctctctgaaactgcttttatccgaaaactgcacccgacagacaactttgcacaaagttcctgctttggactgagatggtttacaccagcgagtgaggtcccactctgtggccatgccaccctggcttctgcagctgtgctgtttcacaaaataaaaaacatgaatagcacgctcacgtttgtcactctgagtggagaactaagggccagacgagcagaggatggcatcgtcctggacttgcctctttatccagcccacccccaggacttccatgaagtagaggacttgataaagactgccataggcaacacactggtccaggacatctgttattctccagatacccaaaagctcctcgtccgcctcagtgacgtttacaacaggtcgtttctggagaacctgaaagtgaacacggagaatctgctgcaagttgaaaacacagggaaggtgaaagggcttattcttacccttaaaggagagcctggtgggcagacccaagcatttgacttttactcaagatattttgcaccgtgggttggtgtggctgaagacccagtgacagggtctgcacacgctgttctcagcagctactggtcccagcatctggggaagaaagaaatgcatgcttttcagtgttcccaccgaggaggagagctgggaatttcccttcgtccagacggaagggttgacattagaggaggtgcagctgttgttttagagggcacactgacagcctagaggtggttatgctgtgacgctgctgtctctaaccaccaagtattttctgcttaaaaagaaatgtaaggggctgcctttagcaaatgtgcgtagtagtctacttaatcctcatgttaaaaatcgaaaaatgggccaggcgcagtggctcatgcctgtaatcgtagcactttgagaggccaaggtgggtggatcacctgaggtcaggggttcgacaccagcctggccaacatggtgaaacctcgtctctactacaaatacaaaaattagctgggtgtggtgccacatgcctgtaattccagctacttgggaggctgaggcatggagaatcgcttgaacccaggaggcagaagttgcagtgagcagagatcacaccactgcactccagcctgggcaacagagtaagactccatccacacacacacacacacacacaaaattgaaaagtgaagacattttaatggagatttaatagtgcttccagactaatgaactaatggagttttggctccactcatgagtgtatttgaaatgtaagtaaccagctacaaagaataatgtcacttcatttgattatgactaccaatcaagagaaggaggaatacatttctgaggagtgatactaaaccatttgagcttaaatgagtacctgattttgcagccattaaaatgagtcaataactatgtggaaatatagaaaaatattttataatataatactaagaaagaggacagtaggccataaagtgttagcagtgttatgctatgtctatataaataagcatgggccattaaaaatagcaaactgaaaacagttcatgtgtggggggcaagtttagaagtaattttaatgtatctaagaagtgatttcctttattgttgtactcaggtacgaagactaaaaatcaggatgaatccagaaaattaacacaaaaaagtatgtattaggctacttcctgtcatagtgaaattaaacactcaaagtaatgtaatctcagctgggcgtggcggctcatgcctgtaatcccagcactttggcaggacaaggcaggaggatcacttgaacctaggagttcgagaccagcctgggcaacacagcgagaacttgtctctattaaaaaaaaaaaaaggaatgtaatttcaatctttttcttgatatatggcttgagaatgataatgtaaaaggaattcttctcttacttcaataaaatgggttttaacataactttaaattcagttaaatatacaatattgaatacctatagttgactttgggatggggactttttcaagtcattaagagtgtttgtttaaggtgatctcattgatggtagttctcagccgtctcaaaaactgcaagctaatcagtcagacattctttaatgaccccaattttttcactttaattgttaccatgttttctatttttactgatttttgctaaagcatgtaagagtgaatttattatagcagtaatcttgtgtttctcctgatgtgcaataaatcaataattcaccagc

SEQ ID NO: 211524 - DNA, 2587 bp, Artificial Sequence
  derived and/or modified sequence
gaattacaaaggaggccgtctgcctcctttgtcctggatttgggagttgagcaccttcgtcgccattggctttcctcccccagctccagcctctctcatcttgggaatctgcgtcagaagtcactcgcagtcccgtcagcccagaagacgtaaagcaggctaccagcaattttgagaacttgcaaaaacagcttgcaaggaaaatgaagcttcctattttcatagcagatgcattcacagcaagagcatttcgtgggaatcctgctgctgtttgcctcctagaaaatgaattggatgaagacatgcatcagaaaattgcaagggagatgaacctctctgaaactgcttttatccgaaaactgcacccgacagacaactttgcacaaagttcctgctttggactgagatggtttacaccagcgagtgaggtcccactctgtggccatgccaccctggcttctgcagctgtgctgtttcacaaaataaaaaacatgaatagcacgctcacgtttgtcactctgagtggagaactaagggccagacgagcagaggatggcatcgtcctggacttgcctctttatccagcccacccccaggacttccatgaagtagaggacttgataaagactgccataggcaacacactggtccaggacatctgttattctccagatacccaaaagctcctcgtccgcctcagtgacgtttacaacaggtcgtttctggagaacctgaaagtgaacacggagaatctgctgcaagttgaaaacacagggaaggtgaaagggcttattcttacccttaaaggagagcctggtgggcagacccaagcatttgacttttactcaagatattttgcaccgtgggttggtgtggctgaagacccagtgacagggtctgcacacgctgttctcagcagctactggtcccagcatctggggaagaaagaaatgcatgcttttcagtgttcccaccgaggaggagagctgggaatttcccttcgtccagacggaagggttgacattagaggaggtgcagctgttgttttagagggcacactgacagcctagaggtggttatgctgtgacgctgctgtctctaaccaccaagtattttctgcttaaaaagaaatgtaaggggctgcctttagcaaatgtgcgtagtagtctacttaatcctcatgttaaaaatcgaaaaatgggccaggcgcagtggctcatgcctgtaatcgtagcactttgagaggccaaggtgggtggatcacctgaggtcaggggttcgacaccagcctggccaacatggtgaaacctcgtctctactacaaatacaaaaattagctgggtgtggtgccacatgcctgtaattccagctacttgggaggctgaggcatggagaatcgcttgaacccaggaggcagaagttgcagtgagcagagatcacaccactgcactccagcctgggcaacagagtaagactccatccacacacacacacacacacacaaaattgaaaagtgaagacattttaatggagatttaatagtgcttccagactaatgaactaatggagttttggctccactcatgagtgtatttgaaatgtaagtaaccagctacaaagaataatgtcacttcatttgattatgactaccaatcaagagaaggaggaatacatttctgaggagtgatactaaaccatttgagcttaaatgagtacctgattttgcagccattaaaatgagtcaataactatgtggaaatatagaaaaatattttataatataatactaagaaagaggacagtaggccataaagtgttagcagtgttatgctatgtctatataaataagcatgggccattaaaaatagcaaactgaaaacagttcatgtgtggggggcaagtttagaagtaattttaatgtatctaagaagtgatttcctttattgttgtactcaggtacgaagactaaaaatcaggatgaatccagaaaattaacacaaaaaagtatgtattaggctacttcctgtcatagtgaaattaaacactcaaagtaatgtaatctcagctgggcgtggcggctcatgcctgtaatcccagcactttggcaggacaaggcaggaggatcacttgaacctaggagttcgagaccagcctgggcaacacagcgagaacttgtctctattaaaaaaaaaaaaaggaatgtaatttcaatctttttcttgatatatggcttgagaatgataatgtaaaaggaattcttctcttacttcaataaaatgggttttaacataactttaaattcagttaaatatacaatattgaatacctatagttgactttgggatggggactttttcaagtcattaagagtgtttgtttaaggtgatctcattgatggtagttctcagccgtctcaaaaactgcaagctaatcagtcagacattctttaatgaccccaattttttcactttaattgttaccatgttttctatttttactgatttttgctaaagcatgtaagagtgaatttattatagcagtaatcttgtgtttctcctgatgtgcaataaatcaataattcaccagc

SEQ ID NO: 211525 - DNA, 867 bp, Artificial Sequence
  derived and/or modified sequence
atgaaattaccaatatttatcgccgacgcgttcaccgccagagccttccgtggaaatcccgcagccgtttgcctgctcgagaatgaactggatgaagatatgcatcagaaaatcgccagagaaatgaacttgtccgaaacggctttcattcggaaattgcaccctaccgacaatttcgcacagtcaagttgttttggcctgaggtggttcaccccagcctcagaggtccctctgtgtggccacgcgacgctggcaagcgccgcagtgctgttccacaaaattaaaaacatgaactctacactgacatttgtcactctctctggggagctgcgcgctcgacgtgcagaagacggcatagtgctggacctaccactataccccgctcacccacaggatttccacgaggtggaggatcttatcaagactgccatcggaaatactctcgtgcaagatatatgttattctccagatactcaaaaactgctagtccggctgtccgacgtatataatcgctccttcttggaaaatctgaaagttaatactgagaacctgttacaggtcgagaatacgggcaaggtgaagggactgatcctaacccttaagggggagccagggggacagactcaagcatttgatttttattctcggtacttcgccccatgggttggggtcgccgaagacccagtgaccggaagtgcgcacgccgttctcagtagttactggtctcaacatcttgggaaaaaggaaatgcatgccttccaatgcagccaccgaggcggtgagctcggaatcagtctgagacctgatggcagagtggacatcagggggggtgccgcagttgtcttggagggtaccctcactgcctag

SEQ ID NO: 211526 - DNA, 768 bp, Artificial Sequence
  derived and/or modified sequence
atgcaccagaagattgccagggagatgaatctgagcgaaaccgctttcatcaggaagctccacccaacagacaacttcgcacagtcttcttgtttcggactccgttggttcactcccgcatcggaagtacctctatgtgggcacgcaacactggcatctgcagccgttctgtttcacaaaataaaaaatatgaacagcacattaacattcgtcactctcagcggggagcttagggcaaggcgcgcagaggacgggattgtgttggacctacccctttacccagcacatcctcaggatttccacgaagtggaggacttaatcaagacagccataggcaacacactagtacaggatatctgttacagccctgatacacagaaactgctggtcagattgagtgatgtgtataacagatcgtttttagaaaatttaaaggtgaataccgagaatcttctgcaggtagaaaacacgggtaaagtcaaaggcctgatcctcaccttaaaaggcgaacccggaggtcagacccaggcattcgacttttactctagatacttcgcaccttgggtcggtgtggctgaagaccctgtcaccggctctgcccacgctgtgctctcatcctattggtctcagcaccttggaaaaaaagagatgcatgcctttcagtgcagccatagaggtggagagctgggaatctcgctgaggccagacggccgtgtggacatccggggaggtgccgctgttgtcctggaaggcacactcaccgcctag

SEQ ID NO: 211527 - DNA, 867 bp, Artificial Sequence
  derived and/or modified sequence
atgaaactgccaatcttcattgctgacgccttcaccgcacgagcattccgtgggaatccagcagcagtttgcctgctggaaaacgaactggatgaagacatgcatcagaaaattgccagagagatgaatctttcagagacggcgttcatccgaaaattgcatcccaccgataacttcgcccagagtagctgctttggacttcgctggttcactccagcttccgaagtccctctgtgcggacacgcgacactggcctcagctgccgtactgtttcataagatcaagaacatgaatagtaccctgacctttgtgacactgagtggggaactgcgcgctaggagagcggaagacggcatcgtcttagacttacccctttacccggctcatccacaggacttccatgaagtggaagacctgattaaaacagcaattggaaacacattggtgcaggacatctgttactctccagacacccagaagctcctggtacgcctctccgatgtctacaaccgctcgttcctggagaatttgaaagtgaatacagaaaatttactgcaggttgaaaataccgggaaggtgaagggtctaatcctaacactaaagggtgagccgggtgggcagacacaggcattcgatttctatagcaggtactttgcaccttgggtgggagttgcggaggatcctgtcactggcagcgcccacgccgtcctcagctcttattggagccagcacctagggaagaaggaaatgcacgccttccagtgcagccaccgaggcggtgagcttgggatcagtttgagacccgatgggagagttgatatccggggtggtgccgcagttgttctggaggggactctgaccgcatag

SEQ ID NO: 211528 - DNA, 867 bp, Artificial Sequence
  derived and/or modified sequence
atgaagctgcccatcttcatcgccgacgccttcaccgccagagccttcagaggcaaccccgccgccgtgtgcctgctggagaacgagctggacgaggacatgcaccagaagatcgccagagagatgaacctgagcgagaccgccttcatcagaaagctgcaccccaccgacaacttcgcccagagcagctgcttcggcctgagatggttcacccccgccagcgaggtgcccctgtgcggccacgccaccctggccagcgccgccgtgctgttccacaagatcaagaacatgaacagcaccctgaccttcgtgaccctgagcggcgagctgagagccagaagagccgaggacggcatcgtgctggacctgcccctgtaccccgcccacccccaggacttccacgaggtggaggacctgatcaagaccgccatcggcaacaccctggtgcaggacatctgctacagccccgacacccagaagctgctggtgagactgagcgacgtgtacaacagaagcttcctggagaacctgaaggtgaacaccgagaacctgctgcaggtggagaacaccggcaaggtgaagggcctgatcctgaccctgaagggcgagcccggcggccagacccaggccttcgacttctacagcagatacttcgccccctgggtgggcgtggccgaggaccccgtgaccggcagcgcccacgccgtgctgagcagctactggagccagcacctgggcaagaaggagatgcacgccttccagtgcagccacagaggcggcgagctgggcatcagcctgagacccgacggcagagtggacatcagaggcggcgccgccgtggtgctggagggcaccctgaccgcctag

SEQ ID NO: 211529 - DNA, 768 bp, Artificial Sequence
  derived and/or modified sequence
atgcaccagaagatcgccagagagatgaacctgagcgagaccgccttcatcagaaagctgcaccccaccgacaacttcgcccagagcagctgcttcggcctgagatggttcacccccgccagcgaggtgcccctgtgcggccacgccaccctggccagcgccgccgtgctgttccacaagatcaagaacatgaacagcaccctgaccttcgtgaccctgagcggcgagctgagagccagaagagccgaggacggcatcgtgctggacctgcccctgtaccccgcccacccccaggacttccacgaggtggaggacctgatcaagaccgccatcggcaacaccctggtgcaggacatctgctacagccccgacacccagaagctgctggtgagactgagcgacgtgtacaacagaagcttcctggagaacctgaaggtgaacaccgagaacctgctgcaggtggagaacaccggcaaggtgaagggcctgatcctgaccctgaagggcgagcccggcggccagacccaggccttcgacttctacagcagatacttcgccccctgggtgggcgtggccgaggaccccgtgaccggcagcgcccacgccgtgctgagcagctactggagccagcacctgggcaagaaggagatgcacgccttccagtgcagccacagaggcggcgagctgggcatcagcctgagacccgacggcagagtggacatcagaggcggcgccgccgtggtgctggagggcaccctgaccgcctag

SEQ ID NO: 211530 - protein, 298 aa, Artificial Sequence
  derived and/or modified sequence
MTSLTQRSSGLVQRRTEASRNAADKERAAGGGAGSSEDDAQSRRDEQDDDDKGDSKETRLTLMEEVLLLGLKDREGYTSFWNDCISSGLRGCMLIELALRGRLQLEACGMRRKSLLTRKVICKSDAPTGDVLLDEALKHVKETQPPETVQNWIELLSGETWNPLKLHYQLRNVRERLAKNLVEKGVLTTEKQNFLLFDMTTHPLTNNNIKQRLIKKVQEAVLDKWVNDPHRMDRRLLALIYLAHASDVLENAFAPLLDEQYDLATKRVRQLLDLDPEVECLKANTNEVLWAVVAAFTK

SEQ ID NO: 211531 - protein, 281 aa, Artificial Sequence
  derived and/or modified sequence
MTSLTQRSSGLVQRRTEASRNAADSRRDEQDDDDKGDSKETRLTLMEEVLLLGLKDREGYTSFWNDCISSGLRGCMLIELALRGRLQLEACGMRRKSLLTRKVICKSDAPTGDVLLDEALKHVKETQPPETVQNWIELLSGETWNPLKLHYQLRNVRERLAKNLVEKGVLTTEKQNFLLFDMTTHPLTNNNIKQRLIKKVQEAVLDKWVNDPHRMDRRLLALIYLAHASDVLENAFAPLLDEQYDLATKRVRQLLDLDPEVECLKANTNEVLWAVVAAFTK

SEQ ID NO: 211532 - DNA, 897 bp, Artificial Sequence
  derived and/or modified sequence
atgacctctctcacccaacggagttccggtttggtgcagaggcggactgaagcatcacgcaacgctgctgacaaggaacgggccgccggggggggagccggaagctctgaggatgatgctcagagtagaagagacgaacaagatgatgatgataaaggggactctaaggaaactagactgaccctgatggaggaggtactgctgctaggcctcaaggatcgagagggatacaccagcttttggaatgactgtatctcaagcggtctgcggggttgcatgcttattgaactggctctacggggtcgcctgcagctcgaagcatgcggtatgaggaggaaaagcttgctgacccgaaaggtgatttgcaaatctgatgcacccacaggcgatgttctgctcgatgaggcccttaagcacgtgaaagagacccaaccccctgaaacagtgcagaactggatcgaactgctaagcggcgaaacttggaatccgctaaagttacactatcagctgcggaacgttcgggagcgtctagccaaaaacctggtggaaaaaggcgttctcactactgagaagcagaatttcttactctttgacatgacaacacatccactgactaataacaacataaaacaaaggctgataaagaaagtgcaggaagcagttctggataaatgggttaatgacccccatcgtatggatcgaagactgctcgctttaatatatctggcacacgcgagcgatgtacttgaaaatgcctttgcaccacttctcgatgaacagtatgatcttgcgactaagcgcgtaagacagctgctcgatttagacccagaagtggaatgcctaaaagccaatacaaacgaggtgctctgggcggttgttgccgctttcacaaagtag

SEQ ID NO: 211533 - DNA, 846 bp, Artificial Sequence
  derived and/or modified sequence
atgacatcactgacccaacgatcctccggtttggtgcaaagacggaccgaggcgagtcgaaacgctgcagacagtagacgagatgagcaagacgacgatgataagggcgattcaaaagagacacgcctgaccctcatggaggaggtgctgctcctcggcctgaaagatcgcgaaggatacacgtctttctggaatgactgtatttccagcggcctccgcggatgtatgctcatagagctggcccttcgcgggcgtcttcagctagaggcttgtggaatgagaaggaaaagcctgctgacacggaaagttatctgtaaatccgacgcacctactggggacgttcttttggacgaagctctaaagcacgtgaaagagacgcagcctcctgagaccgtccagaattggatcgagttactttccggtgagacctggaatccccttaagcttcactatcagctcagaaatgttcgagagcgcctggctaagaatctggtagagaagggggtgttaacaactgagaagcagaacttcctgctctttgacatgacaacccaccctcttacaaataataatatcaagcaaagactgattaaaaaggtccaggaggccgtgctggacaaatgggtgaacgacccacatcggatggacaggcggctgttggctcttatctacttagcacacgcctccgacgtgctggagaacgctttcgccccgcttctggacgagcagtacgacctggccacgaagcgggtgcggcagttgttggacctggatcccgaggtggagtgtctgaaagcaaataccaatgaggtgttatgggctgtggtggccgcttttactaaatag

SEQ ID NO: 211534 - DNA, 2721 bp, Artificial Sequence
  derived and/or modified sequence
acatcctccggtgacgtcagccggggccgccatattggaaaggcgccgccgccgcctccgccttggagctcggggtgtttcggggactgcggccacaggcaggaaggcgctcctctcctgccccgccgacgcccggccagcccgcttcgccctgacctgtttcctcatgactgcccccggccctgctgccgacggacgtcgccccggcgtccggatttaacacggaaacccggatcggaggccgcgcggggaggaggagggcgacccggtcggtcctgcgaccctctcggcccggctcggcgcctcggcgggagccatgacctcgctgacccagcgcagctccggcctggtgcagcggcgcaccgaggcctcccgcaacgccgccgacaaggagcgggcggcgggcggcggcgccggcagcagcgaggacgacgcgcagagccgccgcgacgagcaggacgacgacgacaagggcgactccaaggaaacgcggctgaccctgatggaggaagtgctcctgctgggcctcaaggaccgcgagggttacacatcattttggaatgactgtatatcatctggattacgtggctgtatgttaattgaattagcattgagaggaaggttacaactagaggcttgtggaatgagacgtaaaagtctattaacaagaaaggtaatctgtaagtcagatgctccaacaggggatgttcttcttgatgaagctctgaagcatgttaaggaaactcagcctccagaaacggtccagaactggattgaattacttagtggtgagacatggaatccattaaaattgcattatcagttaagaaatgtacgggaacgattagctaaaaacctggtggaaaagggtgtattgacaacagagaaacagaacttcctactttttgacatgacaacacatcccctcaccaataacaacattaagcagcgcctcatcaagaaagtacaggaagccgttcttgacaaatgggtgaatgaccctcaccgcatggacaggcgcttgctggccctcatttacctggctcatgcctcggacgtcctggagaatgcttttgctcctcttctggacgagcagtatgatttggctaccaagagagtgcggcagcttctcgacttagaccctgaagtggaatgtctgaaggccaacaccaatgaggttctgtgggcggtggtggcggcgttcaccaagtaactctgctcggggtgaaccattctcctttctctcaagtaaaccagtagtttttcttctgttgacttctggttttctgtaatttgtactttcccacactataattggcttctgttttacaaaatggtgggtggctttttcttttttgtacgtgtacaggattctgctggtacgagaggccttcctctttctgtttttaaaaaaagttttactgccatattggcattccattccctgttgccatcctcactgttacctgttttgggtttctggtctactttgactttcaaagtacctccagcctcctcatacgcacagcttttggatgacctcagcttgagtttctccatatgtgcatgtacatctagcattctgcctacagttcagacagaagtcacaaaaaggccttcaactcaccaaaggtaaatatctgtatctattaggacattttttacatagacttcagttgagatgtatacttagcaaaattatttttaaattgaaacagcacagtaaatacttaatataaaatgtcccttggattttgcttcccatgtaaatctattgtattattacacttgttataattttaactataaaggtccaattgtttcacagagccagtttgggatgggctgcattccatttatgctgtatatagtttgaattatatataaattaccccttcttctggccacccctgctcccatcttagtattttgcaagatctaatcagttgtacacctggtgcccctcgcttgcttcaatcatggttatttgatggcaaaatcgacctcttgtcgctgaaggagagagaaaagatgtgtgtctgattggtcctgggattttttgagctgtgccatttatggtactctttgcctatgcatccccttgttagattttttttaaattttatcttactgtttttataatttctattgggaagaggcttgtgaccagtaccaatcttgagtttctttttctgtccacaagtaaattaatatctgctctgaaatgtcatttatctactcacacattcttggggaaaaaaatcaaatgtcagtcctagcagatgttgcatgtaaattggtagcaagtaatgattacaacccagaggattaagaattttgtaacagaaagctctatgttttaattttttatatacaattaggataattagcattgtcagactataaacctttgctttttaaagtttatttttactatttctttatcactttattgtatcatcaccattggtttcataatgtaaatactatatgttgaacaaattaaatgtcaaaattttttattaccatagtccatgttaatagtggggctttcaggtgtttagagattttttttgttgttgttaacattcattgcaaaagtactagatggtgtataactctagagttgaattttaagggattccctaatatgtatactatctttttatctgaagtaataaataaacaatgatcttgaaagtgcctgaatcagagcaagca

SEQ ID NO: 211535 - DNA, 2631 bp, Artificial Sequence
  derived and/or modified sequence
atattggaaaggcgccgccgccgcctccgccttggagctcggggtgtttcggggactgcggccacaggcaggaaggcgctcctctcctgccccgccgacgcccggccagcccgcttcgccctgacctgtttcctcatgactgcccccggccctgctgccgacggacgtcgccccggcgtccggatttaacacggaaacccggatcggaggccgcgcggggaggaggagggcgacccggtcggtcctgcgaccctctcggcccggctcggcgcctcggcgggagccatgacctcgctgacccagcgcagctccggcctggtgcagcggcgcaccgaggcctcccgcaacgccgccgacagccgccgcgacgagcaggacgacgacgacaagggcgactccaaggaaacgcggctgaccctgatggaggaagtgctcctgctgggcctcaaggaccgcgagggttacacatcattttggaatgactgtatatcatctggattacgtggctgtatgttaattgaattagcattgagaggaaggttacaactagaggcttgtggaatgagacgtaaaagtctattaacaagaaaggtaatctgtaagtcagatgctccaacaggggatgttcttcttgatgaagctctgaagcatgttaaggaaactcagcctccagaaacggtccagaactggattgaattacttagtggtgagacatggaatccattaaaattgcattatcagttaagaaatgtacgggaacgattagctaaaaacctggtggaaaagggtgtattgacaacagagaaacagaacttcctactttttgacatgacaacacatcccctcaccaataacaacattaagcagcgcctcatcaagaaagtacaggaagccgttcttgacaaatgggtgaatgaccctcaccgcatggacaggcgcttgctggccctcatttacctggctcatgcctcggacgtcctggagaatgcttttgctcctcttctggacgagcagtatgatttggctaccaagagagtgcggcagcttctcgacttagaccctgaagtggaatgtctgaaggccaacaccaatgaggttctgtgggcggtggtggcggcgttcaccaagtaactctgctcggggtgaaccattctcctttctctcaagtaaaccagtagtttttcttctgttgacttctggttttctgtaatttgtactttcccacactataattggcttctgttttacaaaatggtgggtggctttttcttttttgtacgtgtacaggattctgctggtacgagaggccttcctctttctgtttttaaaaaaagttttactgccatattggcattccattccctgttgccatcctcactgttacctgttttgggtttctggtctactttgactttcaaagtacctccagcctcctcatacgcacagcttttggatgacctcagcttgagtttctccatatgtgcatgtacatctagcattctgcctacagttcagacagaagtcacaaaaaggccttcaactcaccaaaggtaaatatctgtatctattaggacattttttacatagacttcagttgagatgtatacttagcaaaattatttttaaattgaaacagcacagtaaatacttaatataaaatgtcccttggattttgcttcccatgtaaatctattgtattattacacttgttataattttaactataaaggtccaattgtttcacagagccagtttgggatgggctgcattccatttatgctgtatatagtttgaattatatataaattaccccttcttctggccacccctgctcccatcttagtattttgcaagatctaatcagttgtacacctggtgcccctcgcttgcttcaatcatggttatttgatggcaaaatcgacctcttgtcgctgaaggagagagaaaagatgtgtgtctgattggtcctgggattttttgagctgtgccatttatggtactctttgcctatgcatccccttgttagattttttttaaattttatcttactgtttttataatttctattgggaagaggcttgtgaccagtaccaatcttgagtttctttttctgtccacaagtaaattaatatctgctctgaaatgtcatttatctactcacacattcttggggaaaaaaatcaaatgtcagtcctagcagatgttgcatgtaaattggtagcaagtaatgattacaacccagaggattaagaattttgtaacagaaagctctatgttttaattttttatatacaattaggataattagcattgtcagactataaacctttgctttttaaagtttatttttactatttctttatcactttattgtatcatcaccattggtttcataatgtaaatactatatgttgaacaaattaaatgtcaaaattttttattaccatagtccatgttaatagtggggctttcaggtgtttagagattttttttgttgttgttaacattcattgcaaaagtactagatggtgtataactctagagttgaattttaagggattccctaatatgtatactatctttttatctgaagtaataaataaacaatgatcttgaaagtgcctgaatcag

SEQ ID NO: 211536 - DNA, 897 bp, Artificial Sequence
  derived and/or modified sequence
atgaccagcctgacccagaggagcagcggcctggtgcagaggagaacagaggccagcagaaatgctgctgacaaggagagagctgctgggggcggggccggcagcagtgaagatgatgcccagagcagaagagatgagcaggatgatgatgacaagggggacagcaaggagacccggctgaccctgatggaggaggtgctgctgctgggcctgaaggaccgggagggctacaccagcttctggaatgactgcatcagcagcggcctgcggggctgcatgctgattgagctggccctgcggggccgcctgcagctggaggcctgtggcatgaggaggaagagcctgctgaccaggaaggtgatctgcaagagtgatgcccccactggagatgtgctgctggatgaggccctgaagcacgtgaaggagacccagcccccagagaccgtgcagaactggattgagctgctgtctggagagacctggaaccccctgaagctgcactaccagctgagaaatgtgcgggagcggctggccaagaacctggtggagaagggcgtgctgaccacagagaagcagaacttcctgctgtttgacatgaccacccaccccctgaccaacaacaacatcaagcagaggctcatcaagaaggtgcaggaggccgtgctggacaagtgggtgaatgacccccacaggatggaccggcggctgctggccctgatctacctggcccacgccagtgatgtgctggagaatgcctttgcccccctgctggatgagcagtatgacctggccaccaagagggtgcggcagctgctggacctggaccctgaggtggagtgcctgaaggccaacaccaatgaggtgctgtgggccgtggtggccgccttcaccaagtag

SEQ ID NO: 211537 - DNA, 846 bp, Artificial Sequence
  derived and/or modified sequence
atgaccagcctgacccagaggagcagcggcctggtgcagaggagaacagaggccagcagaaatgctgctgacagcagaagagatgagcaggatgatgatgacaagggggacagcaaggagacccggctgaccctgatggaggaggtgctgctgctgggcctgaaggaccgggagggctacaccagcttctggaatgactgcatcagcagcggcctgcggggctgcatgctgattgagctggccctgcggggccgcctgcagctggaggcctgtggcatgaggaggaagagcctgctgaccaggaaggtgatctgcaagagtgatgcccccactggagatgtgctgctggatgaggccctgaagcacgtgaaggagacccagcccccagagaccgtgcagaactggattgagctgctgagcggggagacctggaaccccctgaagctgcactaccagctgagaaatgtgcgggagcggctggccaagaacctggtggagaagggcgtgctgaccacagagaagcagaacttcctgctgtttgacatgaccacccaccccctgaccaacaacaacatcaagcagaggctcatcaagaaggtgcaggaggccgtgctggacaagtgggtgaatgacccccacaggatggaccggcggctgctggccctgatctacctggcccacgccagtgatgtgctggagaatgcctttgcccccctgctggatgagcagtatgacctggccaccaagagggtgcggcagctgctggacctggaccctgaggtggagtgcctgaaggccaacaccaatgaggtgctgtgggccgtggtggccgccttcaccaagtag

SEQ ID NO: 211538 - DNA, 897 bp, Artificial Sequence
  derived and/or modified sequence
atgaccagcctgacccagcggagcagcggcctggtgcagcggcggacggaagcgtcgaggaacgccgcagacaaagagcgagcagccggcggaggtgccgggagtagtgaagacgacgcccaatcacggagggatgaacaggatgatgatgataagggggacagtaaggaaactagactgacactgatggaggaggtcttgctactgggcttgaaagatcgcgagggatacacaagcttttggaacgattgtatatcttccggcctgagaggctgcatgctcatcgagctagccttgcggggcagactgcagctcgaggcctgcggtatgagaaggaagagcctgctgacaaggaaagtaatttgtaagtccgatgctcccacaggcgatgtgttgcttgatgaggccctgaaacatgtgaaagaaacacagcctcccgaaactgtgcaaaactggatcgaacttctgagcggagagacctggaatcctctgaagctgcactatcagctcagaaacgtgagagagcgactggctaagaacctggtcgagaaaggcgtcctcacaaccgagaaacagaacttcctgttatttgatatgacaacccatccgctaacaaacaacaatattaaacaaagactgatcaaaaaagtccaggaggctgtcctggataagtgggtgaacgacccacatagaatggatagaagactgctggcactgatctacctcgcccacgcgagcgacgttctggagaatgccttcgccccgcttctggatgagcaatatgatctagccaccaaaagggtgcggcagctcctcgacctggacccagaggtagagtgcctcaaagccaacacgaacgaggttctgtgggcagtcgtcgcagccttcaccaagtag

SEQ ID NO: 211539 - DNA, 846 bp, Artificial Sequence
  derived and/or modified sequence
atgaccagcctgacccagcggagcagcggcctggtgcagcggcggacggaagcttctcgcaatgccgctgatagccgccgggatgagcaagacgatgatgacaagggagactcgaaggagacccgtcttacactcatggaggaggtcctgctgttaggcttaaaagatcgggaggggtataccagtttctggaatgactgcattagttctggcttgaggggctgtatgcttattgaacttgctctgcgaggtcgactgcagctggaagcttgtgggatgcggcgcaagagtctgttaacgaggaaggtgatatgcaagtccgacgctccaaccggagatgtgttactcgacgaagcccttaagcacgtcaaagaaacacagccaccagagaccgttcaaaattggattgagcttctctccggtgaaacctggaatcctctcaaattacattatcaattgcgcaacgtaagggagaggctcgcaaagaatctggtggaaaagggcgttcttacgacagaaaaacagaattttttattgtttgatatgactacccatccacttacaaacaataatattaaacaacgtttgataaagaaggtgcaggaggcagtcctggacaagtgggtgaatgaccctcatagaatggatcgacgacttcttgctctgatttatctggcccacgcctccgacgtgctggaaaacgcgtttgcgccactgctggacgagcaatacgacctggccacaaaacgcgtacgccagctgctggatctggaccctgaagtcgaatgcctaaaggcaaacactaacgaagtgctgtgggccgtggtggctgctttcactaaatag

SEQ ID NO: 211540 - DNA, 897 bp, Artificial Sequence
  derived and/or modified sequence
atgacaagcctcacccagaggagcagcggtctggtacagcgccgaacagaggcctcccgcaacgccgcagacaaggagcgagcggctggcggaggggcaggctcatccgaggatgacgctcaaagcaggcgagacgagcaggacgacgatgataagggagattcgaaggaaacacggttgacgctcatggaagaagtgctccttctgggtttgaaagaccgagaaggctacacatctttctggaacgattgtatctcctcaggcctacgaggatgcatgctaattgagctcgcgctgcggggtagactgcagctcgaggcttgtggaatgcgaaggaagtctttgttgactagaaaggtgatctgtaagtctgacgctccaacaggcgacgtactgcttgatgaagcgctgaagcacgtgaaagaaactcagcccccagagacagtgcaaaattggatagagctcctgtctggagagacctggaatcctctgaagctgcactatcagttgaggaacgtgcgtgaacgccttgcgaaaaatctcgtggagaagggcgttctaacgacagagaagcagaacttcctcctcttcgacatgacaacgcatccactgaccaataacaacatcaagcagaggctcataaaaaaggttcaggaggctgtgctagacaagtgggtcaatgacccacataggatggatcgaaggctgctggcactgatttacttagcgcacgcaagtgacgtcctcgaaaatgccttcgcacctctcttggatgagcagtatgaccttgcaaccaaacgcgtgcgtcagcttctggacctcgacccagaggtggaatgcctgaaagccaataccaatgaagtactttgggcagtggtcgccgcatttaccaagtag

SEQ ID NO: 211541 - DNA, 846 bp, Artificial Sequence
  derived and/or modified sequence
atgacttctctcactcaaaggtcgagcggtctagtgcaaagacgcaccgaggccagccgtaacgccgcagacagcaggcgcgatgagcaggatgatgacgacaaaggggactccaaggaaacccgtcttaccctgatggaagaagtcctgctgcttggcttgaaggacagggagggttatacatcgttctggaatgactgcatctcttccgggttacgtggctgcatgctgatagagctggccctccggggacgattgcagttggaggcctgcgggatgcgacggaagagtctgcttaccagaaaggttatctgtaagagtgatgcgcctaccggagatgtactgctggatgaggcactcaagcacgtaaaagaaactcaacctcctgagactgtccaaaactggatcgagcttctgagtggtgaaacttggaacccattaaagttgcattaccagctccggaacgtcagagagagactggccaaaaacttggtggaaaagggcgtcctcacgactgaaaaacaaaactttctgctttttgatatgactacacacccattgacaaataataatatcaagcagaggctcattaagaaagttcaagaagccgtcctggataagtgggtcaatgatccccacagaatggataggcgcctcctggcattgatctatcttgcccatgcatccgatgtcttagaaaatgccttcgcccctcttctggatgaacaatatgacctggctactaaaagggtacgacagctgctggacctggatcccgaggtggaatgcctgaaagccaatacaaatgaagtgctgtgggccgtcgtggccgctttcaccaagtag

SEQ ID NO: 211542 - DNA, 897 bp, Artificial Sequence
  derived and/or modified sequence
atgaccagcctgacccagagaagcagcggcctggtgcagagaagaaccgaggccagcagaaacgccgccgacaaggagagagccgccggcggcggcgccggcagcagcgaggacgacgcccagagcagaagagacgagcaggacgacgacgacaagggcgacagcaaggagaccagactgaccctgatggaggaggtgctgctgctgggcctgaaggacagagagggctacaccagcttctggaacgactgcatcagcagcggcctgagaggctgcatgctgatcgagctggccctgagaggcagactgcagctggaggcctgcggcatgagaagaaagagcctgctgaccagaaaggtgatctgcaagagcgacgcccccaccggcgacgtgctgctggacgaggccctgaagcacgtgaaggagacccagccccccgagaccgtgcagaactggatcgagctgctgagcggcgagacctggaaccccctgaagctgcactaccagctgagaaacgtgagagagagactggccaagaacctggtggagaagggcgtgctgaccaccgagaagcagaacttcctgctgttcgacatgaccacccaccccctgaccaacaacaacatcaagcagagactgatcaagaaggtgcaggaggccgtgctggacaagtgggtgaacgacccccacagaatggacagaagactgctggccctgatctacctggcccacgccagcgacgtgctggagaacgccttcgcccccctgctggacgagcagtacgacctggccaccaagagagtgagacagctgctggacctggaccccgaggtggagtgcctgaaggccaacaccaacgaggtgctgtgggccgtggtggccgccttcaccaagtag

SEQ ID NO: 211543 - DNA, 846 bp, Artificial Sequence
  derived and/or modified sequence
atgaccagcctgacccagagaagcagcggcctggtgcagagaagaaccgaggccagcagaaacgccgccgacagcagaagagacgagcaggacgacgacgacaagggcgacagcaaggagaccagactgaccctgatggaggaggtgctgctgctgggcctgaaggacagagagggctacaccagcttctggaacgactgcatcagcagcggcctgagaggctgcatgctgatcgagctggccctgagaggcagactgcagctggaggcctgcggcatgagaagaaagagcctgctgaccagaaaggtgatctgcaagagcgacgcccccaccggcgacgtgctgctggacgaggccctgaagcacgtgaaggagacccagccccccgagaccgtgcagaactggatcgagctgctgagcggcgagacctggaaccccctgaagctgcactaccagctgagaaacgtgagagagagactggccaagaacctggtggagaagggcgtgctgaccaccgagaagcagaacttcctgctgttcgacatgaccacccaccccctgaccaacaacaacatcaagcagagactgatcaagaaggtgcaggaggccgtgctggacaagtgggtgaacgacccccacagaatggacagaagactgctggccctgatctacctggcccacgccagcgacgtgctggagaacgccttcgcccccctgctggacgagcagtacgacctggccaccaagagagtgagacagctgctggacctggaccccgaggtggagtgcctgaaggccaacaccaacgaggtgctgtgggccgtggtggccgccttcaccaagtag

SEQ ID NO: 211544 - protein, 955 aa, Artificial Sequence
  derived and/or modified sequence
MLPGRLCWVPLLLALGVGSGSGGGGDSRQRRLLAAKVNKHKPWIETSYHGVITENNDTVILDPPLVALDKDAPVPFAGEICAFKIHGQELPFEAVVLNKTSGEGRLRAKSPIDCELQKEYTFIIQAYDCGAGPHETAWKKSHKAVVHIQVKDVNEFAPTFKEPAYKAVVTEGKIYDSILQVEAIDEDCSPQYSQICNYEIVTTDVPFAIDRNGNIRNTEKLSYDKQHQYEILVTAYDCGQKPAAQDTLVQVDVKPVCKPGWQDWTKRIEYQPGSGSMPLFPSIHLETCDGAVSSLQIVTELQTNYIGKGCDRETYSEKSLQKLCGASSGIIDLLPSPSAATNWTAGLLVDSSEMIFKFDGRQGAKVPDGIVPKNLTDQFTITMWMKHGPSPGVRAEKETILCNSDKTEMNRHHYALYVHNCRLVFLLRKDFDQADTFRPAEFHWKLDQICDKEWHYYVINVEFPVVTLYMDGATYEPYLVTNDWPIHPSHIAMQLTVGACWQGGEVTKPQFAQFFHGSLASLTIRPGKMESQKVISCLQACKEGLDINSLESLGQGIKYHFNPSQSILVMEGDDIGNINRALQKVSYINSRQFPTAGVRRLKVSSKVQCFGEDVCISIPEVDAYVMVLQAIEPRITLRGTDHFWRPAAQFESARGVTLFPDIKIVSTFAKTEAPGDVKTTDPKSEVLEEMLHNLDFCDILVIGGDLDPRQECLELNHSELHQRHLDATNSTAGYSIYGVGSMSRYEQVLHHIRYRNWRPASLEARRFRIKCSELNGRYTSNEFNLEVSILHEDQVSDKEHVNHLIVQPPFLQSVHHPESRSSIQHSSVVPSIATVVIIISVCMLVFVVAMGVYRVRIAHQHFIQETEAAKESEMDWDDSALTITVNPMEKHEGPGHGEDETEGEEEEEAEEEMSSSSGSDDSEEEEEEEGMGRGRHGQNGARQAQLEWDDSTLPY

SEQ ID NO: 211545 - DNA, 2868 bp, Artificial Sequence
  derived and/or modified sequence
atgctgcccggcagactgtgctgggtgcccctgctgctggccctgggcgtgggcagcggcagcggcggcggcggcgacagcagacagagaagactgctggccgccaaggtgaacaagcacaagccctggatcgagaccagctaccacggcgtgatcaccgagaacaacgacaccgtgatcctggacccccccctggtggccctggacaaggacgcccccgtgcccttcgccggcgagatctgcgccttcaagatccacggccaggagctgcccttcgaggccgtggtgctgaacaagaccagcggcgagggcagactgagagccaagagccccatcgactgcgagctgcagaaggagtacaccttcatcatccaggcctacgactgcggcgccggcccccacgagaccgcctggaagaagagccacaaggccgtggtgcacatccaggtgaaggacgtgaacgagttcgcccccaccttcaaggagcccgcctacaaggccgtggtgaccgagggcaagatctacgacagcatcctgcaggtggaggccatcgacgaggactgcagcccccagtacagccagatctgcaactacgagatcgtgaccaccgacgtgcccttcgccatcgacagaaacggcaacatcagaaacaccgagaagctgagctacgacaagcagcaccagtacgagatcctggtgaccgcctacgactgcggccagaagcccgccgcccaggacaccctggtgcaggtggacgtgaagcccgtgtgcaagcccggctggcaggactggaccaagagaatcgagtaccagcccggcagcggcagcatgcccctgttccccagcatccacctggagacctgcgacggcgccgtgagcagcctgcagatcgtgaccgagctgcagaccaactacatcggcaagggctgcgacagagagacctacagcgagaagagcctgcagaagctgtgcggcgccagcagcggcatcatcgacctgctgcccagccccagcgccgccaccaactggaccgccggcctgctggtggacagcagcgagatgatcttcaagttcgacggcagacagggcgccaaggtgcccgacggcatcgtgcccaagaacctgaccgaccagttcaccatcaccatgtggatgaagcacggccccagccccggcgtgagagccgagaaggagaccatcctgtgcaacagcgacaagaccgagatgaacagacaccactacgccctgtacgtgcacaactgcagactggtgttcctgctgagaaaggacttcgaccaggccgacaccttcagacccgccgagttccactggaagctggaccagatctgcgacaaggagtggcactactacgtgatcaacgtggagttccccgtggtgaccctgtacatggacggcgccacctacgagccctacctggtgaccaacgactggcccatccaccccagccacatcgccatgcagctgaccgtgggcgcctgctggcagggcggcgaggtgaccaagccccagttcgcccagttcttccacggcagcctggccagcctgaccatcagacccggcaagatggagagccagaaggtgatcagctgcctgcaggcctgcaaggagggcctggacatcaacagcctggagagcctgggccagggcatcaagtaccacttcaaccccagccagagcatcctggtgatggagggcgacgacatcggcaacatcaacagagccctgcagaaggtgagctacatcaacagcagacagttccccaccgccggcgtgagaagactgaaggtgagcagcaaggtgcagtgcttcggcgaggacgtgtgcatcagcatccccgaggtggacgcctacgtgatggtgctgcaggccatcgagcccagaatcaccctgagaggcaccgaccacttctggagacccgccgcccagttcgagagcgccagaggcgtgaccctgttccccgacatcaagatcgtgagcaccttcgccaagaccgaggcccccggcgacgtgaagaccaccgaccccaagagcgaggtgctggaggagatgctgcacaacctggacttctgcgacatcctggtgatcggcggcgacctggaccccagacaggagtgcctggagctgaaccacagcgagctgcaccagagacacctggacgccaccaacagcaccgccggctacagcatctacggcgtgggcagcatgagcagatacgagcaggtgctgcaccacatcagatacagaaactggagacccgccagcctggaggccagaagattcagaatcaagtgcagcgagctgaacggcagatacaccagcaacgagttcaacctggaggtgagcatcctgcacgaggaccaggtgagcgacaaggagcacgtgaaccacctgatcgtgcagccccccttcctgcagagcgtgcaccaccccgagagcagaagcagcatccagcacagcagcgtggtgcccagcatcgccaccgtggtgatcatcatcagcgtgtgcatgctggtgttcgtggtggccatgggcgtgtacagagtgagaatcgcccaccagcacttcatccaggagaccgaggccgccaaggagagcgagatggactgggacgacagcgccctgaccatcaccgtgaaccccatggagaagcacgagggccccggccacggcgaggacgagaccgagggcgaggaggaggaggaggccgaggaggagatgagcagcagcagcggcagcgacgacagcgaggaggaggaggaggaggagggcatgggcagaggcagacacggccagaacggcgccagacaggcccagctggagtgggacgacagcaccctgccctactag

SEQ ID NO: 211546 - DNA, 2868 bp, Artificial Sequence
  derived and/or modified sequence
atgcttcccgggaggctgtgctgggtacctctactgctggctctgggagtcggctccggctccggcggcgggggggacagccgacagcggcgactcctcgccgcaaaagtcaacaaacataagccttggattgaaacttcataccacggcgtaataaccgagaacaacgacaccgtgatactcgatcccccccttgtggcgctggataaggatgcgcctgtgccttttgccggcgaaatctgcgcattcaaaattcacggtcaggagctgccattcgaggcagtagtgttgaataaaacctccggtgaagggcgcctgcgggccaaatctcctattgactgcgaactacagaaggagtatactttcatcatccaggcctacgactgcggggcaggcccccacgagacagcgtggaagaaatctcacaaggccgtcgttcatatacaagttaaagatgtgaacgagttcgctccaacctttaaggaacctgcttataaagctgttgtgacggagggcaagatttatgacagtatcctgcaggtggaggcaatagacgaagattgctcccctcaatatagtcaaatttgcaactatgaaattgtgacgacagatgtgccattcgccatcgatcgcaatggtaacattcggaatacggaaaagctgagctacgacaaacagcatcagtacgagatactcgtgaccgcttatgactgtggccagaaacccgctgctcaggacaccctggtgcaagtcgatgtgaaacctgtctgcaaacccgggtggcaggattggaccaaacgaatcgagtaccagccaggctctggatccatgcccttgttcccctctatccacttggaaacatgcgacggggccgtttcgtccttacagatagtaaccgagctgcagaccaactatatcgggaaaggctgtgatcgcgagacctatagtgaaaaatctttacaaaaattatgcggggcctcatctgggattattgacctgctcccttccccctccgcagccacaaactggacggctgggctcctggtcgattcttccgagatgatcttcaagttcgacgggcggcagggcgcgaaagtgcccgatggtatagtgccaaagaatttgacagatcagtttacaataaccatgtggatgaaacacgggcctagccccggcgtccgcgctgagaaggagacaatcttatgcaattcggacaagactgagatgaatcggcatcattacgccctgtacgtccataactgccgccttgtgttcctgctcaggaaagactttgaccaggctgacacattcaggccagcggagttccactggaagcttgaccaaatctgcgacaaggagtggcactactatgtcatcaatgtagagtttccagtggtaacgttgtatatggacggggcaacgtacgagccgtacttggtgacaaatgattggccaatccacccttcccatatcgctatgcagttaactgttggcgcctgttggcagggaggcgaggtgaccaaaccacagttcgcacaattttttcatggaagcctggcctccttaacaatccgtccaggaaaaatggaaagccagaaggtcatttcctgtttacaggcctgcaaagaggggcttgatattaacagtctcgagtcactcggccaggggatcaagtatcacttcaatccatcccaaagtatcctcgtaatggaaggagacgatattggtaacatcaacagggcacttcagaaagtctcctatatcaacagtcgccagtttccaactgctggagtcaggcggctgaaagtcagctctaaggtgcagtgcttcggtgaggatgtatgcatcagcattccagaagttgatgcctacgtgatggtgctgcaggccatcgaacctcgcatcactctgagaggcacagatcacttttggcgccccgctgctcagttcgaaagcgctagaggagtgactctattccccgatatcaagatcgtgagcaccttcgccaaaactgaagcaccaggcgacgtgaagacaaccgaccccaaatcagaagtcctggaggagatgttgcataatctagacttctgtgacattcttgtgattggcggggacctcgacccacggcaggagtgtctggagttgaatcactccgagcttcaccagcgacacttggatgcaaccaacagcaccgccggctattccatttatggagtgggatcgatgtccagatatgagcaagtcctccaccatattagataccggaattggcgccctgcatctttagaagctcgaaggtttcggatcaaatgtagcgaactaaacggccgttatacctccaatgaatttaacctcgaagtgtccatcttacacgaggatcaggtaagcgacaaggaacacgtcaaccatcttatcgttcaaccccccttcctgcagtcagtccaccatccggaaagcaggtccagtatccagcacagcagcgtcgtcccttctatcgcgaccgtcgtgattatcatctcagtttgtatgctagtctttgtggtcgccatgggcgtctatagggtgaggatcgcccaccagcattttatacaagaaactgaggcagccaaggagagtgagatggattgggacgattccgccctaaccatcacggtaaatcctatggaaaaacacgagggcccaggacacggcgaggatgaaaccgagggcgaagaggaagaagaagcagaggaggagatgtcctcgtccagtggttccgatgattccgaggaggaagaggaagaagaaggcatgggtaggggccggcacggccagaacggtgccaggcaagcccagttggagtgggacgacagcacattgccctattag

SEQ ID NO: 211547 - DNA, 2868 bp, Artificial Sequence
  derived and/or modified sequence
atgctgcccggccgcctgtgctgggtgcccctgctgctggccctgggcgtgggcagcggcagcggcggcggcggggacagccggcagaggcggctgctggccgccaaggtgaacaagcacaagccctggattgagaccagctaccatggagtcatcacagagaacaatgacaccgtcatcctggacccccccctggtggccctggacaaggatgcccctgtgccctttgctggggagatctgtgccttcaagatccacggccaggagctgccctttgaggccgtggtgctgaacaagaccagcggggagggccgcctgcgggccaagagccccatcgactgtgagctgcagaaggagtacaccttcatcatccaggcctatgactgtggggccggcccccatgaaacagcctggaagaagagccacaaggctgtggtgcacatccaggtgaaggatgtgaatgaatttgcccccaccttcaaggagcccgcctacaaggctgtggtgacagagggcaagatctatgacagcatcctgcaggtggaggccattgatgaggactgcagcccccagtacagccagatctgcaactatgagatcgtgaccacagatgtgccctttgccatcgacagaaatggaaacatccggaacacagagaagctgtcctatgacaagcagcaccagtatgagatcctggtgacagcctatgactgtggccagaagccagctgcccaggacaccctggtgcaggtggatgtgaagcctgtgtgcaagccaggctggcaggactggaccaagagaattgagtaccagcccggcagcggctccatgcccctcttccccagcatccacctggagacctgtgatggagctgtgagcagcctgcagatcgtgacagagctgcagaccaactacatcggcaagggctgtgaccgggagacctacagcgagaagagcctgcagaagctgtgtggggccagcagcggcatcatcgacctgctgcccagccccagcgctgccaccaactggacagctggcctgctggtggacagcagcgagatgatcttcaagtttgatggccggcagggcgccaaggtgcctgatggcatcgtgcccaagaacctgacagaccagttcaccatcaccatgtggatgaagcacggccccagccctggggtgcgggcagagaaggagaccatcctgtgcaacagcgacaagacagagatgaacagacaccactacgccctgtatgtgcacaactgccgcctggtgttcctgctgaggaaggactttgaccaggccgacaccttccggcctgctgagttccactggaagctggaccagatctgtgacaaggagtggcactactacgtgatcaacgtggagttccctgtggtgaccctgtacatggatggagccacctatgagccctacctggtgaccaatgactggcccatccaccccagccacatcgccatgcagctgactgtgggcgcctgctggcagggcggggaggtgaccaagccccagtttgcccagttcttccacggcagcctggccagcctgaccatccggcctgggaagatggagagccagaaggtgatcagctgcctgcaggcctgcaaggagggcctggacatcaacagcctggagagcctgggccagggcatcaagtaccacttcaaccccagccagagcatcctggtgatggagggagatgacatcggcaacatcaacagagccctgcagaaggtgtcctacatcaacagccggcagttccccacagctggggtgcggcggctgaaggtgagcagcaaggtgcagtgcttcggggaggatgtgtgcatcagcatccctgaggtggatgcctacgtgatggtgctgcaggccatcgagccccgcatcaccctgcggggcacagaccacttctggaggcctgctgcccagtttgagagcgcccggggcgtgaccctcttcccagacatcaagatcgtgtccacctttgccaagacagaggcccctggagatgtgaagaccacagaccccaagtctgaggtgctggaggagatgctgcacaacctggacttctgtgacatcctggtgattggaggagacctggacccccggcaggagtgcctggagctgaaccacagcgagctgcaccagaggcacctggatgccaccaacagcacagctggctacagcatctatggagtgggctccatgagccgctatgagcaggtgctgcaccacatccgctacagaaactggaggcctgccagcctggaggcccggcgcttccgcatcaagtgcagcgagctgaatggccgctacaccagcaatgagttcaacctggaggtgtccatcctgcacgaggaccaggtgtctgacaaggagcacgtgaaccacctgattgtgcagccccccttcctgcagagcgtgcaccaccctgagagccgcagcagcatccagcacagctctgtggtgcccagcatcgccaccgtggtgatcatcatctctgtgtgcatgctggtgtttgtggtggccatgggcgtgtacagagtgagaattgcccaccagcacttcatccaggagacagaggccgccaaggagagcgagatggactgggatgattctgccctgaccatcaccgtgaaccccatggagaagcatgagggccctggccacggggaggatgaaacagaaggagaggaggaggaggaggccgaggaggagatgagcagcagcagcggcagtgatgacagcgaggaggaggaggaggaggagggcatgggccggggccgccacggccagaatggagcccggcaggcccagctggagtgggatgacagcaccctgccctactag

SEQ ID NO: 211548 - DNA, 2868 bp, Artificial Sequence
  derived and/or modified sequence
atgctgcccggccggctgtgctgggtgcccctgctgctggccctgggggttggaagcgggagtgggggggggggggactccaggcaaagaaggctgcttgccgccaaggtgaacaagcataaaccatggatcgaaacatcttaccatggtgtgattactgagaataacgacactgtaatactggacccccccctagtggctctggacaaggatgcacccgtaccgttcgccggagagatatgtgcttttaagatccacggtcaagagctgccatttgaagcagtggttcttaataaaacgagcggcgagggaagacttcgcgcgaaatcacccattgattgtgaactgcagaaggagtataccttcatcatccaggcgtatgactgcggtgccggccctcacgagaccgcttggaagaagtcacataaggcagttgttcatatacaggttaaggatgtaaacgagttcgctccgacctttaaggagcccgcttataaggctgtggtcaccgaggggaagatctacgactccattctccaggtagaggctatagatgaagattgtagtccgcaatattcacaaatctgtaattatgaaattgtcaccactgacgtgccctttgctatcgatcggaacggtaatattcgcaacactgaaaaactgtcatacgataagcagcaccaatacgaaatcctggtgacagcatacgattgcggccagaagcctgccgcacaggacaccttggtgcaggtagacgtgaaaccggtctgtaagcccggatggcaagattggacgaagcgaatcgagtaccagcccggctctggttctatgccattatttccctctatacacctcgaaacgtgcgacggagccgtgtcctccttacagatagtaacagaattgcaaactaattatatcggaaaaggctgtgaccgcgaaacatatagtgaaaaatccctgcagaaattgtgcggagcctcttccggaatcattgacttgctcccttctcctagcgcggcaacaaattggactgcaggcctgttggtggactctagcgaaatgatcttcaagttcgatggccgacagggggccaaagttcctgatggtatcgttcccaaaaacctaaccgatcaattcactatcaccatgtggatgaagcatggtccatccccaggggtgcgtgccgagaaggaaaccattctctgtaacagtgacaaaaccgaaatgaataggcaccattatgcactgtatgttcacaattgcaggcttgtttttctgctcaggaaagactttgaccaggccgacacctttcgccccgctgaattccattggaagctagatcagatttgcgacaaggagtggcactattatgttattaacgtcgagtttcccgtggttaccctttatatggacggagctacttatgagccttatctggttactaacgactggccaattcacccctcccatattgcgatgcaacttactgtgggagcctgttggcaagggggagaggtcactaagccgcagtttgcccagttcttccatggcagccttgcctctcttacaatcagaccaggtaagatggagtctcagaaggttatctcgtgcctgcaggcttgtaaggaaggcctggacatcaatagcctggaatccctgggacaggggattaaataccactttaaccccagtcagtctattctggtcatggaaggtgacgatattggcaatattaatagagcccttcaaaaggtctcctacatcaatagtagacagttccctaccgccggcgtccggcgccttaaggttagcagtaaggttcagtgtttcggagaagacgtgtgtatctccatccccgaagtagacgcctatgtcatggtcctgcaggccattgagcctagaatcacattgagaggtacagaccacttctggagaccggcagcccagtttgagagtgccagaggtgtgacactgtttcccgatatcaaaatcgtgtcaacattcgcaaaaacagaagccccaggcgacgtcaagacaaccgacccaaagtctgaggttctagaagagatgcttcacaatctggacttctgcgatatactggtcatcggcggtgacctagatcccagacaggagtgtctggaacttaaccactccgaacttcatcagaggcatctggacgccacgaactcaactgcaggatacagcatttatggcgttggaagcatgagccggtatgagcaagtgttgcaccatatacgctatcgaaactggagacccgctagtcttgaggcccggaggttccgcattaaatgcagtgagctgaacggaagatacaccagtaacgagttcaacctggaagtgagcatcttgcatgaagatcaggtgtccgacaaggaacacgtcaatcatctgatagtccagcctccctttctgcagtctgtgcaccatccagagtctcgcagtagtattcaacattcttctgtagtgccttccattgctacagttgttattatcatcagtgtatgcatgcttgtctttgtggtcgccatgggcgtatatcgcgttaggattgcccatcagcattttatacaggagaccgaagctgcgaaggagtcagaaatggattgggatgactccgcattaaccatcacggtcaacccaatggagaaacatgagggacccggacatggcgaggatgagacggaaggagaggaggaggaggaagccgaagaggaaatgtcaagcagttccggttcagatgattccgaggaggaagaagaagaggaaggtatggggagggggcgtcacggccagaatggagcacggcaggcccagctggaatgggacgactctacactgccttactag

SEQ ID NO: 211549 - DNA, 2868 bp, Artificial Sequence
  derived and/or modified sequence
atgcttcccggtcgcctgtgttgggtccccttactgctcgctctaggggtgggatcaggttctgggggtggcggagattcccgccaacgtcgtttactcgcggcaaaggtgaacaagcacaaaccatggattgagacaagctatcatggcgtgatcacagaaaacaacgacactgtcatcctggacccccctctggtcgccctggacaaagatgcaccagtaccattcgcaggtgagatatgtgcttttaagattcacggacaggagctaccttttgaggctgtggttctgaataagacaagtggcgagggaagactgcgtgctaaatcgcctatcgattgtgaactccaaaaggagtataccttcataattcaggcttacgattgcggcgctggcccacatgaaaccgcatggaagaagagccataaagctgtggttcatattcaggtcaaagacgtgaatgagttcgccccaacttttaaggagcccgcttacaaggctgtggtgacggaagggaagatttacgatagtatactacaagtggaggccatcgacgaagactgcagtcctcaatattcacagatttgcaattacgagattgtgaccacagacgtgccttttgcaattgatagaaatgggaacatccgcaacactgaaaaactctcatacgacaagcagcatcagtacgagatcctcgttacagcctatgactgcggccaaaagccagccgcacaggacactctcgtccaggtcgacgtcaaacctgtctgtaagccaggctggcaggactggactaaacgaattgagtaccagcctggctccggtagtatgcctctttttcctagcatccatcttgagacctgtgacggcgcagtgagctccttgcagattgtcaccgagctgcaaacgaactacatcggcaaaggatgtgatcgagagacatattccgaaaaatccctccaaaagctgtgcggagcctccagcggcatcattgatctcctcccttctccaagcgcagctactaattggacggcaggactgctcgtggacagtagtgaaatgattttcaagttcgatggccgacagggcgctaaggtgccggatggaattgttccgaaaaatctcacagatcagtttactataactatgtggatgaaacatgggcctagccctggggtgagggccgaaaaggaaactatcctctgtaacagtgataaaaccgaaatgaatcgccaccactacgctttatacgtgcataactgtaggcttgtgtttttactgcggaaggacttcgatcaggctgatacgtttcggcctgcagagtttcattggaagctggaccagatatgcgacaaggagtggcactattacgttatcaacgttgagtttcctgtcgtgaccctttatatggatggggcaacctacgagccttaccttgtcacaaatgactggcctatccatccatcacacattgcaatgcaactcactgtgggcgcttgctggcaggggggtgaagttacgaagcctcagttcgctcaattctttcacggcagtttggcctctcttaccatacggcctggaaaaatggaaagccagaaagtcataagttgcctacaggcctgcaaggaggggttagatataaatagtttagagtccctcggacagggaataaaataccacttcaatccatctcagtcaattttggtgatggagggcgacgacatcggaaatattaaccgagcactgcagaaggtgtcttacatcaattcacgacagttccctacagcgggtgtgaggcggctcaaagtttcctccaaagtgcagtgctttggtgaggacgtatgtatttccattcccgaggtggacgcatatgtaatggtgctacaggcgatagagccgcgtatcacattgcggggtacagaccatttttggaggcctgcggcacagttcgagagtgcgaggggtgtgacactcttccccgatatcaagatcgttagcacatttgcaaagaccgaggcaccaggagatgtgaagacaaccgaccctaagtccgaagtcttagaggaaatgctccacaacctcgatttttgtgatatcctggtgatcggaggggatttagaccccagacaggagtgcctggagctaaaccatagcgagctccatcaacggcatctggacgcaacaaactcaactgctgggtatagcatctatggtgtggggtccatgagtcgctatgagcaggtgctacatcatatcaggtatagaaattggcgcccagcatcactcgaggcaaggagatttcggattaagtgctccgagttgaacgggaggtacaccagcaatgaatttaatctagaagtatcgattctccatgaggaccaggtttccgacaaggagcatgtgaaccatctaatcgttcagcccccattcttacaaagcgtacatcacccggagtctcggtcttctatccagcacagctcggtggtcccatccattgctactgtcgtaataatcatttccgtatgtatgctagttttcgttgtagcaatgggcgtgtacagagtcaggattgctcaccaacattttatccaggagacagaggccgctaaagaatccgaaatggactgggacgacagtgcccttacaattacggtcaaccctatggaaaaacacgagggcccagggcacggagaagatgagacagagggggaagaggaagaggaggccgaggaggagatgtcatcttcttcaggctccgatgatagtgaggaagaggaggaggaggagggcatgggaagggggcgtcacggacagaatggcgcacggcaggcccagctggaatgggacgatagcacactgccctactag

SEQ ID NO: 211550 - DNA, 4882 bp, Artificial Sequence
  derived and/or modified sequence
agtgagcgcggctgctgccggcgagctagcggcgcagcggcgggaacccgaggccgagcgccgcggcggcagcgctagaagcgcacccatcgggcacggcgaggcggcccacggtgcggcaggcaccgggaggcgagagccggcgcggacagtaggcggcggctgcagctcgttggcggctgctgcgaggatgctgcctgggcggctgtgctgggtgccgctcctgctggcgctgggcgtggggagcggcagcggcggtggcggggacagccggcagcgccgcctcctcgcggctaaagtcaataagcacaagccatggatcgagacttcatatcatggagtcataactgagaacaatgacacagtcattttggacccaccactggtagccctggataaagatgcaccggttccttttgcaggggaaatctgtgcgttcaagatccatggccaggagctgccctttgaggctgtggtgctcaacaagacatcaggagagggccggctccgtgccaagagccccattgactgtgagttgcagaaggagtacacattcatcatccaggcctatgactgtggtgctgggccccacgagacagcctggaaaaagtcacacaaggccgtggtccatatacaggtgaaggatgtcaacgagtttgctcccaccttcaaagagccagcctacaaggctgttgtgacggagggcaagatctatgacagcattctgcaggtggaggccattgacgaggactgctccccacagtacagccagatctgcaactatgaaatcgtcaccacagatgtgccttttgccatcgacagaaatggcaacatcaggaacactgagaagctgagctatgacaaacaacaccagtatgagatcctggtgaccgcctacgactgtggacagaagcccgctgctcaggacaccctggtgcaggtggatgtgaagccagtttgcaagcctggctggcaagactggaccaagaggattgagtaccagcctggctccgggagcatgcccctgttccccagcatccacctggagacgtgcgatggagccgtgtcttccctccagatcgtcacagagctgcagactaattacattgggaagggttgtgaccgggagacctactctgagaaatcccttcaaaagttatgtggagcctcctctggcatcattgacctcttgccatcccctagcgctgccaccaactggactgcaggactgctggtggacagcagtgagatgatcttcaagtttgacggcaggcagggtgccaaagtccccgatgggattgtgcccaagaacctgaccgatcagttcaccatcaccatgtggatgaaacacggccccagccctggtgtgagagccgagaaggaaaccatcctctgcaactcagacaaaaccgaaatgaaccggcatcactatgccctgtatgtgcacaactgccgcctcgtctttctcttgcggaaggacttcgaccaggctgacacctttcgccccgcggagttccactggaagctggatcagatttgtgacaaagagtggcactactatgtcatcaatgtggagtttcctgtggtaaccttatacatggatggagcaacatatgaaccatacctggtgaccaacgactggcccattcatccatctcacatagccatgcaactcacagtcggcgcttgttggcaaggaggagaagtcaccaaaccacagtttgctcagttctttcatggaagcctggccagtctcaccatccgccctggcaaaatggaaagccagaaggtgatctcctgcctgcaggcctgcaaggaagggctggacattaattccttggaaagccttggccaaggaataaagtatcacttcaacccctcgcagtccatcctggtgatggaaggtgacgacattgggaacattaaccgtgctctccagaaagtctcctacatcaactccaggcagttcccaacggcgggtgtgcggcgcctcaaagtatcctccaaagtccagtgctttggggaagacgtatgcatcagtatccctgaggtagatgcctatgtgatggtcctccaggccatcgagccccggatcaccctccggggcacagaccacttctggagacctgctgcccagtttgaaagtgccaggggagtgaccctcttccctgatatcaagattgtgagcaccttcgccaaaaccgaagcccccggggacgtgaaaaccacagaccccaaatcagaagtcttagaggaaatgcttcataacttagatttctgtgacattttggtgatcggaggggacttggacccaaggcaggagtgcttggagctcaaccacagtgagctccaccaacgacacctggatgccactaattctactgcaggctactccatctacggtgtgggctccatgagccgctatgagcaggtgctacatcacatccgctaccgcaactggcgtccggcttcccttgaggcccggcgtttccggattaagtgctcagaactcaatgggcgctacactagcaatgagttcaacttggaggtcagcatccttcatgaagaccaagtctcagataaggagcatgtcaatcatctgattgtgcagcctcccttcctccagtctgtccatcatcctgagtcccggagtagcatccagcacagttcagtggtcccaagcattgccacagtggtcatcatcatctccgtgtgcatgcttgtgtttgtcgtggccatgggtgtgtaccgggtccggatcgcccaccagcacttcatccaggagactgaggctgccaaggaatctgagatggactgggacgattctgcgctgactatcacagtcaaccccatggagaaacatgaaggaccagggcatggggaagatgagactgagggagaagaggaggaagaagccgaggaagaaatgagctccagcagtggctctgacgacagcgaagaggaggaggaggaggaagggatgggcagaggcagacatgggcagaatggagccaggcaagcccagctggagtgggatgactccaccctcccctactagtgcccaggggtctgctgcctggcccacatgtcccttttgtaaaccctgacccagtgtatgcccatgtctatcatacctcacctctgatgtctgtgacatgtctgggaaggccttctccagcttcctggagcccaccctttaagccttgggcactccctgtgtttcatccatggggaagttccaagaagcccagcatggccatcagtgaggacttcagggtagactttgtcctgtagcctccacttctgccctaagttccccagcatcctgactacctgtctgcagagtttgcctttgttttttcctgcagggaagaaggcccacctttgtgtcactcacctccccaggctcagagtccccaaggccctggggttccaactcactgtgcgtctcctccacacagaccagtaggttctcctatgctgactccaggttgcttcatacaaggagggtggttgaacttcacacacgtaaggtcttagtgcttaacagtttaaaggaaagtccttgttgaggcagaactaagtttacagggaaaggtacacacattctctctctctctctctctctgtctatctagttccccagcttggagagcctttccccttgcttctttctgaggccatataagcttataagaaaagtcccaaaccaagaataggtccttggccacaagcagggtctgatcccccatcagagctatctgagcctgcctgtctgggcacctgctgcaaccatgcagctaccctgccaggggcactcagcaaacagaaccacagggcccaggaggcattccacacaggcactgccccaggacaacacaacaaggacagtcacaacaaggacaacaaggacacaacacaacacacaacaaggacagtcacaacaagcctagagccagaaagcagatggaaatgctaatgaggtcaaacgtaggcttcatggtgggtggagtgggggtggctgggctcccccaggacagaggggaccctgaggttggcaaggctctcaccactcagccttatggtcccttatctcctatcttccctcttgagaaaatacacgctttctgcatgtattagaaacgcacgagctccaccaagtctacaatgaaagtttgaaatttaactgcaaggaattagaagcatatttgcaatcattgcagcttcttctttcttctgctcataaaaggaggaacactttagatagagggcaaatatatctgaaaacctaatttctttctttttttgataaggaaatcttttccatctccatcctaacatgcacaacctgtgaagagaattgtttctatagtaactggtctgtgatcttttgtggccaagagaatagcaggcaagaattagggccttgacagaatttccacgaagctctgagaacatgtttgtttcgaatgtctgattcctctttgtcatcaatgtgtatgctctgtccccatccttcactcctcctcaagctcacaccaattggtttggcacaggcacagagctggtccctagttaagtggcatttatgttaaaaaaaaatagttcagaatctcagccttttctttgtgtcatcaaaacagcttaagaaggggactactgccaatgtcctctagtctgacctccacccagggaggacccatggcaggtcttttcaactttctgattcatgagaacaaccttgtgaagcttttcccacctcctaaagtgttttctgcatctgttccttcctttggacctcacaacaaatcctgtgaagtaactgagacatctgttgttagatacatttttgtgatgagtaaactgaggcttcgtgattcaa

SEQ ID NO: 211551 - protein, 563 aa, Artificial Sequence
  derived and/or modified sequence
MWAVLRLALRPCARASPAGPRAYHGDSVASLGTQPDLGSALYQENYKQMKALVNQLHERVEHIKLGGGEKARALHISRGKLLPRERIDNLIDPGSPFLELSQFAGYQLYDNEEVPGGGIITGIGRVSGVECMIIANDATVKGGAYYPVTVKKQLRAQEIAMQNRLPCIYLVDSGGAYLPRQADVFPDRDHFGRTFYNQAIMSSKNIAQIAVVMGSCTAGGAYVPAMADENIIVRKQGTIFLAGPPLVKAATGEEVSAEDLGGADLHCRKSGVSDHWALDDHHALHLTRKVVRNLNYQKKLDVTIEPSEEPLFPADELYGIVGANLKRSFDVREVIARIVDGSRFTEFKAFYGDTLVTGFARIFGYPVGIVGNNGVLFSESAKKGTHFVQLCCQRNIPLLFLQNITGFMVGREYEAEGIAKDGAKMVAAVACAQVPKITLIIGGSYGAGNYGMCGRAYSPRFLYIWPNARISVMGGEQAANVLATITKDQRAREGKQFSSADEAALKEPIIKKFEEEGNPYYSSARVWDDGIIDPADTRLVLGLSFSAALNAPIEKTDFGIFRM

SEQ ID NO: 211552 - DNA, 1692 bp, Artificial Sequence
  derived and/or modified sequence
atgtgggccgtgcttcgcttggccctgcgcccgtgcgccagggcttctccagcaggccctcgcgcgtaccatggcgacagcgtagccagtctcggtacccagccggatctgggcagcgctctgtatcaggaaaattacaaacagatgaaggctttggtaaaccagcttcacgagagggttgagcatataaagcttggcggcggggaaaaggcccgcgccctccatattagccgtgggaaattgctccctcgagagagaatcgacaatctgatagaccccggttctccctttttagagttgagtcaatttgcaggctatcagctgtacgacaatgaagaggttccaggggggggaatcattactggcatcggcagggtgagcggagtggaatgcatgatcattgccaatgatgcaaccgtcaaaggtggggcatattatccggtcacagttaagaagcagctcagggctcaggagatcgcaatgcagaaccgactgccctgcatctatttggtcgacagtggtggcgcgtacctaccaaggcaagctgatgtcttccccgaccgagaccatttcggaaggaccttttacaaccaggccatcatgagcagtaaaaatatagctcagatagccgtagtgatgggctcttgcactgctggcggagcatatgtgccagccatggccgacgaaaacattatcgtaagaaagcagggaacaatcttccttgccggcccaccactggttaaggccgctaccggggaagaggtctctgccgaagatctcggtggagccgatctgcactgtaggaagagtggcgttagcgatcactgggcccttgacgatcatcacgcactgcatctcaccagaaaggtggttcggaacctgaactaccagaaaaaactggacgtgactatcgaaccctcagaggagcccctatttcccgccgatgagctctacgggattgtcggggcaaatctcaaacgctcattcgatgtgcgggaggtgatcgccagaatcgtcgacggcagtcggtttacggaattcaaggctttttatggcgatactttggtgacggggttcgctcgcatctttggatatcctgtcggaatagtcgggaacaatggtgtgctgttctcagaaagcgctaaaaagggcactcatttcgtccagctgtgctgtcagagaaacattcctctgctctttctccagaacatcaccggctttatggtggggcgcgagtacgaggccgaaggcatcgctaaggatggcgctaagatggtcgcagcggttgcctgtgcccaagtgccaaaaattactctgatcatcgggggctcatacggagcggggaactacggcatgtgtggtcgagcctattctccccggtttctttacatatggcccaatgcacgcatttccgtcatgggtggcgaacaggcagctaatgtgctcgccacaatcactaaggatcaacgggcccgcgagggaaaacaattctcgtcagctgacgaggctgcgctcaaggagcccattattaagaaatttgaagaagaaggcaacccgtactacagctccgccagagtttgggacgatggcataattgatccggcagacacaagactcgtgttgggtctgagtttcagcgccgcgttgaacgctcctatagagaagactgactttgggatattccgcatgtag

SEQ ID NO: 211553 - DNA, 1692 bp, Artificial Sequence
  derived and/or modified sequence
atgtgggccgtgctgcggctggccctgcggccctgtgcccgggccagccctgctggcccccgggcctaccacggggacagcgtggccagcctgggcacccagcctgacctgggcagcgccctgtaccaggagaactacaagcagatgaaggccctggtgaaccagctgcacgagcgggtggagcacatcaagctgggcggcggggagaaggcccgggccctgcacatcagccggggcaagctgctgccccgggagagaattgacaacctgattgatcctggcagccccttcctggagctgagccagtttgctggctaccagctgtatgacaatgaggaggtgcctgggggcggcatcatcactggaattggccgggtgtctggagtggagtgcatgatcatcgccaatgatgccaccgtgaagggcggggcctactaccctgtgacagtgaagaagcagctgcgggcccaggagatcgccatgcagaaccggctgccctgcatctacctggtggacagcggcggggcctacctgccccggcaggctgatgtgtttcctgaccgggaccactttggaagaaccttctacaaccaggccatcatgagcagcaagaacatcgcccagattgctgtggtgatgggcagctgcacagctgggggcgcctacgtgcctgccatggctgatgagaacatcatcgtgaggaagcagggcaccatcttcctggccggcccccccctggtgaaggccgccactggagaggaggtgtctgctgaggacctgggcggcgctgacctgcactgcaggaagagcggcgtgtctgaccactgggccctggatgaccaccacgccctgcacctgaccaggaaggtggtgaggaacctgaactaccagaagaagctggatgtgaccatcgagcccagcgaggagcccctcttcccagcagatgagctgtatggcatcgtgggcgccaacctgaagaggagctttgatgtgcgggaggtgattgcccgcatcgtggatggcagccgcttcacagagttcaaggccttctatggagacaccctggtgactggatttgcccgcatcttcggctaccctgtgggcatcgtgggcaacaatggagtgctcttcagcgagagcgccaagaagggcacccactttgtgcagctgtgctgccagaggaacatccccctgctcttcctgcagaacatcaccggcttcatggtgggccgggagtatgaagctgagggcatcgccaaggatggagccaagatggtggccgctgtggcctgtgcccaggtgcccaagatcaccctcatcattggaggcagctatggagctggcaactacggcatgtgtggccgggcctacagcccccgcttcctgtacatctggcccaatgcccgcatctctgtgatgggcggggagcaggccgccaacgtgctggccaccatcaccaaggaccagagggcccgggagggcaagcagttcagcagcgcagatgaagctgccctgaaggagcccatcatcaagaagtttgaggaggagggcaacccctactacagcagcgcccgggtgtgggatgatggcatcatcgaccctgctgacacccggctggtgctgggcctgtccttctctgctgccctgaatgcccccatcgagaagacagactttggcatcttcaggatgtag

SEQ ID NO: 211554 - DNA, 3665 bp, Artificial Sequence
  derived and/or modified sequence
agaatcagagaaaccttctctggggctgcaaggacctgagctcagcttccgccccagccagggaagcggcaggggaaagcaccggctccaggccagcgtgggccgctctctcgctcggtgcccgccgccatgtgggccgtcctgaggttagccctgcggccgtgtgcccgcgcctctcccgccgggccgcgcgcctatcacggggactcggtggcctcgctgggcacccagccggacttgggctctgccctctaccaggagaactacaagcagatgaaagcactagtaaatcagctccatgaacgagtggagcatataaaactaggaggtggtgagaaagcccgagcacttcacatatcaagaggaaaactattgcccagagaaagaattgacaatctcatagacccagggtctccatttctggaattatcccagtttgcaggttaccagttatatgacaatgaggaggtgccaggaggtggcattattacaggcattggaagagtatcaggagtagaatgcatgattattgccaatgatgccaccgtcaaaggaggtgcctactacccagtgactgtgaaaaaacaattacgggcccaagaaattgccatgcaaaacaggctcccctgcatctacttagttgattcgggaggagcatacttacctcgacaagcagatgtgtttccagatcgagaccactttggccgtacattctataatcaggcaattatgtcttctaaaaatattgcacagatcgcagtggtcatgggctcctgcaccgcaggaggagcctatgtgcctgccatggctgatgaaaacatcattgtacgcaagcagggtaccattttcttggcaggaccccccttggttaaagcggcaactggggaagaagtatctgctgaggatcttggaggtgctgatcttcattgcagaaagtctggagtaagtgaccactgggctttggatgatcatcatgcccttcacttaactaggaaggttgtgaggaatctaaattatcagaagaaattggatgtcaccattgaaccttctgaagagcctttatttcctgctgatgaattgtatggaatagttggtgctaaccttaagaggagctttgatgtccgagaggtcattgctagaatcgtggatggaagcagattcactgagttcaaagccttttatggagacacattagttacaggatttgctcgaatatttgggtacccagtaggtatcgttggaaacaacggagttctcttttctgaatctgcaaaaaagggtactcactttgtccagttatgctgccaaagaaatattcctctgctgttccttcaaaacattactggatttatggttggtagagagtatgaagctgaaggaattgccaaggatggtgccaagatggtggccgctgtggcctgtgcccaagtgcctaagataaccctcatcattgggggctcctatggagccggaaactatgggatgtgtggcagagcatatagcccaagatttctctacatttggccaaatgctcgtatctcagtgatgggaggagagcaggcagccaatgtgttggccacgataacaaaggaccaaagagcccgggaaggaaagcagttctccagtgctgatgaagcggctttaaaagagcccatcattaagaagtttgaagaggaaggaaacccttactattccagcgcaagggtatgggatgatgggatcattgatccagcagacaccagactggtcttgggtctcagttttagtgcagccctcaacgcaccaatagagaagactgacttcggtatcttcaggatgtaactggaataaaggatgttttctgttggacatgtactgaaaattaacacatgtagtagccttaaaattttagacttctcgaacatgaggctgttacagtaatttttttaacactgtgcattgtacttttctaccttaaaaaaatcagtgaggatatttatttaatgaacatcaattccttttaaattttcttagagaaatttctctgtggctcagttttaccacccataaagcggagacagtaatttacggttatcctttctgacccacaaagtatgaaaagttctgtaatctgtaaactcagttctgtaatctgtattattgagatgattaatataaagttgtattttcactgaaatgattgttttgctggttatgcttggtgatattttagcgggcttatttttgaaaggcatctgttacttcagtggcataaagtgccctcacactgctgtgcagccatcaccaccattcatctccagaatttgttctcagtcccaaactgaaactataccattcaaacaacagcgctccccatttccccctcccccgagcccatgacatctccttattattattttttttttgagacagggtgtttctctgttgcccaggctggagtgcggtggtgtgatctcggctcactgcagcttccacctcccgggttcaagcgattcttgtgcctcagcctcccaagcagctgggactataggcacgcaccaccacacccagctaagttctgtatttttagcagagacgggatttcactaggttgcccaggctggtctcaaactactgacctcaagtgatccacccgcctcggcctcccaaagtgctgggattacaggtgtgagccaccgcgcctgaccacatctccttattcttaaatgtatgtgtttctcatggtttgatttattcttgctgggccatttcagcccctgtcatggcttcactcgccatctaaatgcagatgattactgccttgacggttcttaacccagctctcccctgagctgcaggcctgcatatccagtaggtctactggacatctgtactggttgttgtggaggaacctctggcttgctcattaagtcctactgattttcactatcccctgaatttccccacttatttttgtctttcactatcgcaggccttagaagaggtctacctgcctccagtcttacctagtccagtctaccccctggagttagaatggccatcctgaagtgaaaagtaatgtcagattactcccttcagtgatttcttgtagaagtgccaatccctgaatgccaccaagatcttaatcttcacatctttaatcttatctctttgactcctctttacaccggagaacggctccagctgttctagctctctttcagttctttgaaccttcccaccttagggtctataaggttccctctgcccaaattgttctactctcccttcttcttcaacacatccttcagtttaagcacttgcttctctcagtttaaactccacttccttagggatgtctctgtgacctccctgtgctggattagcttccctactctatgctcttgtaaaacactatctacttcctttgtcataaactcatcattttcctataaacattaatattgtcctcctgctagaatgtaagctccgtgagagcaaggatcctcctgtttaccctgtacctccaatgtctggcacttgtaggtgctcaaatattcgttgaatgaatgaaaaatccatattgtaattgatgtcctctggccacatagttttaaaattaggtgattgattatatgaccgaatagaactatcaaatgttttcctaataaagtcaatatttcaaa

SEQ ID NO: 211555 - DNA, 1692 bp, Artificial Sequence
  derived and/or modified sequence
atgtgggccgtgctgcggctggccctgcggccctgcgcccgggcctcccccgcagggcctagagcctatcacggggattctgtggcgagcctgggcacgcagcctgacctgggctcagccctctatcaggagaactataagcagatgaaggcactcgtcaaccaattacatgaacgcgtcgagcatatcaaactggggggcggggaaaaggcccgggccttacatatctcccgagggaagttgctgcccagagaaagaattgataacctgattgacccaggctcacctttcctcgagttatcccagttcgcaggatatcagctttacgacaacgaagaagtccccggcggtggcataattactggcatcgggagggtttctggcgtggaatgtatgattattgcaaacgacgctaccgttaagggcggcgcctactacccggttaccgttaagaagcagctcagggcgcaagagatagccatgcaaaaccgcctgccttgtatctacctagtcgacagcggaggcgcctatctgccgaggcaagctgacgtgtttcctgacagagatcatttcgggcgcaccttctataaccaggccataatgagttcgaaaaacatcgcacagattgctgtggtcatgggctcctgtacagcaggcggggcctatgtcccagccatggccgatgaaaatattattgtccgaaagcagggcactattttccttgcggggccccccctggtgaaggctgctaccggggaggaggtgagtgccgaagacctggggggcgctgacttgcattgcagaaaatctggggtgtccgaccactgggcgttagacgaccaccacgctcttcatttgacccgtaaagtggtacgtaatctgaattaccagaagaaattggacgtgaccatcgagccttcagaggagcctctgttcccggccgacgagctatatggcattgtcggtgccaacctgaagcgaagcttcgatgttcgtgaagtaatcgcccgaattgtggacggtagccgtttcaccgagttcaaagcattctatggcgataccctggttacagggtttgcaagaatcttcggttaccctgtcgggattgttggcaataatggcgtgctgttttccgaatcagcaaagaaggggacccacttcgtacaactgtgttgtcagcggaatattcccctgctcttcctccagaacattacagggtttatggtaggccgtgagtatgaagccgaagggatcgccaaggacggagctaagatggttgcggccgtagcatgcgctcaggtccctaagattacgctgatcataggggggtcctatggagccggcaactacgggatgtgtggccgtgcttacagccctcgcttcctgtatatttggcccaacgctcgaatctctgttatgggaggtgaacaggcagccaacgtattggctaccataactaaagatcagagggcacgagagggcaaacagtttagttcagcagacgaggccgccttgaaggaaccaatcattaagaagtttgaggaagaggggaatccctactactctagcgctcgcgtgtgggatgatggaattattgatcctgcagatacacgcttggttctcgggcttagcttttctgctgcactgaacgcacctatcgagaagacagactttggcatcttccggatgtag

SEQ ID NO: 211556 - DNA, 1692 bp, Artificial Sequence
  derived and/or modified sequence
atgtgggccgttctgcgcctggctttgaggccctgcgcaagagcgagtcctgccggtcccagggcttaccacggcgattcagtggcttccttagggacgcaaccggatctcggttccgccctgtatcaggagaattacaagcagatgaaggctctggttaatcagctgcacgagcgtgtcgagcatatcaagttgggcggaggcgaaaaggctcgagcgctgcacatcagcagaggcaagctattgcccagggagagaatcgacaatctaattgatcccggaagtccgttccttgagctgtcccagttcgcagggtatcaactgtacgataacgaggaggtgccaggaggaggaatcatcacaggcattggtcgggtctccggggtggagtgcatgattatcgcaaatgacgctacggtgaagggaggcgcatactatccggtgaccgtaaagaaacaactgcgggcacaggagattgctatgcagaatcgactgccatgtatctacttagtcgattccggaggagcctacctgcctcggcaggccgacgtgtttcctgaccgcgaccacttcggaagaaccttctataatcaggcaataatgagctcaaaaaatatcgctcagattgccgtcgttatggggtcctgcacagctggcggtgcctatgtgccagcaatggccgacgagaatataatcgttcgtaagcagggaaccattttcctcgccggacctcctctggtaaaggccgcaacgggagaggaggtgtctgcagaagacctgggtggtgctgatctgcactgcaggaaatctggagtgagcgaccactgggccttagatgatcaccatgcgctgcacctgacccggaaagtcgtgagaaacctgaactatcagaagaaactcgacgtgacaattgaaccgtccgaagagccactgttcccagccgatgagttgtacggaattgtgggggctaatctgaaaagaagcttcgacgtgcgggaagttattgctaggatcgttgacggctccaggttcaccgaatttaaagctttttacggggatacactggtcactggcttcgctcggatctttggctatccagttgggattgtaggcaataacggcgtcttgttctcggaatctgccaaaaagggaacgcactttgtgcaactgtgttgtcaacgtaatatccccctgctcttccttcagaacataaccggctttatggtgggaagggagtacgaagctgaggggattgctaaagatggcgcaaagatggtagctgccgtggcttgcgcccaggtccctaagataacactcattattggtggtagttacggcgctggaaattacggcatgtgcggcagagcttacagtcccagatttctgtacatctggccaaatgcgcgaatctctgtgatgggcggagaacaggctgcaaacgtgcttgcaactatcaccaaggaccaacgagcaagggagggcaaacagttctctagtgccgatgaagccgcactgaaggagccaatcatcaagaagttcgaagaggaagggaatccttattacagcagcgccagagtgtgggatgatgggataatagaccctgcggacactcgactggttctgggactttccttcagcgcagcgctgaatgcacctatcgagaagaccgattttggcattttccgcatgtag

SEQ ID NO: 211557 - DNA, 1692 bp, Artificial Sequence
  derived and/or modified sequence
atgtgggccgtgctgagactggccctgagaccctgcgccagagccagccccgccggccccagagcctaccacggcgacagcgtggccagcctgggcacccagcccgacctgggcagcgccctgtaccaggagaactacaagcagatgaaggccctggtgaaccagctgcacgagagagtggagcacatcaagctgggcggcggcgagaaggccagagccctgcacatcagcagaggcaagctgctgcccagagagagaatcgacaacctgatcgaccccggcagccccttcctggagctgagccagttcgccggctaccagctgtacgacaacgaggaggtgcccggcggcggcatcatcaccggcatcggcagagtgagcggcgtggagtgcatgatcatcgccaacgacgccaccgtgaagggcggcgcctactaccccgtgaccgtgaagaagcagctgagagcccaggagatcgccatgcagaacagactgccctgcatctacctggtggacagcggcggcgcctacctgcccagacaggccgacgtgttccccgacagagaccacttcggcagaaccttctacaaccaggccatcatgagcagcaagaacatcgcccagatcgccgtggtgatgggcagctgcaccgccggcggcgcctacgtgcccgccatggccgacgagaacatcatcgtgagaaagcagggcaccatcttcctggccggcccccccctggtgaaggccgccaccggcgaggaggtgagcgccgaggacctgggcggcgccgacctgcactgcagaaagagcggcgtgagcgaccactgggccctggacgaccaccacgccctgcacctgaccagaaaggtggtgagaaacctgaactaccagaagaagctggacgtgaccatcgagcccagcgaggagcccctgttccccgccgacgagctgtacggcatcgtgggcgccaacctgaagagaagcttcgacgtgagagaggtgatcgccagaatcgtggacggcagcagattcaccgagttcaaggccttctacggcgacaccctggtgaccggcttcgccagaatcttcggctaccccgtgggcatcgtgggcaacaacggcgtgctgttcagcgagagcgccaagaagggcacccacttcgtgcagctgtgctgccagagaaacatccccctgctgttcctgcagaacatcaccggcttcatggtgggcagagagtacgaggccgagggcatcgccaaggacggcgccaagatggtggccgccgtggcctgcgcccaggtgcccaagatcaccctgatcatcggcggcagctacggcgccggcaactacggcatgtgcggcagagcctacagccccagattcctgtacatctggcccaacgccagaatcagcgtgatgggcggcgagcaggccgccaacgtgctggccaccatcaccaaggaccagagagccagagagggcaagcagttcagcagcgccgacgaggccgccctgaaggagcccatcatcaagaagttcgaggaggagggcaacccctactacagcagcgccagagtgtgggacgacggcatcatcgaccccgccgacaccagactggtgctgggcctgagcttcagcgccgccctgaacgcccccatcgagaagaccgacttcggcatcttcagaatgtag

SEQ ID NO: 211558 - protein, 373 aa, Artificial Sequence
  derived and/or modified sequence
MLKRKPSNVSEKEKHQKPKRSSSFGNFDRFRNNSLSKPDDSTEAHEGDPTNGSGEQSKTSNNGGGLGKKMRAISWTMKKKVGKKYIKALSEEKDEEDGENAHPYRNSDPVIGTHTEKVSLKASDSMDSLYSGQSSSSGITSCSDGTSNRDSFRLDDDGPYSGPFCGRARVHTDFTPSPYDTDSLKIKKGDIIDIICKTPMGMWTGMLNNKVGNFKFIYVDVISEEEAAPKKIKANRRSNSKKSKTLQEFLERIHLQEYTSTLLLNGYETLEDLKDIKESHLIELNIENPDDRRRLLSAAENFLEEEIIQEQENEPEPLSLSSDISLNKSQLDDCPRDSGCYISSGNSDNGKEDLESENLSDMVHKIIITEPSD

SEQ ID NO: 211559 - DNA, 1122 bp, Artificial Sequence
  derived and/or modified sequence
atgttgaaacgaaagccctcaaatgttagcgaaaaggagaagcatcaaaagccaaaacgctcaagttctttcgggaactttgaccggtttagaaataattccctttcaaagccagacgattctacagaggcccacgaaggcgacccaactaatggcagtggagaacaatctaagacttccaataacgggggaggactcggtaaaaagatgcgcgctatctcctggacaatgaaaaaaaaggttggcaagaaatacattaaagccctttccgaggagaaagacgaggaggatggagaaaacgcacatccatacagaaattccgacccagtcattggaacacacaccgaaaaggttagcctcaaagcttcagatagcatggattctctctactccggacaatcgagctcctccggcatcacaagttgcagcgatggtacaagtaacagggactccttccgccttgacgacgatggaccctacagcggcccattttgtggacgggctcgagtacatactgacttcacaccaagtccttatgacacagactctctaaagatcaaaaagggagatattattgatattatctgtaaaacccccatggggatgtggaccggtatgctcaacaacaaggtgggaaattttaagttcatctacgtggacgttatttctgaggaggaagccgcacccaagaaaatcaaagcaaaccggcggtccaactccaaaaagtccaaaacccttcaggagttcttggagcgtatccatctccaagaatacacctcaaccctactgctgaacggttacgagacattggaggatttaaaggatataaaggagagccatcttatagagttaaacattgaaaaccctgacgatcggcgacggctgctgagcgccgctgaaaattttcttgaagaagaaattatccaggaacaagagaatgaacctgagcctctgtcactgagctccgatatatcccttaacaaaagtcagctggatgactgcccgcgagactccgggtgttacatctcctcagggaactctgacaacggtaaagaagatctggagagcgagaacctgtcagatatggtgcacaagattattatcaccgagccttcagactag

SEQ ID NO: 211560 - DNA, 1122 bp, Artificial Sequence
  derived and/or modified sequence
atgctgaagaggaagcccagcaatgtgtctgagaaggagaagcaccagaagcccaagaggagcagcagctttggaaactttgaccgcttcaggaacaacagcctgagcaagccagatgacagcacagaggcccatgaaggagaccccaccaatggaagtggagagcagagcaagaccagcaacaacggcggcggcctgggcaagaagatgagggccatctcctggaccatgaagaagaaggtgggcaagaagtacatcaaggccctgtctgaggagaaggatgaggaggatggagaaaatgcccacccctacagaaacagcgaccctgtgattggcacccacacagagaaggtgtccctgaaggccagtgacagcatggacagcctgtacagcggccagagcagcagcagcggcatcaccagctgcagtgatggcaccagcaacagagacagcttccggctggatgatgatggcccctacagcggccccttctgtggccgggcccgggtgcacacagacttcacccccagcccctatgacacagacagcctgaagatcaagaagggggacatcatcgacatcatctgcaagacccccatgggcatgtggacaggcatgctgaacaacaaggtgggcaacttcaagttcatctacgtggatgtgatcagcgaggaggaggccgcccccaagaagatcaaggccaacagaagaagcaacagcaagaagagcaagaccctgcaggagttcctggagcgcatccacctgcaggagtacaccagcaccctgctgctgaatggctatgagaccctggaggacctgaaggacatcaaggagagccacctgattgagctgaacattgaaaatccagatgacagaagaaggctgctgtctgctgctgagaacttcctggaggaggagatcatccaggagcaggagaatgaacctgagcccctgagcctgagcagtgacatcagcctgaacaagagccagctggatgactgcccccgggacagcggctgctacatcagcagcggcaacagcgacaatggcaaggaggacctggagagcgagaacctgagtgacatggtgcacaagatcatcatcacagagcccagcgactag

SEQ ID NO: 211561 - DNA, 1122 bp, Artificial Sequence
  derived and/or modified sequence
atgctgaagcggaagcccagcaacgtgagcgagaaggagaagcaccaaaaacccaaacgctccagctcctttggcaacttcgatcggttccgcaacaactcactcagcaagcccgacgactcaaccgaagcacatgagggcgaccctaccaacggttccggggaacagagcaagacaagcaataacgggggcggtttgggaaagaagatgagagctatcagctggacgatgaagaaaaaagtgggcaagaagtatatcaaagccctttctgaagagaaagacgaggaggacggagaaaatgctcacccctacaggaacagtgatcccgtaattggaacccacaccgaaaaggtttcactcaaagcatctgactctatggatagcctctattctggccaaagttcatcctctggcatcacgtcttgttccgatggtacttcaaatagagattccttccgcctcgacgatgacgggccgtactccgggcctttttgtggccgcgcaagagttcatacagacttcacgccatccccctacgatactgattcactgaaaataaagaaaggtgacattatcgacattatctgtaagactccaatgggaatgtggaccggcatgctgaacaacaaagttggcaacttcaaattcatctacgtggacgtgatttcagaagaagaagccgcccctaaaaagatcaaagctaaccgtcgatccaactccaagaaatcgaagacactgcaggaattcctggagcggatccatctgcaggagtatacatctacgctgcttttgaacggctacgaaaccttggaagacctgaaagatattaaggagtcacaccttatcgaacttaatatcgagaaccccgacgaccggagacggttgctgtcggccgctgaaaacttcctggaagaggaaatcatccaggagcaggaaaacgagcctgagccactgagcctctcatcagatatctctctcaataaatctcagctggacgattgccctcgggactccggctgctacatcagctccggtaacagcgataatgggaaagaagacctggagagtgagaacttaagcgacatggtgcacaagattataatcactgagcctagcgactag

SEQ ID NO: 211562 - DNA, 1122 bp, Artificial Sequence
  derived and/or modified sequence
atgctaaagcgaaaaccatcgaacgtgagcgagaaggagaaacaccagaaacctaaacggtccagtagtttcggcaactttgacagattcaggaataatagcttatctaaaccagatgacagcacagaggcccacgagggcgaccctaccaacggctctggcgagcagtctaagacttcaaacaatggtgggggtctggggaaaaagatgagagccatcagttggaccatgaagaaaaaggtcggcaaaaaatatataaaagccctgtccgaggagaaagatgaggaggacggcgaaaatgcccacccataccgtaacagtgaccccgtgataggtacacacaccgagaaggtgtcgctcaaggcaagtgactccatggactcactctactccgggcagtcctctagctccggtatcacctcatgctcagatggaacatctaatcgtgattcttttcggctggatgacgacggaccatattccgggccattttgtggacgagctagggttcatactgactttacacctagtccttatgataccgacagcctgaaaatcaaaaagggcgatattattgacatcatctgtaaaaccccaatggggatgtggaccgggatgctaaacaataaggtcgggaatttcaagttcatctatgttgacgtcatcagcgaggaagaagcagctcctaaaaagataaaggccaataggcggtctaatagtaagaaaagcaagactcttcaggagttcctggaaagaatccacctgcaggagtacacatctactctgcttctgaatggctatgaaactctggaagacctcaaggatataaaagagtcacacctcattgagctgaacatcgaaaatcccgatgatagaagacgtttactctcggctgcggaaaatttcctggaagaggaaattatccaggagcaagaaaacgaacctgaacccctcagcttgagcagtgacatctctctgaataagagccagctggatgattgcccacgtgactctggctgctacattagctctggaaactcggacaacggtaaggaggatctcgagtcagaaaatctcagcgacatggttcacaagatcattattaccgaaccgtctgactag

SEQ ID NO: 211563 - DNA, 1888 bp, Artificial Sequence
  derived and/or modified sequence
attagacagcacactgctgactgttttcagttgtttctgtaacagcagaaagtgcactcactaggagtagtcagaattcaaaatgctcaagagaaagccatccaatgtttcagagaaggagaaacatcaaaaaccaaagcgaagcagcagttttgggaatttcgatcgttttcggaataattctttatcaaaaccagatgattcaactgaggcacatgaaggagatcccacaaatggaagtggagaacaaagtaaaacttcaaataatggaggcggtttgggtaaaaaaatgagagctatttcatggacaatgaagaaaaaagtgggtaaaaagtacatcaaagccctttctgaggaaaaggatgaggaagatggagagaatgcccacccatatagaaacagtgaccctgtgattgggacccacacagagaaggtgtccctcaaagccagtgactccatggatagtctctacagtggacagagctcatcaagtggcataacaagctgttcagatggtacaagtaaccgggacagctttcgactggatgacgatggcccctattcaggaccattctgtggccgtgccagagtgcatacggatttcacgccaagtccctatgacactgactccctcaaaatcaagaaaggagacatcatagacattatttgcaaaacaccaatggggatgtggacaggaatgttgaacaataaagtgggaaacttcaaattcatttatgtggatgtcatctcagaagaggaagcagcccccaagaaaataaaggcaaaccgaaggagtaacagcaaaaaatccaagactctgcaggagttcctagagaggattcatctgcaggaatacacctcaacacttttgctcaatggttatgagactctagaagatttaaaagatataaaagagagtcacctcattgaattaaatattgaaaacccagatgacagaagaaggttactatcagctgctgaaaacttccttgaagaagaaattattcaagagcaagaaaatgaacctgagcccctatccttgagctcagacatctccttaaataagtcacagttagatgactgcccaagggactctggttgctatatctcatcaggaaattcagataatggcaaagaggatctggagtctgaaaatctgtctgacatggtacataagattattatcacagagccaagtgactgaacacgcattcccaactatatatctacagatgcattccattttaactcttcttgagctaaaacgtcaaataggagaggaagataagataaatatttgtaaataaaacctaaagtttaaatgttttaatctgaataattgtacataaaattttgtatctctaacattccaaattactgtcaataaaatatatatttattattttaaatgctatgtgttaatatttcacttgcttgtattagaaaggcaaaatgtaagactttggtatgtgtgacatatgctttatttggctttattttacaagtacagtatctgcaaaaaacaaagtaaccttttttcatacctgccagttttgaatttatatatgttattgaacaaatagtaatagaggattcgctgttgaaacaagttgtccaagcaatgttatattcatttttatacttattgggaaagtgtgagttaatattggacacattttatcctgatccacagtggagttttagtaattatattttgttgatttcttcattttgttttctggtataaaagtagagataatgtgtagtcacttctgatttagtgaaaccaattgtaataattgtggaaatgttttgtctttaagtgtaaatattttaaaatttgacataccctaatgttaataataaaaagaactatttgcatattgca

SEQ ID NO: 211564 - DNA, 1122 bp, Artificial Sequence
  derived and/or modified sequence
atgctgaagagaaagcccagcaacgtgagcgagaaggagaagcaccagaagcccaagagaagcagcagcttcggcaacttcgacagattcagaaacaacagcctgagcaagcccgacgacagcaccgaggcccacgagggcgaccccaccaacggcagcggcgagcagagcaagaccagcaacaacggcggcggcctgggcaagaagatgagagccatcagctggaccatgaagaagaaggtgggcaagaagtacatcaaggccctgagcgaggagaaggacgaggaggacggcgagaacgcccacccctacagaaacagcgaccccgtgatcggcacccacaccgagaaggtgagcctgaaggccagcgacagcatggacagcctgtacagcggccagagcagcagcagcggcatcaccagctgcagcgacggcaccagcaacagagacagcttcagactggacgacgacggcccctacagcggccccttctgcggcagagccagagtgcacaccgacttcacccccagcccctacgacaccgacagcctgaagatcaagaagggcgacatcatcgacatcatctgcaagacccccatgggcatgtggaccggcatgctgaacaacaaggtgggcaacttcaagttcatctacgtggacgtgatcagcgaggaggaggccgcccccaagaagatcaaggccaacagaagaagcaacagcaagaagagcaagaccctgcaggagttcctggagagaatccacctgcaggagtacaccagcaccctgctgctgaacggctacgagaccctggaggacctgaaggacatcaaggagagccacctgatcgagctgaacatcgagaaccccgacgacagaagaagactgctgagcgccgccgagaacttcctggaggaggagatcatccaggagcaggagaacgagcccgagcccctgagcctgagcagcgacatcagcctgaacaagagccagctggacgactgccccagagacagcggctgctacatcagcagcggcaacagcgacaacggcaaggaggacctggagagcgagaacctgagcgacatggtgcacaagatcatcatcaccgagcccagcgactag

SEQ ID NO: 211565 - protein, 434 aa, Artificial Sequence
  derived and/or modified sequence
MLPARCARLLTPHLLLVLVQLSPARGHRTTGPRFLISDRDPQCNLHCSRTQPKPICASDGRSYESMCEYQRAKCRDPTLGVVHRGRCKDAGQSKCRLERAQALEQAKKPQEAVFVPECGEDGSFTQVQCHTYTGYCWCVTPDGKPISGSSVQNKTPVCSGSVTDKPLSQGNSGRKDDGSKPTPTMETQPVFDGDEITAPTLWIKHLVIKDSKLNNTNIRNSEKVYSCDQERQSALEEAQQNPREGIVIPECAPGGLYKPVQCHQSTGYCWCVLVDTGRPLPGTSTRYVMPSCESDARAKTTEADDPFKDRELPGCPEGKKMEFITSLLDALTTDMVQAINSAAPTGGGRFSEPDPSHTLEERVVHWYFSQLDSNSSNDINKREMKPFKRYVKKKAKPKKCARRFTDYCDLNKDKVISLPELKGCLGVSKEGRLV

SEQ ID NO: 211566 - DNA, 1305 bp, Artificial Sequence
  derived and/or modified sequence
atgctgcccgccagatgcgccagactgctgaccccccacctgctgctggtgctggtgcagctgagccccgccagaggccacagaaccaccggccccagattcctgatcagcgacagagacccccagtgcaacctgcactgcagcagaacccagcccaagcccatctgcgccagcgacggcagaagctacgagagcatgtgcgagtaccagagagccaagtgcagagaccccaccctgggcgtggtgcacagaggcagatgcaaggacgccggccagagcaagtgcagactggagagagcccaggccctggagcaggccaagaagccccaggaggccgtgttcgtgcccgagtgcggcgaggacggcagcttcacccaggtgcagtgccacacctacaccggctactgctggtgcgtgacccccgacggcaagcccatcagcggcagcagcgtgcagaacaagacccccgtgtgcagcggcagcgtgaccgacaagcccctgagccagggcaacagcggcagaaaggacgacggcagcaagcccacccccaccatggagacccagcccgtgttcgacggcgacgagatcaccgcccccaccctgtggatcaagcacctggtgatcaaggacagcaagctgaacaacaccaacatcagaaacagcgagaaggtgtacagctgcgaccaggagagacagagcgccctggaggaggcccagcagaaccccagagagggcatcgtgatccccgagtgcgcccccggcggcctgtacaagcccgtgcagtgccaccagagcaccggctactgctggtgcgtgctggtggacaccggcagacccctgcccggcaccagcaccagatacgtgatgcccagctgcgagagcgacgccagagccaagaccaccgaggccgacgaccccttcaaggacagagagctgcccggctgccccgagggcaagaagatggagttcatcaccagcctgctggacgccctgaccaccgacatggtgcaggccatcaacagcgccgcccccaccggcggcggcagattcagcgagcccgaccccagccacaccctggaggagagagtggtgcactggtacttcagccagctggacagcaacagcagcaacgacatcaacaagagagagatgaagcccttcaagagatacgtgaagaagaaggccaagcccaagaagtgcgccagaagattcaccgactactgcgacctgaacaaggacaaggtgatcagcctgcccgagctgaagggctgcctgggcgtgagcaaggagggcagactggtgtag

SEQ ID NO: 211567 - DNA, 1305 bp, Artificial Sequence
  derived and/or modified sequence
atgctccccgcccggtgcgctcggctcctcacccctcatctgctacttgtacttgtgcagttgtctcccgcccggggccaccggacaaccggccctcggtttctaatatcagatcgcgatccgcagtgcaatctacactgcagccggacacagcctaagcccatttgtgcgagcgacgggaggtcctatgagagcatgtgtgaataccaaagagcaaagtgtcgcgaccctacacttggggtcgtccatcggggaaggtgcaaagatgccggacaatcaaaatgtcgcttggaaagagctcaggccctcgagcaggcaaagaagccacaggaagccgtctttgtccctgaatgcggggaagatgggtctttcacacaggtgcagtgccacacatataccgggtactgctggtgtgtgaccccagacggaaagcctatctctggctccagtgtccaaaacaagacacctgtctgctctggatccgttacggacaagccgcttagccagggtaattcaggcaggaaagacgacggcagcaaaccaacacccaccatggaaacccaaccagtgtttgacggggatgaaatcacggcaccaactttatggattaaacacctcgtgattaaggacagtaaactgaacaataccaacatccgaaactcggagaaagtgtacagctgcgaccaagaacgtcagtcagctctcgaagaagctcagcagaacccaagggaagggatcgtaatccctgagtgtgccccaggcggcctgtacaagcctgtccagtgtcaccagtcaaccggttactgttggtgtgtactggtggatacaggcaggcctctgccagggacaagcactcgctacgtcatgccgagttgcgagtccgacgcgagggctaaaactactgaagctgacgatcccttcaaagaccgtgaactgccgggctgccccgagggaaagaaaatggagttcattacctccttacttgacgcactgactactgacatggtccaggctatcaattccgctgctcccacgggtggcggtaggttcagcgagccagatccctcccacactttggaggagcgtgtagtccattggtattttagccagttggacagcaacagctccaacgatattaataagcgggaaatgaagccctttaagcggtacgtaaagaagaaggccaagccaaagaaatgtgcccgtaggtttaccgactattgcgatttaaataaagacaaagtaatctctctgccggaactgaaaggctgtctcggggtctcaaaagaaggcagactggtctag

SEQ ID NO: 211568 - DNA, 1305 bp, Artificial Sequence
  derived and/or modified sequence
atgctgcctgcccgctgtgcccggctgctgaccccccacctgctgctggtgctggtgcagctgagccctgcccggggccacaggaccaccggcccccgcttcctgatcagtgaccgggacccccagtgcaacctgcactgcagcaggacccagcccaagcccatctgtgccagtgatggccgctcctatgaatccatgtgtgagtaccagagggccaagtgccgggaccccaccctgggcgtggtgcaccggggccgctgcaaggatgctggccagagcaagtgccgcctggagcgggcccaggccctggagcaggccaagaagccccaggaggccgtgtttgtgcctgaatgtggggaggatggcagcttcacccaggtgcagtgccacacctacacaggctactgctggtgtgtgaccccagatggcaagcccatcagcggcagctctgtgcagaacaagacccctgtgtgcagcggctctgtgacagacaagcccctgagccagggcaacagcggcaggaaggatgatggcagcaagcccacccccaccatggagacccagcctgtgtttgatggagatgagatcacagcccccaccctgtggatcaagcacctggtgatcaaggacagcaagctgaacaacaccaacatcagaaattctgagaaggtgtacagctgtgaccaggagcggcagagcgccctggaggaggcccagcagaacccccgggagggcatcgtcatcccagaatgtgcccctgggggcctgtacaagcctgtgcagtgccaccagagcacaggctactgctggtgtgtgctggtggacaccggccggcccctgcccggcaccagcaccaggtatgtgatgcccagctgtgagagtgatgcccgggccaagaccacagaagcagatgaccccttcaaggaccgggagctgcccggctgcccagagggcaagaagatggagttcatcaccagcctgctggatgccctgaccacagacatggtgcaggccatcaacagcgctgcccccactggaggcggccgcttcagcgagccagaccccagccacaccctggaggagcgggtggtgcactggtacttcagccagctggacagcaacagcagcaatgacatcaacaagcgggagatgaagcccttcaagcgctacgtgaagaagaaggccaagcccaagaagtgtgcccggcgcttcacagactactgtgacctgaacaaggacaaggtgatcagcctgcctgagctgaagggctgcctgggcgtgtccaaggagggccgcctggtgtag

SEQ ID NO: 211569 - DNA, 1305 bp, Artificial Sequence
  derived and/or modified sequence
atgctgcccgcccggtgcgcccggctgctgaccccccacctgctgctcgtgctggttcagctatcacccgccagaggacaccggactacaggcccccgctttttaatctccgaccgggatccacagtgcaacctgcattgcagtcggacccagccaaagccaatctgtgcctccgacggaaggtcatatgaatcaatgtgtgagtatcagagggcaaagtgtcgcgacccaacgttgggtgtggttcacaggggaagatgtaaagatgcaggacaatcaaagtgccgactggaacgagcgcaggccttagaacaggctaagaaaccgcaggaggccgtgttcgtgcccgaatgtggagaagacggatcattcacacaggtgcagtgccatacctacaccgggtattgttggtgtgtcactcccgacggaaaaccaatttctggcagcagcgtccagaacaagacaccagtatgctctggatcagttactgataagcccctgtcccagggaaatagtggcaggaaagacgacgggtccaaacccaccccaaccatggagacacagcctgtcttcgacggagacgaaattacggctccaacattatggattaagcacctggtgatcaaagactctaagctaaacaacactaatattcggaactcagagaaagtttatagttgcgatcaagaacgccagtcggcactggaagaggctcagcagaacccacgtgagggcatagtgatcccagaatgcgcccccggcggcctgtataagccagtgcagtgccatcagagcactggctactgttggtgcgtgctggtggataccggaaggcccttgcccgggacctccacacggtatgtaatgccttcctgcgagagcgacgccagggcaaaaactacagaggccgatgatccgttcaaagatagagagctgcccgggtgtccggagggcaaaaaaatggaatttattactagccttctcgacgccttgacaacggatatggttcaagcaatcaattccgcagcacctaccggaggaggtaggttctcagaaccagatccgtcacacacgctagaagaaagggttgttcattggtacttcagtcaattggatagtaattcaagtaatgatattaacaaacgcgagatgaagccgtttaagagatacgtgaagaagaaggctaagcccaagaagtgtgctagacgtttcactgattattgcgacctcaataaagataaagtgatttcacttcccgagctaaaagggtgtctaggcgtcagtaaagagggtcgcctcgtgtag

SEQ ID NO: 211570 - DNA, 1305 bp, Artificial Sequence
  derived and/or modified sequence
atgctgccagcacgctgcgcaagactcctgactcctcacttgctgctggtgctggtgcaattgagccccgctaggggtcatcggaccaccggcccacgtttcctcatcagcgacagggatcctcagtgcaaccttcattgttcacgtacacagccgaaaccaatttgtgccagtgacggtagatcctacgaaagcatgtgcgagtatcaacgcgcaaagtgccgcgacccgaccctgggggttgtgcataggggaaggtgcaaagacgccggacagtccaagtgccggctggagcgggcacaggccctggaacaggctaagaagccccaggaggctgtttttgtccccgagtgcggcgaggatggttcctttacacaggtgcaatgccacacctacactggctattgttggtgcgtgactcctgacggcaagcccatctcaggatcctcagtgcagaacaagaccccagtatgtagcggctccgtaacggataagcctttgagtcagggtaacagcgggaggaaagatgatgggtcaaaaccgaccccgaccatggagacccagcccgtctttgatggcgatgagattaccgccccaactctctggatcaaacacctcgtgatcaaggactctaaactcaataatacaaacattagaaactcagaaaaagtttactcatgtgaccaggagagacagtccgcactggaggaggcacagcagaatcctagggaaggtatcgtgatcccagagtgcgcaccaggaggattgtacaaacccgtccagtgccatcagagtacaggctattgctggtgcgtgctggtggatacaggtcgcccattgcccggaacctccacgcgctacgtgatgcctagctgtgaatccgatgccagagctaaaacaacagaagctgacgacccgttcaaggatcgggaacttcccggatgcccggaaggtaagaagatggagtttataacgagcctgttagacgctcttacgacagatatggttcaagccatcaattctgctgcgccaactgggggaggtcgcttcagcgaacccgatccctctcacacactggaggaacgtgtggtccactggtatttcagccagctcgattctaattcgagcaatgacattaacaagagggaaatgaaaccattcaaaaggtacgtgaaaaagaaggcgaagccgaagaaatgcgcgagacgattcacggactactgtgatctgaataaggacaaagtcatttccctccccgagctgaaagggtgtcttggagtttcaaaagaagggcgactcgtttag

SEQ ID NO: 211571 - DNA, 3666 bp, Artificial Sequence
  derived and/or modified sequence
cctgctgccgcctgggccccgccgagcggagctagcgccgcgcgcagagcacacgctcgcgctccagctcccctcctgcgcggttcatgactgtgtcccctgaccgcagcctctgcgagcccccgccgcaggaccacggcccgctccccgccgccgcgagggccccgagcgaaggaaggaagggaggcgcgctgtgcgccccgcggagcccgcgaaccccgctcgctgccggctgcccagcctggctggcaccatgctgcccgcgcgctgcgcccgcctgctcacgccccacttgctgctggtgttggtgcagctgtcccctgctcgcggccaccgcaccacaggccccaggtttctaataagtgaccgtgacccacagtgcaacctccactgctccaggactcaacccaaacccatctgtgcctctgatggcaggtcctacgagtccatgtgtgagtaccagcgagccaagtgccgagacccgaccctgggcgtggtgcatcgaggtagatgcaaagatgctggccagagcaagtgtcgcctggagcgggctcaagccctggagcaagccaagaagcctcaggaagctgtgtttgtcccagagtgtggcgaggatggctcctttacccaggtgcagtgccatacttacactgggtactgctggtgtgtcaccccggatgggaagcccatcagtggctcttctgtgcagaataaaactcctgtatgttcaggttcagtcaccgacaagcccttgagccagggtaactcaggaaggaaagatgacgggtctaagccgacacccacgatggagacccagccggtgttcgatggagatgaaatcacagccccaactctatggattaaacacttggtgatcaaggactccaaactgaacaacaccaacataagaaattcagagaaagtctattcgtgtgaccaggagaggcagagtgccctggaagaggcccagcagaatccccgtgagggtattgtcatccctgaatgtgcccctgggggactctataagccagtgcaatgccaccagtccactggctactgctggtgtgtgctggtggacacagggcgcccgctgcctgggacctccacacgctacgtgatgcccagttgtgagagcgacgccagggccaagactacagaggcggatgaccccttcaaggacagggagctaccaggctgtccagaagggaagaaaatggagtttatcaccagcctactggatgctctcaccactgacatggttcaggccattaactcagcagcgcccactggaggtgggaggttctcagagccagaccccagccacaccctggaggagcgggtagtgcactggtatttcagccagctggacagcaatagcagcaacgacattaacaagcgggagatgaagcccttcaagcgctacgtgaagaagaaagccaagcccaagaaatgtgcccggcgtttcaccgactactgtgacctgaacaaagacaaggtcatttcactgcctgagctgaagggctgcctgggtgttagcaaagaaggacgcctcgtctaaggagcagaaaacccaagggcaggtggagagtccagggaggcaggatggatcaccagacacctaaccttcagcgttgcccatggccctgccacatcccgtgtaacataagtggtgcccaccatgtttgcacttttaataactcttacttgcgtgttttgtttttggtttcattttaaaacaccaatatctaataccacagtgggaaaaggaaagggaagaaagactttattctctctcttattgtaagtttttggatctgctactgacaacttttagagggttttgggggggtgggggagggtgttgttggggctgagaagaaagagatttatatgctgtatataaatatatatgtaaattgtatagttcttttgtacaggcattggcattgctgtttgtttatttctctccctctgcctgctgtgggtggtgggcactctggacacatagtccagctttctaaaatccaggactctatcctgggcctactaaacttctgtttggagactgacccttgtgtataaagacgggagtcctgcaattgtactgcggactccacgagttcttttctggtgggaggactatattgccccatgccattagttgtcaaaattgataagtcacttggctctcggccttgtccagggaggttgggctaaggagagatggaaactgccctgggagaggaagggagtccagatcccatgaatagcccacacaggtaccggctctcagagggtccgtgcattcctgctctccggacccccaaagggcccagcattggtgggtgcaccagtatcttagtgaccctcggagcaaattatccacaaaggatttgcattacgtcactcgaaacgttttcatccatgcttagcatctactctgtataacgcatgagaggggaggcaaagaagaaaaagacacacagaagggcctttaaaaaagtagatatttaatatctaagcaggggaggggacaggacagaaagcctgcactgaggggtgcggtgccaacagggaaactcttcacctccctgcaaacctaccagtgaggctcccagagacgcagctgtctcagtgccaggggcagattgggtgtgacctctccactcctccatctcctgctgttgtcctagtggctatcacaggcctgggtgggtgggttgggggaggtgtcagtcaccttgttggtaacactaaagttgttttgttggttttttaaaaacccaatactgaggttcttcctgttccctcaagttttcttatgggcttccaggctttaagctaattccagaagtaaaactgatcttgggtttcctattctgcctcccctagaagggcaggggtgataacccagctacagggaaatcccggcccagctttccacaggcatcacaggcatcttccgcggattctagggtgggctgcccagccttctggtctgaggcgcagctccctctgcccaggtgctgtgcctattcaagtggccttcaggcagagcagcaagtggcccttagcgccccttcccataagcagctgtggtggcagtgagggaggttgggtagccctggactggtcccctcctcagatcacccttgcaaatctggcctcatcttgtattccaacccgacatccctaaaagtacctccacccgttccgggtctggaaggcgttggcaccacaagcactgtccctgtgggaggagcacaaccttctcgggacaggatctgatggggtcttgggctaaaggaggtccctgctgtcctggagaaagtcctagaggttatctcaggaatgactggtggccctgccccaacgtggaaaggtgggaaggaagccttctcccattagccccaatgagagaactcaacgtgccggagctgagtgggccttgcacgagacactggccccactttcaggcctggaggaagcatgcacacatggagacggcgcctgcctgtagatgtttggatcttcgagatctccccaggcatcttgtctcccacaggatcgtgtgtgtaggtggtgttgtgtggttttcctttgtgaaggagagagggaaactatttgtagcttgttttataaaaaataaaaaatgggtaaatcttg

SEQ ID NO: 211572 - protein, 457 aa, Artificial Sequence
  derived and/or modified sequence
MLLPQLCWLPLLAGLLPPVPAQKFSALTFLRVDQDKDKDCSLDCAGSPQKPLCASDGRTFLSRCEFQRAKCKDPQLEIAYRGNCKDVSRCVAERKYTQEQARKEFQQVFIPECNDDGTYSQVQCHSYTGYCWCVTPNGRPISGTAVAHKTPRCPGSVNEKLPQREGTGKTVSLQIFSVLNSDDAAAPALETQPQGDEEDIASRYPTLWTEQVKSRQNKTNKNSVSSCDQEHQSALEEAKQPKNDNVVIPECAHGGLYKPVQCHPSTGYCWCVLVDTGRPIPGTSTRYEQPKCDNTARAHPAKARDLYKGRQLQGCPGAKKHEFLTSVLDALSTDMVHAASDPSSSSGRLSEPDPSHTLEERVVHWYFKLLDKNSSGDIGKKEIKPFKRFLRKKSKPKKCVKKFVEYCDVNNDKSISVQELMGCLGVAKEDGKADTKKRHTPRGHAESTSNRQPRKQG

SEQ ID NO: 211573 - DNA, 1374 bp, Artificial Sequence
  derived and/or modified sequence
atgctgctgccccagctgtgctggctgcccctgctggccggcctgctgccccccgtgcccgcccagaagttcagcgccctgaccttcctgagagtggaccaggacaaggacaaggactgcagcctggactgcgccggcagcccccagaagcccctgtgcgccagcgacggcagaaccttcctgagcagatgcgagttccagagagccaagtgcaaggacccccagctggagatcgcctacagaggcaactgcaaggacgtgagcagatgcgtggccgagagaaagtacacccaggagcaggccagaaaggagttccagcaggtgttcatccccgagtgcaacgacgacggcacctacagccaggtgcagtgccacagctacaccggctactgctggtgcgtgacccccaacggcagacccatcagcggcaccgccgtggcccacaagacccccagatgccccggcagcgtgaacgagaagctgccccagagagagggcaccggcaagaccgtgagcctgcagatcttcagcgtgctgaacagcgacgacgccgccgcccccgccctggagacccagccccagggcgacgaggaggacatcgccagcagataccccaccctgtggaccgagcaggtgaagagcagacagaacaagaccaacaagaacagcgtgagcagctgcgaccaggagcaccagagcgccctggaggaggccaagcagcccaagaacgacaacgtggtgatccccgagtgcgcccacggcggcctgtacaagcccgtgcagtgccaccccagcaccggctactgctggtgcgtgctggtggacaccggcagacccatccccggcaccagcaccagatacgagcagcccaagtgcgacaacaccgccagagcccaccccgccaaggccagagacctgtacaagggcagacagctgcagggctgccccggcgccaagaagcacgagttcctgaccagcgtgctggacgccctgagcaccgacatggtgcacgccgccagcgaccccagcagcagcagcggcagactgagcgagcccgaccccagccacaccctggaggagagagtggtgcactggtacttcaagctgctggacaagaacagcagcggcgacatcggcaagaaggagatcaagcccttcaagagattcctgagaaagaagagcaagcccaagaagtgcgtgaagaagttcgtggagtactgcgacgtgaacaacgacaagagcatcagcgtgcaggagctgatgggctgcctgggcgtggccaaggaggacggcaaggccgacaccaagaagagacacacccccagaggccacgccgagagcaccagcaacagacagcccagaaagcagggctag

SEQ ID NO: 211574 - DNA, 1374 bp, Artificial Sequence
  derived and/or modified sequence
atgctgttgcctcagctgtgctggttgcctcttctcgccgggcttttaccaccagttcctgctcagaagtttagcgctctgacctttctgcgcgtggatcaggacaaggataaggattgttctcttgactgcgcaggcagcccccagaagccattatgcgcttcagatgggcgtacatttttaagccgctgtgagtttcaaagagctaagtgtaaagacccgcagctcgaaattgcctacagagggaattgcaaggatgtttctcgctgcgtcgcagaaagaaaatatactcaagaacaggcacggaaggagttccagcaagtttttattcctgagtgcaacgacgacggcacctactcacaagtgcagtgccatagctacacagggtactgctggtgtgtgacccccaatggaaggccaatatcgggaacagcggtggcgcataaaacccctagatgcccgggatccgtgaacgaaaagctgcctcagagggagggcaccggaaagaccgtctccttacaaatctttagtgtgttgaacagcgatgacgctgcggctccagctctggaaacccagccgcaaggggacgaggaagatatcgcttcaagataccctacattgtggaccgaacaagtgaaatccaggcaaaataaaactaataaaaatagcgtgtcttcatgtgaccaagaacaccagtccgctctggaggaggccaaacagccaaaaaacgacaacgtggtaatccctgaatgtgcgcatggcggcctctacaagccggtccagtgccatccaagcaccggttattgctggtgtgtgctggtagacactgggcgacctattccgggaacctccaccagatatgagcagcctaaatgcgacaatacggcaagggcgcacccagctaaggcaagagatctgtataagggacgccagctccaggggtgtccgggagcaaagaaacacgagtttctcacatccgtgctggacgcactcagcactgatatggtacacgcggcctccgacccatccagttccagtgggcgcctttcagaaccagacccttcccatactctggaggaaagagtggtccactggtattttaaactgcttgataaaaattccagcggcgacattggtaagaaagagataaaaccctttaaacgatttcttcgaaagaaaagtaaaccaaagaagtgcgtcaaaaaattcgtcgagtactgtgacgtgaacaacgacaaaagcatctcagtgcaggaactcatgggttgcctcggagttgccaaagaggacgggaaggccgacactaagaaacggcacactccaagagggcatgcggagagcaccagtaaccgacagcctaggaaacaaggatag

SEQ ID NO: 211575 - DNA, 1374 bp, Artificial Sequence
  derived and/or modified sequence
atgctgctgccccagctgtgctggctgcccctgctggccggcctgctgccccctgtgcctgcccagaagttcagcgccctgaccttcctgcgggtggaccaggacaaggacaaggactgcagcctggactgtgccggcagcccccagaagcccctgtgtgccagtgatggccgcaccttcctgagccgctgtgagttccagagggccaagtgcaaggacccccagctggagatcgcctaccggggcaactgcaaggatgtgagccgctgtgtggccgagaggaagtacacccaggagcaggccaggaaggagttccagcaggtgttcatccctgagtgcaatgatgatggcacctacagccaggtgcagtgccacagctacacaggctactgctggtgtgtgaccccaaatggccggcccatcagcggcacagctgtggcccacaagaccccccgctgccccggctctgtgaatgagaagctgccccagcgggagggcaccgggaagacagtgtccctgcagatcttctctgtgctgaacagtgatgatgctgctgccccagccctggagacccagccccagggagatgaggaggacatcgccagccgctaccccaccctgtggacagagcaggtgaagagccggcagaacaagaccaacaagaacagcgtgagcagctgtgaccaggagcaccagagcgccctggaggaggccaagcagcccaagaatgacaacgtggtgatcccagaatgtgcccatggaggcctgtacaagcctgtgcagtgccaccccagcacaggctactgctggtgtgtgctggtggacaccggccggcccatccctggcaccagcaccaggtatgagcagcccaagtgtgacaacacagcccgggcccacccagccaaggcccgggacctgtacaagggccggcagctgcagggctgccctggggccaagaagcatgagttcctgacctctgtgctggatgccctgagcacagacatggtgcacgccgccagtgaccccagcagcagcagcggccgcctgtctgagccagaccccagccacaccctggaggagcgggtggtgcactggtacttcaagctgctggacaagaacagcagcggggacatcggcaagaaggagatcaagcccttcaagcgcttcctgaggaagaagagcaagcccaagaagtgtgtgaagaagtttgtggagtactgtgatgtgaacaatgacaagagcatctctgtgcaggagctgatgggctgcctgggcgtggccaaggaggatggcaaggctgacaccaagaagaggcacaccccccggggccatgctgagagcaccagcaaccggcagcccaggaagcagggctag

SEQ ID NO: 211576 - DNA, 1374 bp, Artificial Sequence
  derived and/or modified sequence
atgctgctgccccagctgtgctggctgcccctgctggccggcctgctgccccccgttcctgcacagaagttctccgcacttaccttcctgagagtggaccaggacaaagataaagactgctctctggattgcgctggcagccctcagaaacctctgtgcgcgagcgatggaaggacctttctgtccaggtgtgagtttcagagggcgaaatgtaaggatccacaattggagatagcctacaggggtaattgtaaagatgtcagtcgctgcgtggccgagcgcaaatatactcaagagcaagccaggaaagagtttcagcaggtatttataccagaatgtaatgatgatgggacatatagtcaggtgcaatgccacagctacactggctactgttggtgtgtgacacccaacggccggcctatctccggaaccgcggtggctcataaaacacccaggtgtcctggctcggtgaacgagaaactaccccagagggaagggaccggaaagactgtgagcttacagatattctccgtcctcaattctgatgacgctgccgcgcctgctctggaaacccaacctcagggcgacgaggaggatattgcctcaaggtatcctaccctgtggacagagcaggtcaaatccaggcagaacaagactaataaaaatagcgttagcagctgtgaccaggaacatcagagtgcactggaggaagctaaacagcctaagaacgataatgtggtcatcccagagtgtgcccacggaggattatacaaaccagtccagtgtcacccctcaacgggctactgttggtgcgtactggtggacacagggaggcccatccccgggacttctactcggtatgaacagcccaagtgtgataataccgccagggctcacccagcaaaggccagggatctgtacaagggccggcagctacagggctgtcccggcgccaaaaaacacgaatttctcactagtgtgttagatgcactcagcacggatatggtgcatgccgcttcggacccatcctcaagctctgggaggctgtctgaacccgacccttctcacactctcgaggagagagtggtgcactggtattttaaactgctggataaaaattcttcgggcgatattgggaagaaagagattaagcccttcaagagatttcttcgaaagaagagtaaaccaaagaagtgtgtgaaaaagttcgtggaatactgcgatgttaacaatgacaaaagcatttctgtccaggagctgatgggctgcctgggagtcgccaaggaggatggcaaagctgacaccaagaaacggcacaccccaaggggacatgctgaaagcacttccaaccggcaaccccggaagcagggatag

SEQ ID NO: 211577 - DNA, 1374 bp, Artificial Sequence
  derived and/or modified sequence
atgttgctcccacagctgtgttggttaccattgttggccggactgcttccacccgtgcccgctcagaaatttagcgccctcacctttctgagggtggaccaggataaggacaaagattgcagtctagattgcgcgggttccccccaaaagcctctgtgcgcctcagatggtcgaaccttcttgtcgcgttgtgagtttcagcgagctaaatgtaaagatcctcaacttgagatcgcttacaggggtaactgcaaggacgtgagtaggtgcgttgcagaacggaagtacacccaggaacaggcgcgtaaagagttccaacaggtattcattcccgaatgcaatgatgacggaacctattcacaggttcagtgccattcttacacgggatactgttggtgcgtgaccccaaatggcaggcccatcagtggaaccgccgtggctcataaaaccccgcgttgtccaggatctgttaacgaaaagctaccgcagcgagaaggtacgggaaaaaccgtaagcctacagattttttcagtgctaaactctgatgacgccgcagctccagccctggaaacacaaccacaaggagacgaagaagatattgccagtcggtaccctacactgtggacggagcaggtgaagtcaaggcagaataagaccaataagaactctgtgtccagctgcgaccaggaacaccagagtgctttagaagaagcgaagcagcccaaaaacgataacgtcgtgattcctgagtgtgcccacggcggtctctataaacctgtacagtgccaccccagcacaggttactgctggtgtgtgctggttgatacaggccgaccaataccaggtacatctacccggtatgagcagccaaaatgtgacaatacggcccgagctcacccagctaaagctcgagatctttacaaaggacgacagctgcaggggtgccccggagcaaaaaagcacgaattcctaaccagcgtcttggacgctttaagcactgatatggttcatgctgctagtgatcctagttcgagttctggaagattatcggagcccgatcctagtcatactctggaggagcgggtggtccactggtattttaaactactggataaaaacagtagcggggatataggtaaaaaagagatcaaacccttcaagaggtttttgagaaaaaaatctaaacccaagaaatgtgtgaagaagtttgtcgaatattgcgatgtgaacaatgataagagtatcagcgtccaagagctgatgggctgtctgggcgtcgccaaggaggacgggaaggcagacacaaaaaaaaggcatactccaagaggacatgctgaaagtacaagcaaccgccaacctcggaagcagggatag

SEQ ID NO: 211578 - DNA, 3150 bp, Artificial Sequence
  derived and/or modified sequence
gggtatttgacaggagcgagggcggacgcaaagaacgcggaggacctctgggtgcctgcaggggagctgctccagccgggccgccgggagcggtggggagagcatcgcggagccgcccctccacgcgcccgcccagccgcgctcgcccactgggctctcccggctgcagtgccagggcgcaggacgcggccgatctcccgctcccgccacctccgccaccatgctgctcccccagctctgctggctgccgctgctcgctgggctgctcccgccggtgcccgctcagaagttctcggcgctcacgtttttgagagtggatcaagataaagacaaggattgtagcttggactgtgcgggttcgccccagaaacctctctgcgcatctgacggaaggaccttcctttcccgttgtgaatttcaacgtgccaagtgcaaagatccccagctagagattgcatatcgaggaaactgcaaagacgtgtccaggtgtgtggccgaaaggaagtatacccaggagcaagcccggaaggagtttcagcaagtgttcattcctgagtgcaatgacgacggcacctacagtcaggtccagtgtcacagctacacgggatactgctggtgcgtcacgcccaacgggaggcccatcagcggcactgccgtggcccacaagacgccccggtgcccgggttccgtaaatgaaaagttaccccaacgcgaaggcacaggaaaaacagtctccttgcaaatcttttccgttctgaattcagatgatgccgcagctccagcgttggagactcagcctcaaggagatgaagaagatattgcatcacgttaccctaccctttggactgaacaggttaaaagtcggcagaacaaaaccaataagaattcagtgtcatcctgtgaccaagagcaccagtctgccctggaggaagccaagcagcccaagaacgacaatgtggtgatccctgagtgtgcgcacggcggcctctacaagccagtgcagtgccacccctccacggggtactgctggtgcgtcctggtggacacggggcgccccattcccggcacatccacaaggtacgagcagccgaaatgtgacaacacggccagggcccacccagccaaagcccgggacctgtacaagggccgccagctacaaggttgtccgggtgccaaaaagcatgagtttctgaccagcgttctggacgcgctgtccacggacatggtccacgccgcctccgacccctcctcctcgtcaggcaggctctcagaacccgaccccagccataccctagaggagcgggtggtgcactggtacttcaaactactggataaaaactccagtggagacatcggcaaaaaggaaatcaaacccttcaagaggttccttcgcaaaaaatcaaagcccaaaaaatgtgtgaagaagtttgttgaatactgtgacgtgaataatgacaaatccatctccgtacaagaactgatgggctgcctgggcgtggcgaaagaggacggcaaagcggacaccaagaaacgccacacccccagaggtcatgctgaaagtacgtctaatagacagccaaggaaacaaggataaatggctcataccccgaaggcagttcctagacacatgggaaatttccctcaccaaagagcaattaagaaaacaaaaacagaaacacatagtatttgcactttgtactttaaatgtaaattcactttgtagaaatgagctatttaaacagactgttttaatctgtgaaaatggagagctggcttcagaaaattaatcacatacaatgtatgtgtcctcttttgaccttggaaatctgtatgtggtggagaagtatttgaatgcatttaggcttaatttcttcgccttccacatgttaacagtagagctctatgcactccggctgcaatcgtatggctttctctaacccctgcagtcacttccagatgcctgtgcttacagcattgtggaatcatgttggaagctccacatgtccatggaagtttgtgatgtacggccgaccctacaggcagttaacatgcatgggctggtttgtttcttgggattttctgttagtttgtcttgttttgctttccagagatcttgctcatacaatgaatcacgcaaccactaaagctatccagttaagtgcaggtagttcccctggaggaaataatattttcaaactgtcgttggtgtgatactttggctcaaaggatctttgcttttccattttaagcttctgttttgagttttgccctggggcttgaatgagtcccagagagtcgttcggatggtgggaggctgcctaggaggcagtaaatccagtcacagtgcctgggaggggcccatccttccaaaatgtaaatccagtcgcggtgtgaccgagctggctaacaggcttgtctgcctggttttcctcctacacgtggacattattctcctgatcctcctacctggtccaccccagggctaccggaaggtaaaatcttcacctgaaccaattatgagcagtctccttactgaaggtacagccggatacgtggtgcccccggggctggtgttggcagccggggggaggtgcctgagggtccccacggttcctttctgcttttctgaatgcatcaagggtacgagaacttgccaatgggaaattcatccgagtggcactggcagagaaggataggagtggaatgcccacacagtgaccaacagaactggtctgcgtgcataaccagctgccaccctcaggcctgggccccagagctcagggcacccagtgtcttaaggaaccatttggaggacagtctgagagcaggaacttcaagctgtgattctatctcggctcagacttttggttggaaaaagatcttcatggccccaaatcccctgagacatgccttgtagaatgattttgtgatgttgtgatgcttgtggagcatcgcgtaaggcttcttgcttatttaaactgtgcaaggtaaaaatcaagcctttggagccacagaaccagctcaagtacatgccaatgttgtttaagaaacagttatgatcctaaactttttggataatcttttatatttctgacctttgaatttaatcattgttcttagattaaaataaaatatgctattgaaactata

SEQ ID NO: 211579 - protein, 269 aa, Artificial Sequence
  derived and/or modified sequence
MVRCLGPALLLLLLLGSASSVGGNRCVDAAEACTADARCQRLRSEYVAQCLGRAAQGGCPRARCRRALRRFFARGPPALTHALLFCPCAGPACAERRRQTFVPSCAFSGPGPAPPSCLEPLNFCERSRVCRPRLLAFQVSCTPAPSAPDGCLLDQGARCLRAYAGLVGTAVTPNYVDNVSARVAPWCDCGASGNRREDCEAFRGLFTRNRCLDGAIQAFASGWPPVLLDQLNPQGDPEHSLLQVSSTGRALERRSLLSILPVLALPALL

SEQ ID NO: 211580 - DNA, 810 bp, Artificial Sequence
  derived and/or modified sequence
atggtgcgttgcctggggcctgcccttctgcttctgctcctgctgggctccgccagctcagttgggggtaaccgttgtgttgatgctgccgaagcctgcaccgctgacgccagatgtcagcgattaaggtccgaatacgtagcacaatgtctggggagagccgcacagggcggttgtcctcgcgcaagatgccggagagcacttaggcgatttttcgcaagaggaccacccgcacttacacacgcattgctcttttgtccttgcgccggtccagcatgcgcggagcgtagaagacaaaccttcgtgccatcttgtgcattctccggaccgggtcccgctccaccaagttgtcttgagccccttaacttctgtgagcgcagccgagtgtgccgccctaggctgcttgcctttcaggtgagttgcacaccagcaccctctgcccctgacggctgcctgctggaccaaggtgctaggtgtcttagagcctacgcaggattggtaggaacagctgtaaccccaaactatgtggacaacgtctcagctcgcgtagctccctggtgcgactgtggtgccagcgggaataggagagaggattgtgaggccttccggggtctgtttactcggaataggtgtcttgatggcgctatacaggccttcgcgagtgggtggccgcctgtgctgctggaccagctcaatccacagggtgaccccgaacacagcttattgcaggtgtcttctaccggtagggccctcgagcggaggagcctcctgagtattcttccggtgttggcgctacctgctcttctgtag

SEQ ID NO: 211581 - DNA, 810 bp, Artificial Sequence
  derived and/or modified sequence
atggttcggtgcctcggaccggctctgcttctcttacttcttttgggtagtgcaagttcggtgggcggcaatcggtgtgtcgacgcggctgaagcctgtaccgccgacgcacggtgtcagagactgcggagtgaatatgtagcacaatgtctgggtcgcgctgcgcaaggtggctgtccccgcgccaggtgtcgccgggccctgcgcaggttcttcgcccgcggcccccccgctctgacccatgccctgttattctgcccctgtgccggtcccgcctgtgcagagagaagacgacagaccttcgtgccctcttgcgccttctctggcccagggcctgcccccccaagctgccttgaacctctcaatttttgcgaaagaagtcgcgtctgtcgccctcgcctgctcgcatttcaagtgagctgcacgcctgccccctcagcccccgacggatgcttgttggaccaaggtgctcgctgcctcagagcctacgctgggctggtgggaacagcggtgaccccaaactacgtcgataatgtgagcgcgagggttgcgccgtggtgcgactgcggtgcatctgggaatagaagagaagattgcgaggcctttcgtgggctctttactcgcaaccgttgtctggacggcgccattcaagccttcgcctccgggtggcccccagtgttactcgaccagcttaatccgcagggggatcccgaacactctctgcttcaggtgtcctctacaggccgtgcattagagcgccggagcttgcttagcatccttcctgttttagccttacccgccctgttgtag

SEQ ID NO: 211582 - DNA, 810 bp, Artificial Sequence
  derived and/or modified sequence
atggttaggtgccttggtcccgccttactgctcctgcttctcctcgggagcgcttcgagtgtgggaggcaatagatgtgttgacgctgctgaagcctgtaccgccgacgcacgctgtcagaggttacgaagtgagtatgtcgcccaatgcctgggtagagctgctcagggtggatgtcccagagcgagatgcagaagagccctgagacgtttttttgcaagaggtcctccagccctgactcacgccctgttattctgcccctgcgccggtccggcgtgcgcagagagaagacgtcagacgttcgtcccatcctgtgcattttccggccccggccctgctccaccaagctgtcttgaaccactcaatttttgtgaacgatcgcgggtgtgccggcctcggttgctggcctttcaggttagttgcaccccggcgcctagtgccccggatggatgcctgcttgaccagggagccagatgtctccgagcatacgctggcctggtgggaacagctgttactcccaattatgtggataatgtaagcgccagggtggccccttggtgcgattgcggcgcaagcggaaaccggagagaagattgtgaagcctttcgagggctgtttaccaggaacaggtgtctcgacggagctattcaggccttcgcctccggatggcctccagtgttgctcgatcagcttaatccccaaggcgacccagaacactctttgctgcaggtaagttctacaggacgcgccctggaaagacgttctctgctctctatcctaccagttctggccctccctgccttattatag

SEQ ID NO: 211583 - DNA, 1427 bp, Artificial Sequence
  derived and/or modified sequence
atggtccgctgcctggggcctgcgctgctgctgctgctgttactggggtcggcgagctcggtcggagggaaccgatgtgtggacgcggccgaagcctgcacggcggacgcgcggtgccagcgtttgcgctccgagtatgtggcgcagtgcctgggccgggctgcgcaggggggctgtccccgcgcccgctgccgccgggccctgcgccgcttcttcgcccgcgggccgcccgcgctcacccacgcactgctcttctgcccgtgcgcgggccccgcgtgcgccgagcgtcggcgccagaccttcgtgccctcctgcgccttttcggggcccggccccgcgccgccctcctgccttgagcccttaaacttctgcgagcgcagccgggtctgcaggcctcgcctcctggcctttcaggtctcgtgcaccccagcgcccagcgcccccgacggctgcctgctggaccagggcgcccgctgcctgcgcgcctacgcgggcctcgtgggcaccgccgtcacccctaactacgtggacaacgtgagcgcgcgcgtggcgccctggtgcgactgcggagccagcgggaaccggcgtgaggactgcgaagccttccgggggctctttaccaggaaccgctgcttggatggtgccattcaggcctttgccagcgggtggcccccagtcctgctggaccagctgaacccccagggagacccggagcacagcctcctgcaggtgtcctccacaggcagggccctggagagacgctccctgctctccatacttcctgtcctggctctcccggccctgctctgattaggacagcgacctcggatagcacagccagctactccaccctgcctgcctgggccgcctctgtggcctactggccccttgagaaggggctggcttaccccccaagccggccctggtgctttcactccgctgccctttgtaggtttggacaccctgtgtgccgtcccctggggcaagggatgtaggctggggcctgactgtaaagcccccgtctccctgtcaggaggcatcttggttgtaagtccctttattcacagaccttgagaccactggggtctcccacaaggtggggtcaggagagggtcacttttgtagctgagacctctctggagacccagatcccctagagcaggtcagagaccatccagaatcccagaattctaggaaattgtatcagcctcccaagcatataaccccctaaggaatccatcggacaagaccccgtctaacactgcatcctcccaactgggcattacccaccattgtagccacctgtgcgccatgaccatgctggcagagtctttcctgttccccatatgctgcttgaggggccccaccctgtgccctgcctggcattggccctgtggccatcttccccctggtttcctgcagctgta

SEQ ID NO: 211584 - DNA, 810 bp, Artificial Sequence
  derived and/or modified sequence
atggtgagatgcctgggccccgccctgctgctgctgctgctgctgggcagcgccagcagcgtgggcggcaacagatgcgtggacgccgccgaggcctgcaccgccgacgccagatgccagagactgagaagcgagtacgtggcccagtgcctgggcagagccgcccagggcggctgccccagagccagatgcagaagagccctgagaagattcttcgccagaggcccccccgccctgacccacgccctgctgttctgcccctgcgccggccccgcctgcgccgagagaagaagacagaccttcgtgcccagctgcgccttcagcggccccggccccgccccccccagctgcctggagcccctgaacttctgcgagagaagcagagtgtgcagacccagactgctggccttccaggtgagctgcacccccgcccccagcgcccccgacggctgcctgctggaccagggcgccagatgcctgagagcctacgccggcctggtgggcaccgccgtgacccccaactacgtggacaacgtgagcgccagagtggccccctggtgcgactgcggcgccagcggcaacagaagagaggactgcgaggccttcagaggcctgttcaccagaaacagatgcctggacggcgccatccaggccttcgccagcggctggccccccgtgctgctggaccagctgaacccccagggcgaccccgagcacagcctgctgcaggtgagcagcaccggcagagccctggagagaagaagcctgctgagcatcctgcccgtgctggccctgcccgccctgctgtag

SEQ ID NO: 211585 - DNA, 810 bp, Artificial Sequence
  derived and/or modified sequence
atggtcaggtgtctgggcccagccttattgcttcttttacttctgggttccgctagcagtgttggaggcaaccgatgcgtcgacgctgcagaggcttgtaccgccgatgcccgttgtcagagactgcgctcagagtatgtcgcacagtgcctcggcagagccgcccaaggtgggtgtcccagagccaggtgcaggcgagcactgaggcgcttcttcgcacggggcccgcccgctcttactcacgcgctccttttctgcccttgcgcaggacccgcatgtgctgaaagacgcaggcagactttcgtcccatcttgcgccttttccgggcccggccccgcccctcctagctgtctggaacctctcaacttttgtgaacggtccagggtgtgtagaccaaggcttcttgcctttcaagtgagctgtactccagcacctagcgcgcctgacggatgcctccttgatcagggcgcacggtgcttacgggcatatgcaggcctggtggggacagctgtgactcccaattatgtggataatgtgtcggctcgcgtggctccgtggtgtgattgtggggcttctgggaatcgcagggaggattgcgaagcatttagagggctgtttactcgaaacagatgtctagatggagctatccaggcgtttgcatcaggttggcctcccgtgttattagatcaactgaatccgcaaggcgatcccgaacattccctgctgcaggtctctagtaccggcagagcactcgaacggagatcattgttgtcgatactccctgttctggccttgccagctctattatag

SEQ ID NO: 211586 - DNA, 810 bp, Artificial Sequence
  derived and/or modified sequence
atggtgcgctgcctgggccctgccctgctgctgctgctgctgctgggcagcgccagctctgtgggcggcaacagatgtgtggatgctgctgaggcctgcacagcagatgcccgctgccagaggctgcggagtgaatatgtggcccagtgcctgggccgggccgcccagggcggctgcccccgggcccgctgcagaagagccctgcggcgcttctttgcccggggccccccagccctgacccacgccctgctcttctgcccctgtgccggccctgcctgtgccgagcggcggcggcagacctttgtgcccagctgtgccttcagcggccctggccctgccccacccagctgcctggagcccctgaacttctgtgagaggagccgggtgtgccggccccggctgctggccttccaggtgtcctgcaccccagcccccagcgccccagatggctgcctgctggaccagggcgcccgctgcctgcgggcctatgccggcctggtgggcacagctgtgacccccaactacgtggacaacgtgtctgcccgggtggccccctggtgtgactgtggggccagcggcaacagaagagaggactgtgaggccttccggggcctcttcaccaggaaccgctgcctggatggagccatccaggcctttgccagcggctggccccctgtgctgctggaccagctgaacccccagggcgaccctgagcacagcctgctgcaggtgagcagcacaggccgggccctggagaggaggagcctgctgagcatcctgcctgtgctggccctgcctgccctgctgtag

SEQ ID NO: 211587 - DNA, 810 bp, Artificial Sequence
  derived and/or modified sequence
atggtgcggtgcctgggccccgccctgctgctgctgctgctgctggggtcagcgagcagcgtaggaggaaatcgttgtgttgacgcggctgaagcctgtacagccgacgcccgctgtcagaggctcagatccgaatacgtggcccaatgtctcggcagggcagcccagggcgggtgtccgagagcccgctgtcgccgagctctcagaaggttctttgctaggggtcccccagcactaacccatgctctgctcttttgtccttgcgctgggccagcctgtgcagagcgcagacgacagaccttcgtgccttcgtgcgccttctccggccccggaccagctccaccaagttgtctggaaccgctgaatttttgtgagaggtctagggtctgcaggccaagactgctagcatttcaggtcagctgtactccagctccttctgcccccgacgggtgtttgcttgaccagggagctagatgtttgcgcgcgtatgcaggactggttggaacagcagtgactccaaattacgtcgacaacgtgagcgctagagtggcaccttggtgtgactgcggggcaagtggaaatagacgagaggattgtgaagccttccggggccttttcactaggaatcgctgtctagacggagctatccaggcgtttgcctctggatggcccccggtactacttgatcagctgaaccctcagggagacccagagcatagcttgcttcaagtctccagcacaggccgcgcactcgagaggaggtctctcctgtctatcctccccgtgctggcactgcccgctcttttgtag

SEQ ID NO: 211588 - RNA, 810 nt, Artificial Sequence
  derived and/or modified sequence
augguucggugccucggaccggcucugcuucucuuacuucuuuuggguagugcaaguucggugggcggcaaucggugugucgacgcggcugaagccuguaccgccgacgcacggugucagagacugcggagugaauauguagcacaaugucugggucgcgcugcgcaagguggcuguccccgcgccaggugucgccgggcccugcgcagguucuucgcccgcggcccccccgcucugacccaugcccuguuauucugccccugugccggucccgccugugcagagagaagacgacagaccuucgugcccucuugcgccuucucuggcccagggccugcccccccaagcugccuugaaccucucaauuuuugcgaaagaagucgcgucugucgcccucgccugcucgcauuucaagugagcugcacgccugcccccucagcccccgacggaugcuuguuggaccaaggugcucgcugccucagagccuacgcugggcuggugggaacagcggugaccccaaacuacgucgauaaugugagcgcgaggguugcgccguggugcgacugcggugcaucugggaauagaagagaagauugcgaggccuuucgugggcucuuuacucgcaaccguugucuggacggcgccauucaagccuucgccuccggguggcccccaguguuacucgaccagcuuaauccgcagggggaucccgaacacucucugcuucagguguccucuacaggccgugcauuagagcgccggagcuugcuuagcauccuuccuguuuuagccuuacccgcccuguuguag

SEQ ID NO: 211589 - RNA, 810 nt, Artificial Sequence
  derived and/or modified sequence
augguuaggugccuuggucccgccuuacugcuccugcuucuccucgggagcgcuucgagugugggaggcaauagauguguugacgcugcugaagccuguaccgccgacgcacgcugucagagguuacgaagugaguaugucgcccaaugccuggguagagcugcucaggguggaugucccagagcgagaugcagaagagcccugagacguuuuuuugcaagagguccuccagcccugacucacgcccuguuauucugccccugcgccgguccggcgugcgcagagagaagacgucagacguucgucccauccugugcauuuuccggccccggcccugcuccaccaagcugucuugaaccacucaauuuuugugaacgaucgcgggugugccggccucgguugcuggccuuucagguuaguugcaccccggcgccuagugccccggauggaugccugcuugaccagggagccagaugucuccgagcauacgcuggccuggugggaacagcuguuacucccaauuauguggauaauguaagcgccaggguggccccuuggugcgauugcggcgcaagcggaaaccggagagaagauugugaagccuuucgagggcuguuuaccaggaacaggugucucgacggagcuauucaggccuucgccuccggauggccuccaguguugcucgaucagcuuaauccccaaggcgacccagaacacucuuugcugcagguaaguucuacaggacgcgcccuggaaagacguucucugcucucuauccuaccaguucuggcccucccugccuuauuauag

SEQ ID NO: 211590 - protein, 686 aa, Artificial Sequence
  derived and/or modified sequence
MGCFCAVPEEFYCEVLLLDESKLTLTTQQQGIKKSTKGSVVLDHVFHHVNLVEIDYFGLRYCDRSHQTYWLDPAKTLAEHKELINTGPPYTLYFGIKFYAEDPCKLKEEITRYQFFLQVKQDVLQGRLPCPVNTAAQLGAYAIQSELGDYDPYKHTAGYVSEYRFVPDQKEELEEAIERIHKTLMGQIPSEAELNYLRTAKSLEMYGVDLHPVYGENKSEYFLGLTPVGVVVYKNKKQVGKYFWPRITKVHFKETQFELRVLGKDCNETSFFFEARSKTACKHLWKCSVEHHTFFRMPENESNSLSRKLSKFGSIRYKHRYSGRTALQMSRDLSIQLPRPDQNVTRSRSKTYPKRIAQTQPAESNSISRITANMENGENEGTIKIIAPSPVKSFKKAKNENSPDTQRSKSHAPWEENGPQSGLYNSPSDRTKSPKFPYTRRRNPSCGSDNDSVQPVRRRKAHNSGEDSDLKQRRRSRSRCNTSSGSESENSNREYRKKRNRIRQENDMVDSAPQWEAVLRRQKEKNQADPNNRRSRHRSRSRSPDIQAKEELWKHIQKELVDPSGLSEEQLKEIPYTKIETQGDPIRIRHSHSPRSYRQYRRSQCSDGERSVLSEVNSKTDLVPPLPVTRSSDAQGSGDATVHQRRNGSKDSLMEEKPQTSTNNLAGKHTAKTIKTIQASRLKTET

SEQ ID NO: 211591 - DNA, 2061 bp, Artificial Sequence
  derived and/or modified sequence
atgggctgcttctgcgccgtgcctgaagagttttattgtgaagtgctcttgcttgatgagtcaaaactcactctaacaactcagcaacaaggcatcaaaaaatctaccaagggatctgtcgtgctggaccacgtgtttcaccacgtgaatctggtggaaattgattattttggactcaggtactgcgaccggtctcaccaaacctactggctggaccctgccaagactctggctgagcacaaagagttgatcaatacgggaccaccctacacgctctactttggaatcaagttctatgccgaagatccttgtaagctcaaggaggaaattacccgataccagttttttctacaagttaaacaggatgttctgcaggggcgactgccttgccctgtgaacaccgccgcccagctgggcgcctatgctattcaaagtgaactgggcgactatgacccttataagcatacagcaggctatgtatctgagtacaggttcgtacccgatcagaaggaggagttagaagaagccatagagcgcattcacaaaacacttatggggcaaattccgtcggaggccgagctcaactatttaagaacagctaagtctttggaaatgtacggtgtggatctgcacccagtgtacggagagaacaaatctgagtactttttggggctgacccccgtgggcgtagtcgtatataagaacaagaaacaggtgggaaagtacttctggccccgcatcaccaaggtccattttaaagagacacagtttgaactgagagtcctgggcaaagattgcaacgagactagcttcttttttgaggccagatcgaagaccgcttgtaagcacctgtggaagtgttccgtggagcaccataccttttttaggatgccagagaacgagtctaacagccttagtaggaagttgagcaagtttggatctatcaggtataagcaccgctactcgggccgcaccgcactacagatgtccagggacctgagcattcagctgccaaggccagaccaaaacgttacccgctccagatccaagacctaccctaagcggattgcccaaacacagccagcggaatccaattctatttcccggatcaccgccaacatggaaaatggagagaatgaaggaacgatcaaaatcatcgcccctagtcccgtgaaatcttttaagaaggccaaaaatgagaacagcccagacacgcagcgcagtaagtctcacgctccatgggaggaaaacggcccccagagtggactctacaactctccctcagatcgcactaagagccctaagttcccttatacacgcagaagaaaccctagctgcgggtcggacaacgactcggtgcagcccgtgaggcggcgaaaggcccataactccggcgaagactctgaccttaagcagcgccgacggtctagatcccgttgtaacaccagctccgggtctgaatccgagaacagcaaccgggagtaccggaaaaagagaaaccggattagacaggagaacgacatggttgactcagcaccccaatgggaggcggtcctgcggaggcagaaggagaagaatcaagccgatccgaataaccggagatccaggcaccgcagcagaagccggagccccgatatccaagccaaagaggagctctggaagcacatccaaaaggaattagtcgacccgagcggcctctccgaggagcagcttaaagagatcccgtacaccaaaatcgagacacagggagatcccataagaatcagacactcccacagccctaggtcttaccgccaatacaggaggtcccagtgcagcgacggagagagatccgttttgtccgaggtcaacagtaagaccgacctggtgccacctctcccagtgactagatcatctgatgcacagggctccggagatgccacagtgcaccagagacggaacggctccaaggattcgctgatggaggagaagccgcagactagtactaacaacctggccggtaaacacacagccaagactattaaaaccattcaagcctccaggctcaagaccgagacatag

SEQ ID NO: 211592 - DNA, 2061 bp, Artificial Sequence
  derived and/or modified sequence
atgggctgcttctgtgctgtgcctgaggagttctactgtgaggtgctgctgctggatgagagcaagctgaccctgaccacccagcagcagggcatcaagaagagcaccaagggctctgtggtgctggaccacgtgttccaccacgtgaacctggtggagattgactacttcggcctgcgctactgtgacaggagccaccagacctactggctggaccctgccaagaccctggccgagcacaaggagctgatcaacacaggccccccctacaccctgtacttcggcatcaagttctatgcagaggacccctgcaagctgaaggaggagatcacccgctaccagttcttcctgcaggtgaagcaggatgtgctgcagggccgcctgccctgccctgtgaacacagctgcccagctgggcgcctatgccatccagagcgagctgggggactatgacccctacaagcacacagctggctacgtgtctgagtacagatttgtgcctgaccagaaggaggagctggaggaggccatcgagcgcatccacaagaccctgatgggccagatccccagcgaggccgagctgaactacctgaggacagccaagagcctggagatgtatggagtggacctgcaccctgtgtatggagagaacaagtctgagtacttcctgggcctgacccctgtgggcgtggtggtgtacaagaacaagaagcaggtgggcaagtacttctggccccgcatcaccaaggtgcacttcaaggagacccagtttgagctgcgggtgctgggcaaggactgcaatgagaccagcttcttctttgaggcccggagcaagacagcctgcaagcacctgtggaagtgcagcgtggagcaccacaccttcttcaggatgccagaaaatgaaagcaacagcctgagcaggaagctgagcaagtttggcagcatccgctacaagcaccgctacagcggccgcacagccctgcagatgagccgggacctgagcatccagctgcccaggccagaccagaatgtgaccaggagccgcagcaagacctaccccaagagaattgcccagacccagcctgctgagagcaacagcatcagccgcatcacagccaacatggagaatggagaaaatgaaggcaccatcaagatcatcgcccccagccctgtgaagagcttcaagaaggccaagaatgaaaacagcccagacacccagaggagcaagagccacgccccctgggaggagaatggcccccagagcggcctgtacaacagccccagcgacaggaccaagagccccaagttcccctacaccaggagaagaaaccccagctgtggcagtgacaatgacagcgtgcagcctgtgagaagaaggaaggcccacaacagcggggaggacagcgacctgaagcagaggcggcgcagccgcagccgctgcaacaccagcagcggcagcgagagcgagaacagcaaccgggagtacaggaagaagaggaaccgcatccggcaggagaatgacatggtggacagcgccccccagtgggaggccgtgctgcggcggcagaaggagaagaaccaggccgaccccaacaacagaagaagccgccacaggagccgcagccgcagcccagacatccaggccaaggaggagctgtggaagcacatccagaaggagctggtggaccccagcggcctgtctgaggagcagctgaaggagatcccctacaccaagattgagacccagggcgaccccatccgcatccgccacagccacagccccaggagctaccggcagtacagaagaagccagtgcagtgatggagagaggtctgtgctgtctgaggtgaacagcaagacagacctggtgccccccctgcctgtgaccaggagcagtgatgcccagggcagcggagatgccaccgtgcaccagaggagaaatggcagcaaggacagcctgatggaggagaagccccagaccagcaccaacaacctggccggcaagcacacagccaagaccatcaagaccatccaggccagccggctgaagacagagacctag

SEQ ID NO: 211593 - DNA, 2061 bp, Artificial Sequence
  derived and/or modified sequence
atgggctgcttctgcgccgtgcccgaggagttctactgcgaggtgttgcttctagacgagagtaaacttacattgaccactcagcagcaggggattaagaagagcactaagggttccgtggtgctcgatcatgtcttccaccacgttaacttggttgagatcgactatttcggactgcggtactgtgataggtctcaccaaacctactggctagatccggctaagaccctcgccgagcataaagaactgattaacacaggccccccctacactctctatttcggaattaagttctacgctgaagatccctgtaaactgaaggaagagattacacgctatcaattcttcttacaggtcaaacaggacgtgctgcaggggagactgccgtgtcccgttaacacagctgcccagcttggagcttatgccatacagagcgagctcggcgactatgacccctacaaacatacagcaggatatgtgtccgaatacaggtttgtgccggaccaaaaggaagagctggaagaggcaattgagaggatccataaaactctaatgggacagatcccatcagaagcagagctgaactatttgagaacagcaaaatccctggagatgtacggtgtggatttacaccctgtgtacggggaaaacaagagcgagtacttcctcgggttgactccagtcggagtagtggtttataaaaataaaaagcaggtgggaaaatatttttggcctcgcatcactaaggtccatttcaaggaaacacagttcgagctaagagtgctgggaaaggattgcaacgaaacttcattcttctttgaggcaagaagtaaaacagcatgcaaacatctgtggaaatgctctgttgagcaccatactttctttcgaatgccagaaaacgagagtaactctcttagccgtaagctctctaagttcggttccatacggtacaagcaccgttattcaggcaggacagccctgcagatgtcaagagacctgtccatacagctgccccgccccgatcagaacgtcacaaggagccgaagtaaaacctaccctaagcgcattgcccagacacagcccgccgagtcgaacagcatctctcgcatcaccgcaaacatggaaaatggagagaatgagggcacaattaaaatcattgcaccttcgccagtgaagtcatttaagaaggcgaagaatgagaattctccagacacacagcggagtaaaagtcacgctccctgggaggagaacggaccacagtccggactgtacaactcaccttctgatcgtactaagtctcccaagtttccttacacacggagacgtaatcctagctgtggctcggataacgactccgtccaaccggttagacgacggaaagcacacaattcgggagaagacagcgacttaaagcaaaggaggagatcccgctcacggtgtaatacatcaagcggtagtgaatccgaaaactctaaccgagaataccgcaaaaagcgtaacaggataaggcaggagaatgacatggtggatagcgctccccagtgggaggctgtgcttagaaggcagaaggaaaagaaccaggccgatcctaacaaccggcgcagcaggcaccgctctcgcagccgttcacctgatattcaagcaaaagaagagctgtggaagcacatacagaaggagcttgttgatccttccggattatccgaggagcagcttaaggagattccttataccaaaattgagacgcagggcgatccaataagaatcaggcattcccattctccccgaagttatcgacaatatagaagatctcagtgctcggacggagaaagatcagttcttagtgaggtgaattcaaaaacggacctagtgcctcccctacccgtgacacgtagttccgacgcccaaggcagtggagacgctaccgtccaccagaggagaaacgggagtaaagattcactgatggaggagaaaccacagacatctaccaataatttggctgggaagcacacggccaagaccattaaaaccatccaggcgagtcggctaaaaactgagacctag

SEQ ID NO: 211594 - DNA, 2061 bp, Artificial Sequence
  derived and/or modified sequence
atgggctgcttttgcgccgttcccgaggagttttattgcgaagtactgcttctcgacgagagtaagttaacacttaccactcagcagcagggaatcaagaagtcaacaaagggttccgtggtgctggatcacgtcttccatcacgttaacctggtagagatcgactacttcgggttgagatactgcgatcggtcacaccagacctactggctagatcctgcgaaaacgttagcggagcacaaagagttgattaacactggcccaccctacactctctacttcggcattaaattctacgcagaagacccttgcaaactcaaggaagaaatcaccaggtatcaattttttcttcaggtgaagcaggatgtgctacaaggtcgcttaccgtgccctgttaatacggctgcgcagctaggcgcttacgccattcagagcgagctgggcgattacgacccttataaacacacagcgggttatgtaagtgaatatagatttgttccagatcagaaagaggagctggaggaagccatcgagcgcattcacaagactctgatgggacaaatcccatcagaggcggaactgaactacttacgaaccgctaagagcctcgaaatgtatggcgtagacctacaccctgtgtatggagaaaataagtcagagtatttcctcggactgaccccagtcggggtggtcgtttacaaaaataaaaagcaggtgggcaagtacttctggccaagaatcacaaaagtgcactttaaagagacccagtttgagctgagagtgttaggcaaggactgcaatgagactagcttcttttttgaggctaggtccaagactgcttgcaagcacttgtggaagtgctcagtcgagcaccatactttttttcggatgcccgaaaacgagagcaattccctcagccggaagctttcgaaatttggctccattcgctataaacaccgctacagtggtcggacagctctacaaatgagtcgggatctctcaattcaattgccaaggcctgaccagaacgtgacacggagccggagcaaaacctaccccaaacgaattgctcaaacccagcccgcagagtcaaactccatctcacgcattacagctaacatggaaaacggcgaaaacgaaggtaccattaagattatcgcgccttccccagtgaaatcatttaagaaggcgaaaaacgagaactctccggacacacagcgtagtaaatctcacgctccttgggaggaaaacgggccacaatctggcctgtacaactcacctagtgataggaccaagagtccgaagttcccgtacacccgcaggaggaatccctcctgcggcagcgacaacgatagtgttcagccggtgcggcgtaggaaagcccacaattccggggaagattccgaccttaagcagaggcggcgatctcgctccagatgcaacacatccagcgggagcgagagcgagaactcaaacagagagtatcggaaaaaacggaaccgcattcgtcaggaaaacgacatggtggactcagcccctcagtgggaagccgtgctgagaagacaaaaggaaaaaaaccaagctgacccaaataatagacgctcccgccatcgctcacgcagccggtctcctgatattcaggcaaaggaggaactctggaaacatattcagaaggagctcgtcgatccctctggtttgtcggaggagcaactgaaggagataccctatactaagatcgagactcagggcgatcctattaggattcgacatagccacagccccaggtcttaccgccaatataggcggtcacagtgttctgatggtgaacgtagtgtgctctcagaggttaactcaaagactgacctcgtaccccctcttcctgttaccaggtcgtctgacgcgcaggggtccggagacgcaaccgttcaccagcgcaggaatgggagcaaagattccctaatggaagaaaaacctcagacttctactaataatctggccggtaaacatacggccaaaactattaaaaccattcaggcgtcaagactgaaaactgaaacatag

SEQ ID NO: 211595 - DNA, 2061 bp, Artificial Sequence
  derived and/or modified sequence
atgggctgcttctgcgccgtgcccgaggagttctactgcgaggtgctgctgctggacgagagcaagctgaccctgaccacccagcagcagggcatcaagaagagcaccaagggcagcgtggtgctggaccacgtgttccaccacgtgaacctggtggagatcgactacttcggcctgagatactgcgacagaagccaccagacctactggctggaccccgccaagaccctggccgagcacaaggagctgatcaacaccggccccccctacaccctgtacttcggcatcaagttctacgccgaggacccctgcaagctgaaggaggagatcaccagataccagttcttcctgcaggtgaagcaggacgtgctgcagggcagactgccctgccccgtgaacaccgccgcccagctgggcgcctacgccatccagagcgagctgggcgactacgacccctacaagcacaccgccggctacgtgagcgagtacagattcgtgcccgaccagaaggaggagctggaggaggccatcgagagaatccacaagaccctgatgggccagatccccagcgaggccgagctgaactacctgagaaccgccaagagcctggagatgtacggcgtggacctgcaccccgtgtacggcgagaacaagagcgagtacttcctgggcctgacccccgtgggcgtggtggtgtacaagaacaagaagcaggtgggcaagtacttctggcccagaatcaccaaggtgcacttcaaggagacccagttcgagctgagagtgctgggcaaggactgcaacgagaccagcttcttcttcgaggccagaagcaagaccgcctgcaagcacctgtggaagtgcagcgtggagcaccacaccttcttcagaatgcccgagaacgagagcaacagcctgagcagaaagctgagcaagttcggcagcatcagatacaagcacagatacagcggcagaaccgccctgcagatgagcagagacctgagcatccagctgcccagacccgaccagaacgtgaccagaagcagaagcaagacctaccccaagagaatcgcccagacccagcccgccgagagcaacagcatcagcagaatcaccgccaacatggagaacggcgagaacgagggcaccatcaagatcatcgcccccagccccgtgaagagcttcaagaaggccaagaacgagaacagccccgacacccagagaagcaagagccacgccccctgggaggagaacggcccccagagcggcctgtacaacagccccagcgacagaaccaagagccccaagttcccctacaccagaagaagaaaccccagctgcggcagcgacaacgacagcgtgcagcccgtgagaagaagaaaggcccacaacagcggcgaggacagcgacctgaagcagagaagaagaagcagaagcagatgcaacaccagcagcggcagcgagagcgagaacagcaacagagagtacagaaagaagagaaacagaatcagacaggagaacgacatggtggacagcgccccccagtgggaggccgtgctgagaagacagaaggagaagaaccaggccgaccccaacaacagaagaagcagacacagaagcagaagcagaagccccgacatccaggccaaggaggagctgtggaagcacatccagaaggagctggtggaccccagcggcctgagcgaggagcagctgaaggagatcccctacaccaagatcgagacccagggcgaccccatcagaatcagacacagccacagccccagaagctacagacagtacagaagaagccagtgcagcgacggcgagagaagcgtgctgagcgaggtgaacagcaagaccgacctggtgccccccctgcccgtgaccagaagcagcgacgcccagggcagcggcgacgccaccgtgcaccagagaagaaacggcagcaaggacagcctgatggaggagaagccccagaccagcaccaacaacctggccggcaagcacaccgccaagaccatcaagaccatccaggccagcagactgaagaccgagacctag

SEQ ID NO: 211596 - DNA, 4707 bp, Artificial Sequence
  derived and/or modified sequence
cgcaggatgcgcggggacgcgccaccgccctccgcgcccagttccgccggcgcttccccggcggctcccgggcgctgactctcccgggcttttccgcctttctcgctcccgccccgccgggcggttcggcggccggtccccggaccccgccgggagctgctcgtctcaccctcgccacggcgcggacaataaattaatgcatcgcgcttgagtggagggggcggctgggcgcctcggtggtagctttctctcctggctggagacgaccacaaccgacatgggctgtttctgcgctgttccggaagaattttactgcgaagttttgctcctggatgaatccaagttaacccttaccacccagcagcagggcatcaagaagtcaacgaaaggttccgttgtccttgaccacgtattccatcacgtaaaccttgtggagatagattattttgggctacgttactgtgacagaagccatcagacgtattggctggatcctgcaaaaacccttgctgaacacaaagaactgatcaacactggacctccatatactttgtattttggtattaaattctatgctgaagatccatgtaaacttaaagaagaaataaccagatatcagtttttcttgcaggtgaagcaagatgtccttcagggccgtctgccctgtcccgtcaacactgctgctcagctgggagcgtatgccatccagtcggagcttggagattatgacccatataaacatactgcaggatatgtatctgagtaccggtttgttcctgatcagaaggaagaacttgaagaagccatagaaaggattcataaaactctaatgggtcagattccttctgaggctgagctgaattacttgaggactgccaaatccctggagatgtatggcgttgacctccatcccgtctatggagaaaacaagtctgagtatttcttaggattaactccggttggtgttgttgtgtacaagaataaaaagcaagtggggaagtatttctggcctcggattacaaaggttcacttcaaggagactcaatttgaactcagagtactgggaaaagattgtaacgaaacctcattcttttttgaagctcggagtaaaactgcttgcaagcacctctggaagtgcagtgtggaacatcatacattttttagaatgccagaaaatgaatccaattcactgtcaagaaaactcagcaagtttggatccatacgttataagcaccgctacagtggcaggacagctttgcaaatgagccgagatctttctattcagcttccccggcctgatcagaatgtgacaagaagtcgaagcaagacttaccctaagcgaatagcacaaacacagccagctgaatcaaacagcatcagtaggataactgcaaacatggaaaatggagaaaatgaaggaacaattaaaattattgcaccttcaccagtaaaaagctttaagaaagcaaagaatgaaaatagccctgatacccaaagaagcaaatctcatgcaccgtgggaagaaaatggcccccagagtggactctacaattctcccagtgatcgcactaagtcgccaaagttcccttacacgcgtcgccgaaacccctcctgtggaagtgacaatgattctgtacagcctgtgaggaggaggaaagcccataacagtggtgaagattcagatcttaagcaaaggaggaggtcacgttcacgctgtaacaccagcagtggtagtgaatcagaaaattctaatagagaataccggaaaaagagaaacagaatacggcaggagaatgatatggttgattcagcgcctcagtgggaagctgtattaaggagacaaaaggaaaaaaaccaagccgaccccaacaacaggcgatccagacacagatctcgttcgagaagccccgatatccaagcaaaagaagagttatggaagcacattcaaaaagaacttgtggatccatccggattgtccgaagaacaattaaaagagattccatacactaaaatagagacacaaggtgacccaatccgcatcaggcattctcattcgccacgaagttaccgccagtatcgcaggtcccagtgttcagatggggagcgatcagttctctcggaagtgaattcaaaaacagatcttgtaccaccacttccggtgacccgttcttcggatgctcagggttctggggatgctacagttcatcagagaagaaatgggtctaaagatagcctgatggaagaaaaacctcagacatctacaaacaacctggctggaaaacacacagcaaaaacaataaaaactatacaagcttcccgcctcaagacagagacttgatcctgatgaagggtcaagggtaggggtgggaaggttgtgtgcgccactggtacttttgaaactgtgaaataggtatcttaattcaaatctcagacctgcaagtatttcttcagcatgagaaaatacattatcttttgcttctttttttttttttttttgagatgttatcactctgtcgcccaggctggagtgcagcggcaccgtgtcagctcaccgcagcctccacttactgggttaagcgattctcctgtctcaggctcccgagcagctgggattacaggcgtgcaccacaacacccggctaattctttttgtatttttagtagagacagggctttgccatgttggaggctggtctcgaactcctgacctcaagtgatccgcctgcctcagcctcccaaagtgctgggattataggccatggtttaactacagcacagttgtgctgaaggacctttttgttttaactggaagaataagtattttgtaaaaattcacttgataccacattttcatttctggaacaggatagcaatcattcatttctatcttgtgtctgtgtccaccacaaccaagaccagatgcatctgatgaacattctggaattctgaactgcagctagcctgctgtgcaatagtacaagtgggaggacgtcttcccagggctgggctggttctcaactagtgcccagatgcaaaaggactgaggcatcactttcagactgcatatatttttattcatataaagttctttataatactttattttgtggtgttaagttccaccagttatttacaaatgatgtaaaaagctttaagtgttgttaatttctaaagtgttcttgcgttttcagaagtgtaagtggatctcagttgatctgtcaccccaaacctcaaatgatccatccaccctgcttggccatctaattcacctgctctccccagtgactattttgtacctttcctctccatagatgactttgcaatctacagggaaaatacttatgcaggacatcttatatctcccccttaccacgtacagttctctccacagctgccagcagccctaacctttttgtctctccacctgtgctttggatgctcttctcccagccttttcaggatctttgtctgtcctcctatattaatgtattcaattattctctcagctagatccttgctacttggttttaaatttaagactaagattaaacaaaactatctttcacaaccacaaaccccctcccgccaagcaactaagattttcctctcattctcagccagttttcttgcaagcagtatctttagtcattgccctcaattcatctaatccctatcttaagctatctctaacatggatctttccctctactccactaatatcaatcactgtgttacttaatcccagggagaatttttaggacattcttttgcttctttaatataatcctattttgctcctaccactgaccatcctttctggcttatcatgctttaccttgccattaattagtggagtttctcaaacttcagaccctaggccctcttcctctaccaccagcagatctcatttatacccatggccttaaggtttatttctgtagtttagactactgagtaatgtgctactgcaaaaagaccatttgggtttctcaaaggtaatttaaaaattcagctgtttaaatgctgctccccagctgaatctagggtcattatgctcatcagtgtgcaagctggacacctagcagttatggacacctccactattaccacgtctagttggctctgtcatccaactataaacgatcttatttcactaattttactagtccaagctggtctcttgtctagacaacaataagcaacctagttcaactaccttttcttgcaaatctgattttccaccatggatttatcttgctttaataaagccagagggagcctgaagtggtctggcttctttacctacctcttcagcctcattttgtaacactctcacctcccataatagccatcttacaagcctcagtaaggactcagttctaaaacagggcactgaagagggaaagcagccaaaactgtctcaaaagtaagtggactaacggtatcttttttctagcccaagcctctgtatatgtcattcccccagttttgccttgtgaaaaatatgacacatacctttagtctcaactctttctcaggtttccctaagaaaatcctatcacggaactcatctcatagtgaagttttacatttgtgatgacattccctccacttatctatgtttccaaagggaagaactgtgttgtgctcatcatcgtgttctcagctcctagtacagtgctttcaataaattttttgaatacctcta

SEQ ID NO: 211597 - protein, 223 aa, Artificial Sequence [sequence omitted]

SEQ ID NO: 211598 - DNA, 672 bp, Artificial Sequence
  derived and/or modified sequence
atgacccgatggtcgagctatctgctgggctggaccacatttctgttatacagctatgaatcctccggaggcatgcatgaggagtgtgttttccctttcacttataaaggctctgtgtattttacctgcacccacatacattccctttctccatggtgtgctacaagggctgtttataacggacagtggaaatactgtcaaagcgaggattatccaaggtgcatctttccatttatttacaggggtaaggcctataactcctgtatttcccaagggagctttctgggctccttgtggtgcagcgtgactagtgtgtttgatgaaaaacagcaatggaagttctgtgagacaaatgagtacgggggaaactccctccggaagccgtgcattttcccttcaatataccgaaacaacgtggtgtctgattgtatggaagatgagagcaacaagctctggtgtcctacgaccgagaacatggacaaggacggcaagtggagcttttgcgccgataccagaatctctgcactggtccctggcttcccctgtcactttcctttcaactataagaataaaaactacttcaactgcacaaacgagggatctaaagaaaatctggtctggtgcgctacgagctacaattacgaccaggatcacacgtgggtgtactgctag

SEQ ID NO: 211599 - DNA, 672 bp, Artificial Sequence
  derived and/or modified sequence
atgacacggtggagttcttatttactgggctggaccacttttttgttatacagttacgaaagttccggcggcatgcatgaggaatgtgttttccccttcacctataaggggtccgtctactttacttgcactcacattcatagtcttagtccttggtgcgcgacgagggccgtatacaatggtcaatggaagtactgccagtcagaggactacccaaggtgtattttcccattcatctaccgcggcaaggcctataatagttgtatctcacagggctcctttttgggcagtctctggtgctcagtaacatctgtgttcgacgaaaagcagcaatggaagttttgcgaaaccaacgagtacgggggaaactctttgagaaagccatgtatcttcccctcaatatataggaataatgtggtaagcgattgcatggaggacgaatctaacaagctctggtgccctacgactgagaatatggataaggatggcaaatggagcttctgtgccgatacccgcattagcgctttagtgcccgggttcccttgccacttccctttcaactataagaataaaaactactttaactgtacgaacgagggaagcaaagaaaatctggtgtggtgcgccacgtcttataattacgatcaagatcatacctgggtgtattgttag

SEQ ID NO: 211600 - DNA, 672 bp, Artificial Sequence
  derived and/or modified sequence
atgacacggtggagttcttatttactgggctggaccacttttttgttatacagttacgaaagttccggcggcatgcatgaggaatgtgttttccccttcacctataaggggtccgtctactttacttgcactcacattcatagtcttagtccttggtgcgcgacgagggccgtatacaatggtcaatggaagtactgccagtcagaggactacccaaggtgtattttcccattcatctaccgcggcaaggcctataatagttgtatctcacagggctcctttttgggcagtctctggtgcagtgtcactagcgtgttcgacgagaaacaacagtggaagttctgtgagaccaatgagtatggtggaaactccctgagaaaaccatgcatattcccctcaatttatcgaaacaatgtcgtatccgattgcatggaagatgagagcaataagctgtggtgtcccaccaccgagaatatggataaagatggaaagtggtcattttgcgctgacaccagaatttccgccctggtacctggctttccttgccatttcccttttaattacaagaacaaaaattatttcaactgtaccaatgaaggctcaaaggagaatttagtctggtgcgctacgtcatacaactacgatcaggatcacacatgggtgtactgttag

SEQ ID NO: 211601 - DNA, 672 bp, Artificial Sequence
  derived and/or modified sequence
atgaccagatggagcagctacctgctgggctggaccaccttcctgctgtacagctacgagagcagcggcggcatgcacgaggagtgcgtgttccccttcacctacaagggcagcgtgtacttcacctgcacccacatccacagcctgagcccctggtgcgccaccagagccgtgtacaacggccagtggaagtactgccagagcgaggactaccccagatgcatcttccccttcatctacagaggcaaggcctacaacagctgcatcagccagggcagcttcctgggcagcctgtggtgcagcgtgaccagcgtgttcgacgagaagcagcagtggaagttctgcgagaccaacgagtacggcggcaacagcctgagaaagccctgcatcttccccagcatctacagaaacaacgtggtgagcgactgcatggaggacgagagcaacaagctgtggtgccccaccaccgagaacatggacaaggacggcaagtggagcttctgcgccgacaccagaatcagcgccctggtgcccggcttcccctgccacttccccttcaactacaagaacaagaactacttcaactgcaccaacgagggcagcaaggagaacctggtgtggtgcgccaccagctacaactacgaccaggaccacacctgggtgtactgctag

SEQ ID NO: 211602 - DNA, 1052 bp, Artificial Sequence
  derived and/or modified sequence
cactgatgaagaaccctcctttgagaagctgcctttgtgtcctacagacaggctggggccaaagccattcaaccaatccccagataatccagagctcttgggagcagaaccttaaagagagatcgtggagagagccagggcccagaagaactctctcaaagagaagagggcagccaagatgacccgatggtccagttacctgttgggatggacaaccttccttctctattcctatgagtcaagtggagggatgcatgaggaatgtgtctttcctttcacctacaagggatctgtttacttcacttgcacccatattcatagcttatccccttggtgtgccaccagagccgtgtacaacggccagtggaagtactgccagagtgaagattacccacgctgtatcttccctttcatctatcgaggaaaggcttataacagctgcatctcccagggcagcttcttaggcagtctgtggtgctcagtcacctctgtcttcgatgagaaacagcagtggaaattctgtgaaacgaatgagtatgggggaaattctctcaggaagccctgcatcttcccctccatctacagaaataatgtggtctctgattgcatggaggatgaaagcaacaagctctggtgcccaaccacagagaacatggataaggatggaaagtggagtttctgtgccgacaccagaatttccgcgttggtccctggctttccttgtcactttccgttcaactataaaaacaagaattattttaactgcactaacgaaggatcaaaggagaaccttgtgtggtgtgcaacttcttacaactacgaccaagaccacacctgggtgtattgctgatgctgaggaaaggagaaatatcttcagaggaagactgccgccatactgaggctgagcacagatttgtctttttcattgcatctgtcaagcttaaataaccacctttagaaataccctctgcaccacctgcttcaatcagctggtcctttgtgaagaacgtagagagaatgcggcataaccaccaataaaggagtcttgattt

SEQ ID NO: 211603 - DNA, 672 bp, Artificial Sequence
  derived and/or modified sequence
atgacaagatggtcttcatatctgctgggttggacaacatttctgttgtactcttacgagagtagcggcggaatgcacgaggagtgtgtgtttccattcacgtataaaggttcagtgtattttacgtgcacacacatccacagcctctcaccatggtgcgcgacccgcgccgtttacaacggccagtggaagtattgccagagtgaagattacccgaggtgtatcttcccttttatctatcgcgggaaggcctataactcttgcatatcccaaggaagctttctgggctccttatggtgctctgtgacctctgtgttcgatgagaagcagcagtggaaattctgtgagacgaacgagtacgggggaaattcgctgaggaagccatgtatctttccctctatctaccgcaataacgtggtgtctgactgcatggaagacgaatccaataagctttggtgccctactactgaaaacatggacaaagacggcaagtggtccttttgcgcagacacacgaatcagtgcactcgtgccaggattcccatgccatttcccatttaattacaaaaacaagaactacttcaattgcacaaatgagggcagcaaagaaaacttggtttggtgtgcgacatcatacaattacgaccaggatcacacatgggtgtattgctag

SEQ ID NO: 211604 - DNA, 672 bp, Artificial Sequence
  derived and/or modified sequence
atgacccgctggagcagctacctgctgggctggaccaccttcctgctgtacagctatgagagcagcggcggcatgcatgaggagtgtgtgttccccttcacctacaagggctctgtgtacttcacctgcacccacatccacagcctgagcccctggtgtgccaccagggctgtgtacaacggccagtggaagtactgccagagcgaggactacccccgctgcatcttccccttcatctaccggggcaaggcctacaacagctgcatcagccagggcagcttcctgggcagcctgtggtgcagcgtgacctctgtgtttgatgagaagcagcagtggaagttctgtgagaccaatgaatatggaggcaacagcctgaggaagccctgcatcttccccagcatctacagaaacaacgtggtgtctgactgcatggaggatgagagcaacaagctgtggtgccccaccacagagaacatggacaaggatggcaagtggagcttctgtgccgacacccgcatcagcgccctggtgcccggcttcccctgccacttccccttcaactacaagaacaagaactacttcaactgcaccaatgaaggcagcaaagaaaacctggtgtggtgtgccaccagctacaactatgaccaggaccacacctgggtgtactgctag

SEQ ID NO: 211605 - DNA, 672 bp, Artificial Sequence
  derived and/or modified sequence
atgacccggtggagcagctacctgctgggctggaccaccttcctgctgtattcttacgagagctccgggggaatgcacgaggaatgtgtgtttccttttacttacaagggaagcgtgtatttcacctgcacacacatacactccctgtcaccgtggtgtgccactcgcgctgtgtataatggccagtggaagtactgccagagcgaggactatccacgctgcatcttcccattcatctaccgaggcaaagcctataacagttgcatttcacaggggtcattccttgggtcactctggtgctccgtcacatcggtcttcgacgaaaagcagcagtggaagttttgcgaaactaacgagtacgggggcaacagtctccggaaaccttgtattttcccctcgatttaccgaaataatgtggtgtccgattgtatggaagacgaatctaataagctttggtgccctacgacggagaatatggacaaggacggtaaatggtctttttgcgctgacacaaggatcagcgcattggtgcctggattcccctgccacttccctttcaattacaagaacaaaaactattttaattgcaccaatgaaggctcgaaggaaaacttggtgtggtgcgcaactagctataactacgaccaagatcacacttgggtttactgttag

SEQ ID NO: 211606 - RNA, 672 nt, Artificial Sequence
  derived and/or modified sequence
augacacgguggaguucuuauuuacugggcuggaccacuuuuuuguuauacaguuacgaaaguuccggcggcaugcaugaggaauguguuuuccccuucaccuauaagggguccgucuacuuuacuugcacucacauucauagucuuaguccuuggugcgcgacgagggccguauacaauggucaauggaaguacugccagucagaggacuacccaagguguauuuucccauucaucuaccgcggcaaggccuauaauaguuguaucucacagggcuccuuuuugggcagucucuggugcucaguaacaucuguguucgacgaaaagcagcaauggaaguuuugcgaaaccaacgaguacgggggaaacucuuugagaaagccauguaucuuccccucaauauauaggaauaaugugguaagcgauugcauggaggacgaaucuaacaagcucuggugcccuacgacugagaauauggauaaggauggcaaauggagcuucugugccgauacccgcauuagcgcuuuagugcccggguucccuugccacuucccuuucaacuauaagaauaaaaacuacuuuaacuguacgaacgagggaagcaaagaaaaucugguguggugcgccacgucuuauaauuacgaucaagaucauaccuggguguauuguuag

SEQ ID NO: 211607 - RNA, 672 nt, Artificial Sequence
  derived and/or modified sequence
augacacgguggaguucuuauuuacugggcuggaccacuuuuuuguuauacaguuacgaaaguuccggcggcaugcaugaggaauguguuuuccccuucaccuauaagggguccgucuacuuuacuugcacucacauucauagucuuaguccuuggugcgcgacgagggccguauacaauggucaauggaaguacugccagucagaggacuacccaagguguauuuucccauucaucuaccgcggcaaggccuauaauaguuguaucucacagggcuccuuuuugggcagucucuggugcagugucacuagcguguucgacgagaaacaacaguggaaguucugugagaccaaugaguaugguggaaacucccugagaaaaccaugcauauuccccucaauuuaucgaaacaaugucguauccgauugcauggaagaugagagcaauaagcuguggugucccaccaccgagaauauggauaaagauggaaaguggucauuuugcgcugacaccagaauuuccgcccugguaccuggcuuuccuugccauuucccuuuuaauuacaagaacaaaaauuauuucaacuguaccaaugaaggcucaaaggagaauuuagucuggugcgcuacgucauacaacuacgaucaggaucacacauggguguacuguuag

SEQ ID NO: 211608 - protein, 317 aa, Artificial Sequence
  derived and/or modified sequence
MAKNPPENCEDCHILNAEAFKSKKICKSLKICGLVFGILALTLIVLFWGSKHFWPEVPKKAYDMEHTFYSNGEKKKIYMEIDPVTRTEIFRSGNGTDETLEVHDFKNGYTGIYFVGLQKCFIKTQIKVIPEFSEPEEEIDENEEITTTFFEQSVIWVPAEKPIENRDFLKNSKILEICDNVTMYWINPTLISVSELQDFEEEGEDLHFPANEKKGIEQNEQWVVPQVKVEKTRHARQASEEELPINDYTENGIEFDPMLDERGYCCIYCRRGNRYCRRVCEPLLGYYPYPYCYQGGRVICRVIMPCNWWVARMLGRV

SEQ ID NO: 211609 - DNA, 954 bp, Artificial Sequence
  derived and/or modified sequence
atggccaagaacccccccgagaactgcgaggactgccacatcctgaacgccgaggccttcaagagcaagaagatctgcaagagcctgaagatctgcggcctggtgttcggcatcctggccctgaccctgatcgtgctgttctggggcagcaagcacttctggcccgaggtgcccaagaaggcctacgacatggagcacaccttctacagcaacggcgagaagaagaagatctacatggagatcgaccccgtgaccagaaccgagatcttcagaagcggcaacggcaccgacgagaccctggaggtgcacgacttcaagaacggctacaccggcatctacttcgtgggcctgcagaagtgcttcatcaagacccagatcaaggtgatccccgagttcagcgagcccgaggaggagatcgacgagaacgaggagatcaccaccaccttcttcgagcagagcgtgatctgggtgcccgccgagaagcccatcgagaacagagacttcctgaagaacagcaagatcctggagatctgcgacaacgtgaccatgtactggatcaaccccaccctgatcagcgtgagcgagctgcaggacttcgaggaggagggcgaggacctgcacttccccgccaacgagaagaagggcatcgagcagaacgagcagtgggtggtgccccaggtgaaggtggagaagaccagacacgccagacaggccagcgaggaggagctgcccatcaacgactacaccgagaacggcatcgagttcgaccccatgctggacgagagaggctactgctgcatctactgcagaagaggcaacagatactgcagaagagtgtgcgagcccctgctgggctactacccctacccctactgctaccagggcggcagagtgatctgcagagtgatcatgccctgcaactggtgggtggccagaatgctgggcagagtgtag

SEQ ID NO: 211610 - DNA, 954 bp, Artificial Sequence
  derived and/or modified sequence
atggcaaaaaatccacccgaaaactgcgaggattgtcacatactgaacgccgaggccttcaagtccaagaagatttgtaagagtctgaagatttgtggcctcgtctttggcattttggctttgaccctaattgtgctattttgggggagtaaacatttctggccagaagtgcctaagaaggcttatgatatggaacacacgttttacagcaatggtgagaaaaaaaaaatctacatggaaatcgatcccgttaccaggacagaaatcttcaggagtgggaatgggaccgacgagactctggaagtgcacgatttcaagaacggttacacgggaatctactttgtaggtcttcagaaatgctttatcaaaacccaaataaaggtgatcccagaattctcagaacccgaggaggagattgacgagaatgaagagattacaacgaccttcttcgagcagtcagttatttgggtgccagccgagaagcctatcgagaacagggattttctgaagaattctaagatactagagatttgcgataatgtgaccatgtactggattaatcctaccctgatcagtgtgagcgagcttcaggattttgaggaggagggagaggacctacatttccccgccaacgaaaagaaaggcattgaacagaatgagcaatgggtggttccccaggtgaaggtggagaagacacggcatgcaagacaggcctccgaagaagagcttcccattaacgactacaccgaaaacggaatcgaattcgaccctatgctggatgaaagggggtattgttgcatttattgccgaagggggaatcgatactgtcggcgggtatgcgagccattgctgggttattatccatacccttattgctatcaaggagggcgggtgatttgccgggttatcatgccttgcaactggtgggtggccaggatgttaggccgcgtctag

SEQ ID NO: 211611 - DNA, 954 bp, Artificial Sequence
  derived and/or modified sequence
atggccaagaaccccccagagaactgtgaggactgccacatcctgaatgctgaggccttcaagagcaagaagatctgcaagagcctgaagatctgtggcctggtgtttggcatcctggccctgaccctcatcgtgctcttctggggcagcaagcacttctggccagaggtgcccaagaaggcctatgacatggagcacaccttctacagcaatggagagaagaagaagatctacatggagattgatcctgtgaccaggacagagatcttccgctctggaaatggaacagatgagaccctggaggtgcatgacttcaagaatggctacacaggcatctactttgtgggcctgcagaagtgcttcatcaagacccagatcaaggtgattcctgagttcagcgagcctgaggaggagattgatgaaaatgaggagatcaccaccaccttctttgagcagagcgtcatctgggtgcctgctgagaagcccatcgagaacagagacttcctgaagaacagcaagatcctggagatctgtgacaacgtgaccatgtactggatcaaccccaccctcatctctgtgtctgagctgcaggactttgaggaggagggggaggacctgcacttccctgccaatgagaagaagggcatcgagcagaatgagcagtgggtggtgccccaggtgaaggtggagaagaccaggcatgcccggcaggccagcgaggaggagctgcccatcaatgactacacagaaaatggaattgaatttgaccccatgctggatgagcggggctactgctgcatctactgccggcggggcaaccgctactgcagaagagtgtgtgagcccctgctgggctactacccctacccctactgctaccagggcggccgggtcatctgcagggtcatcatgccctgcaactggtgggtggccaggatgctgggccgggtgtag

SEQ ID NO: 211612 - DNA, 954 bp, Artificial Sequence
  derived and/or modified sequence
atggccaagaacccccccgagaactgcgaggactgccacatcctgaatgcagaggcctttaaatcgaagaagatctgtaaatccttgaagatttgcggcttggtgtttggaatcctggccctcacacttatagtactgttttggggctcgaagcacttttggcccgaagtcccgaaaaaggcctatgatatggaacacaccttctatagcaatggcgaaaaaaaaaagatatatatggaaattgatcctgtgactaggaccgagatctttagaagtggtaacggcacggatgaaacactggaggtgcacgattttaagaacggatacaccgggatctatttcgttggcctccagaaatgtttcattaaaacgcagattaaagttatccctgaattttcggaaccggaggaggagatcgacgaaaacgaggagatcaccaccacgttcttcgagcagagcgttatatgggtgcccgcagagaaaccaatcgagaaccgcgatttcctgaaaaacagcaagatcctggagatctgcgataacgttaccatgtactggatcaatccgaccctcataagtgtcagcgagctgcaggatttcgaggaagagggtgaggatctccactttcccgccaacgagaagaaaggtatcgaacagaacgaacagtgggttgtgcctcaggtgaaagtggaaaaaacaaggcacgctaggcaggcttcagaagaagaactgcccattaatgactataccgagaacgggatcgagtttgaccctatgttggatgaaagaggttattgttgtatatattgccgaagaggtaatcggtattgcagacgcgtttgtgaaccactacttggttattatccctacccctattgctaccagggcggcagagtcatctgccgcgtgattatgccttgtaactggtgggttgccagaatgcttgggagagtctag

SEQ ID NO: 211613 - DNA, 954 bp, Artificial Sequence
  derived and/or modified sequence
atggctaagaaccccccagagaattgtgaagattgccatattctgaacgctgaggcttttaaaagcaagaagatttgtaagagcttgaagatctgcggcctcgtgtttggtatactagccctgactctgatcgtactcttttggggtagtaagcacttttggcccgaggtgcctaagaaggcctatgacatggagcatacattttattccaacggggagaaaaagaagatctatatggagattgaccccgtgacacgtacagagatcttcaggtcgggaaacgggactgacgaaaccttagaagtgcacgatttcaaaaatggctacacgggaatttactttgttggcctgcaaaaatgtttcatcaaaactcagatcaaggtgattcccgagttttcagagcctgaggaagaaatcgacgagaatgaggagatcacaactacattctttgagcaaagcgtcatctgggtccctgcagagaagcctatcgagaatagggatttcttaaaaaattccaaaatcctggaaatttgtgataatgttaccatgtactggatcaaccccaccctcatctcggtgtctgagttgcaggacttcgaagaagagggggaagacctgcattttcctgctaacgagaaaaaaggaattgaacagaacgagcagtgggtcgtgccccaggtgaaagtggaaaaaactaggcatgcccgtcaggccagcgaggaggaactgccgatcaatgattataccgaaaatggtatcgaattcgatcctatgctagacgaacgcggttactgctgtatctattgtaggcggggtaaccgctactgcagaagggtctgcgagccgctcctgggttactatccatatccctactgctatcaggggggtagagttatctgcagagtgatcatgccgtgcaactggtgggtggctaggatgctcggtagggtgtag

SEQ ID NO: 211614 - DNA, 1339 bp, Artificial Sequence
  derived and/or modified sequence
tgtgcacagaagttatatacatatatgggtatatctatgtaacaaatcgcagcacaggagtcccctgggctccctcaggctctggtatgacatatttgagccatataaattcagcttctcctctggcatctgttagccgactcacttgcaactccacctcagcagtggtctctcagtcctctcaaagcaaggaaagagtactgtgtgctgagagaccatggcaaagaatcctccagagaattgtgaagactgtcacattctaaatgcagaagcttttaaatccaagaaaatatgtaaatcacttaagatttgtggactggtgtttggtatcctggccctaactctaattgtcctgttttgggggagcaagcacttctggccggaggtacccaaaaaagcctatgacatggagcacactttctacagcaatggagagaagaagaagatttacatggaaattgatcctgtgaccagaactgaaatattcagaagcggaaatggcactgatgaaacattggaagtgcacgactttaaaaacggatacactggcatctacttcgtgggtcttcaaaaatgttttatcaaaactcagattaaagtgattcctgaattttctgaaccagaagaggaaatagatgagaatgaagaaattaccacaactttctttgaacagtcagtgatttgggtcccagcagaaaagcctattgaaaaccgagattttcttaaaaattccaaaattctggagatttgtgataacgtgaccatgtattggatcaatcccactctaatatcagtttctgagttacaagactttgaggaggagggagaagatcttcactttcctgccaacgaaaaaaaagggattgaacaaaatgaacagtgggtggtccctcaagtgaaagtagagaagacccgtcacgccagacaagcaagtgaggaagaacttccaataaatgactatactgaaaatggaatagaatttgatcccatgctggatgagagaggttattgttgtatttactgccgtcgaggcaaccgctattgccgccgcgtctgtgaacctttactaggctactacccatatccatactgctaccaaggaggacgagtcatctgtcgtgtcatcatgccttgtaactggtgggtggcccgcatgctggggagggtctaataggaggtttgagctcaaatgcttaaactgctggcaacatataataaatgcatgctattcaatgaatttctgcctatgaggcatctggcccctggtagccagctctccagaattacttgtaggtaattcctctcttcatgttctaataaacttctacattatcaccaa

SEQ ID NO: 211615 - protein, 246 aa, Artificial Sequence
  derived and/or modified sequence
MVVDFWTWEQTFQELIQEAKPRATWTLKLDGNLQLDCLAQGWKQYQQRAFGWFRCSSCQRSWASAQVQILCHTYWEHWTSQGQVRMRLFGQRCQKCSWSQYEMPEFSSDSTMRILSNLVQHILKKYYGNGTRKSPEMPVILEVSLEGSHDTANCEACTLGICGQGLKSCMTKPSKSLLPHLKTGNSSPGIGAVYLANQAKNQSAEAKEAKGSGYEKLGPSRDPDPLNICVFILLLVFIVVKCFTSE

SEQ ID NO: 211616 - DNA, 741 bp, Artificial Sequence
  derived and/or modified sequence
atggtagtcgacttttggacctgggagcagacttttcaggaattgattcaggaggcgaagcctagggctacctggactcttaaactggacgggaacctgcagctggattgcctggctcagggatggaagcagtaccagcaaagagcctttggctggttcaggtgttcttcgtgtcagcgcagttgggcctctgcacaggtccagatcctgtgtcatacatactgggaacattggacttcccagggccaggtgcggatgcggttattcggccagagatgtcagaagtgttcctggtctcagtacgaaatgcccgagttctcaagtgactcgacaatgagaatactcagcaacctggtacaacacattctcaaaaagtactacggcaacggtacaaggaaaagtcccgagatgccagtgattctcgaggtgtctctcgaagggtctcacgatactgcgaactgcgaagcctgtaccttggggatatgcggccaaggcctgaaatcgtgtatgacaaagccaagcaaatccctgcttccccatctgaaaacagggaattcctcaccgggcatcggtgccgtgtaccttgctaaccaggcaaagaatcagtctgctgaggccaaagaggctaagggcagtggttatgagaaactagggccctccagggatcccgacccattgaacatctgtgtgtttatcctgctgctggtgttcattgtcgttaaatgttttaccagtgagtag

SEQ ID NO: 211617 - DNA, 741 bp, Artificial Sequence
  derived and/or modified sequence
atggtggtggacttctggacctgggagcagaccttccaggagctgatccaggaggccaagccccgggccacctggaccctgaagctggatggcaacctgcagctggactgcctggcccagggctggaagcagtaccagcagagggccttcggctggttccgctgcagcagctgccagaggtcctgggccagcgcccaggtgcagatcctgtgccacacctactgggagcactggaccagccagggccaggtgaggatgaggctgtttggccagcgctgccagaagtgctcctggagccagtatgagatgcctgagttcagcagtgacagcaccatgaggatcctgagcaacctggtgcagcacatcctgaagaagtactatggaaatggcaccaggaagagccctgagatgcctgtgatcctggaggtgtccctggagggcagccatgacacagccaactgtgaggcctgcaccctgggcatctgtggccagggcctgaagagctgcatgaccaagcccagcaagagcctgctgccccacctgaagacaggcaacagcagccctggcatcggggctgtgtacctggccaaccaggccaagaaccagagcgctgaggccaaggaggccaagggcagcggctatgagaagctgggccccagccgggaccctgaccccctgaacatctgtgtgttcatcctgctgctggtgttcatcgtggtgaagtgcttcaccagcgagtag

SEQ ID NO: 211618 - DNA, 741 bp, Artificial Sequence
  derived and/or modified sequence
atggtggtggacttctggacctgggagcagaccttccaggagctgatccaagaagctaagccaagggcgacatggaccctgaagcttgatggtaacctgcagctagattgtcttgcccagggatggaaacaataccagcagagggcctttggatggtttcggtgtagctcctgccagagatcttgggcttcagcccaagtccagattttgtgtcacacatattgggagcactggacatcccaaggtcaggtccgcatgcgcctcttcggccagagatgtcagaaatgctcttggtcccagtacgagatgcccgagttttctagcgactccacaatgagaatcctgagcaatctggtgcagcatatcctgaagaaatactacggaaacggcacgaggaagagccccgagatgcctgtgattctggaggtctctctggagggttcccacgatacagccaattgcgaagcctgcactttaggtatctgtgggcagggtttaaagtcttgtatgactaagccatccaaatccctcttaccacaccttaagacggggaactcatctccgggaatcggcgctgtgtacctcgccaaccaggcaaagaatcaatcagctgaggctaaagaggctaaggggtcagggtacgagaagctcgggccatctcgtgacccagaccctcttaatatttgtgtgttcatcttgctcctggtgtttatcgtggtgaagtgcttcacctcagaatag

SEQ ID NO: 211619 - DNA, 741 bp, Artificial Sequence
  derived and/or modified sequence
atggttgtcgatttttggacatgggagcaaacgtttcaggagctgatccaggaggcaaagccacgggcaacctggaccttgaagcttgatggcaacctccaactggattgcctggcacagggttggaagcagtaccagcagagggccttcggctggtttaggtgtagcagctgtcaacgctcctgggcgtccgcccaggtccagattctgtgtcatacgtattgggaacattggacctcccagggccaggttcgcatgcgacttttcggacagcgttgtcaaaagtgcagctggagccagtatgaaatgcctgagttctccagcgatagcacaatgcggattctgagtaacttagttcagcatatcttgaagaaatactacggaaacggcaccagaaagtcccctgaaatgccagtcatcctcgaggtaagtctggagggatcccatgacaccgccaattgtgaagcctgtactctgggcatttgtggtcagggactaaagtcctgcatgactaagccgtccaaaagcctactcccccatctgaagacgggaaattcttccccgggaataggcgcagtgtatctcgcaaaccaggctaaaaaccagtccgccgaggcaaaggaagccaaaggttccgggtacgagaagttgggtccaagcagagatccagatccgctgaatatctgcgtttttatcctgctgttagtttttatcgtagtgaaatgtttcaccagtgagtag

SEQ ID NO: 211620 - DNA, 1554 bp, Artificial Sequence
  derived and/or modified sequence
gtccatacacagaaacagaaactgaaccgaacaccgaaactgaaactgtttgtctcttcctgagaaacgagcaaacctgaaagctactctctcagcttcagagggaaaaaatggttgtagatttctggacttgggagcagacatttcaagaactaatccaagaggcaaaaccccgggccacatggacgctgaagttggatggcaaccttcagctagactgcctggctcaagggtggaagcaataccaacagagagcatttggctggttccggtgttcctcctgccagcgaagttgggcttccgcccaagtgcagattctgtgccacacgtactgggagcactggacatcccagggtcaggtgcgtatgaggctctttggccaaaggtgccagaagtgctcctggtcccaatatgagatgcctgagttctcctcggatagcaccatgaggattctgagcaacctggtgcagcatatactgaagaaatactatggaaatggcacgaggaagtctccagaaatgccagtaatcctggaagtgtccctggaaggatcccatgacacagccaattgtgaggcatgcactttgggcatctgtggacagggcttaaaaagctgcatgacaaagccgtccaaatccctactcccccacctaaagactgggaattcctcacctggaattggtgctgtgtacctcgcaaaccaagccaagaaccagtcagctgaggcaaaagaggctaaggggagtgggtatgagaaattagggcccagtcgagacccagatccactgaacatctgtgtctttattttgctgcttgtatttattgtagtcaaatgctttacatcagaatgatgaaaataggcttgccactttctcttattttaattccatggtagtcaatgaactggctgccactttaatataactgaaaattcattttgagaccaagcaggatcaagtttgtagaataaacactggtttcctagccatcctctgaaaacagtatgaaacatgaccaagtacataatggatttagtaataaatattgtcgaattgctaaaaagtcttcaatcattcattcactaagtcactcagtgatatcaatatacttagctcagaaagtgtgggaggctgaataatggtgtctcccaacatatgcatgacttaatccccagaacctgtaaacatgttactttacatggtagaatggactttgcggatgtaattaaggaccttgaaatggttagattatttcatattgtccgggtggataagaaccaggattttgtaacagggaggcaacaagctcaaaatcagaaaaaagagatttgtcaatggaacaagaggttgaagtgctttgaagttggaggaagaggtcacaggcaaaaaagtacaggcagcctttagaaacccaaaaggacaaaggaacagattctcccctggagtctgcagaaggaaccagccctgcctgcacatggctttagcccagtgacactgattttggacatctgaccttcagaactgcttgctcataaacttgtcttgttttaatgca

SEQ ID NO: 211621 - DNA, 741 bp, Artificial Sequence
  derived and/or modified sequence
atggtggtggacttctggacctgggagcagaccttccaggagctgatccaggaggccaagcccagagccacctggaccctgaagctggacggcaacctgcagctggactgcctggcccagggctggaagcagtaccagcagagagccttcggctggttcagatgcagcagctgccagagaagctgggccagcgcccaggtgcagatcctgtgccacacctactgggagcactggaccagccagggccaggtgagaatgagactgttcggccagagatgccagaagtgcagctggagccagtacgagatgcccgagttcagcagcgacagcaccatgagaatcctgagcaacctggtgcagcacatcctgaagaagtactacggcaacggcaccagaaagagccccgagatgcccgtgatcctggaggtgagcctggagggcagccacgacaccgccaactgcgaggcctgcaccctgggcatctgcggccagggcctgaagagctgcatgaccaagcccagcaagagcctgctgccccacctgaagaccggcaacagcagccccggcatcggcgccgtgtacctggccaaccaggccaagaaccagagcgccgaggccaaggaggccaagggcagcggctacgagaagctgggccccagcagagaccccgaccccctgaacatctgcgtgttcatcctgctgctggtgttcatcgtggtgaagtgcttcaccagcgagtag

SEQ ID NO: 211622 - protein, 233 aa, Artificial Sequence
  derived and/or modified sequence
MGRLVLLWGAAVFLLGGWMALGQGGAAEGVQIQIIYFNLETVQVTWNASKYSRTNLTFHYRFNGDEAYDQCTNYLLQEGHTSGCLLDAEQRDDILYFSIRNGTHPVFTASRWMVYYLKPSSPKHVRFSWHQDAVTVTCSDLSYGDLLYEVQYRSPFDTEWQTQSRSVTQAGVQWCDLCLLQPSPPRFKRFSCLSLPSSWDYRHPPPRLANFCIISRDGVSPCWPGWSRTCDLR

SEQ ID NO: 211623 - protein, 256 aa, Artificial Sequence
  derived and/or modified sequence
MGRLVLLWGAAVFLLGGWMALGQGGAAEGVQIQIIYFNLETVQVTWNASKYSRTNLTFHYRFNGDEAYDQCTNYLLQEGHTSGCLLDAEQRDDILYFSIRNGTHPVFTASRWMVYYLKPSSPKHVRFSWHQDAVTVTCSDLSYGDLLYEVQYRSPFDTEWQSKQENTCNVTIEGLDAEKCYSFWVRVKAMEDVYGPDTYPSDWSEVTCWQRGEIRDACAETPTPPKPKLSKFILISSLAILLMVSLLLLSLWKLWR

SEQ ID NO: 211624 - protein, 255 aa, Artificial Sequence
  derived and/or modified sequence
MGRLVLLWGAAVFLLGGWMALGQGGAAEGVQIQIIYFNLETVQVTWNASKYSRTNLTFHYRFNGDEAYDQCTNYLLQEGHTSGCLLDAEQRDDILYFSIRNGTHPVFTASRWMVYYLKPSSPKHVRFSWHQDAVTVTCSDLSYGDLLYEVQYRSPFDTEWQSKQENTCNVTIEGLDAEKCYSFWVRVKAMEDVYGPDTYPSDWSEVTCWQRGEIRDACAETPTPPKPKLSKFILISSLAILLMVSLLLLSLWKLW

SEQ ID NO: 211625 - DNA, 771 bp, Artificial Sequence
  derived and/or modified sequence
atgggaaggttggtgttgttgtggggggccgcagtgtttctcctcggcgggtggatggcattagggcaagggggagccgccgagggcgtgcagattcagataatttatttcaatctagaaacagtccaagtaacctggaatgcaagcaagtattccagaacaaatctcacctttcactatcgttttaacggcgacgaagcgtacgatcaatgcactaactatctcttgcaggaaggccacacatccgggtgcttactggatgccgagcagagagacgatattttgtacttttcaatccgaaatggcactcaccccgtgttcacagcatccaggtggatggtttactatctgaaacccagctcgccaaaacacgtccgattctcctggcatcaggacgccgtaacggtgacatgttccgatctcagctacggcgatctgctttatgaagtgcaatacaggagtcctttcgatacggagtggcagtccaagcaggagaacacctgtaacgtaactattgaggggctggatgcagagaagtgttatagcttttgggtgcgcgttaaagctatggaggatgtctacggaccggatacatatcctagcgattggtcagaagtgacttgttggcagcgcggggagatcagagacgcatgtgccgagactcccactccacctaaacccaagctcagtaagttcatcttgatttccagcctggctatactgttgatggtttcactcctgctgctctccctctggaagttatggaggtag

SEQ ID NO: 211626 - DNA, 768 bp, Artificial Sequence
  derived and/or modified sequence
atggggcggctggtcctgttgtggggcgctgccgttttcttgctggggggatggatggccttgggccagggcggggcagccgaaggggtccaaatacagattatctacttcaaccttgagactgtgcaggtcacctggaacgctagtaagtattcacgcaccaatctgacttttcactatcggtttaatggggacgaagcctacgatcagtgcactaattatctcctgcaggaagggcacacatcaggctgtctgctggacgccgagcagagggatgacatactgtatttctcaattcgcaacggaacccatcccgtgttcacagcatctcggtggatggtgtactacctgaagccttccagccccaagcacgttcgtttcagctggcaccaggacgccgtgaccgttacatgctcagatttatcttacggcgatttgctctatgaagttcagtaccgcagtcccttcgatacagagtggcaaagcaagcaggagaacacatgcaacgtgaccatcgaaggactggacgccgaaaaatgctacagtttctgggtgcgcgtcaaggcgatggaggatgtctatggacccgacacataccctagtgattggagcgaagtgacatgctggcagcgcggggagattagggacgcctgcgcggaaaccccaactcctcccaaacctaagctcagtaaattcatactcattagcagtctggccatcctgctgatggttagcctgctgctcctaagcctctggaagctgtggtag

SEQ ID NO: 211627 - DNA, 771 bp, Artificial Sequence
  derived and/or modified sequence
atgggccgcctggtgctgctgtggggcgctgctgtgttcctgctgggcggctggatggccctgggccagggcggcgctgctgagggcgtgcagatccagatcatctacttcaacctggagaccgtgcaggtgacctggaatgccagcaagtacagcaggaccaacctgaccttccactaccgcttcaatggagatgaggcctatgaccagtgcaccaactacctgctgcaggagggccacaccagcggctgcctgctggatgctgagcagagagatgacatcctgtacttcagcatcagaaatggcacccaccctgtgttcaccgccagccgctggatggtgtactacctgaagcccagcagccccaagcacgtgcgcttctcctggcaccaggatgctgtgacagtgacctgcagcgacctgtcctatggagacctgctgtatgaggtgcagtaccgcagcccctttgacacagagtggcagagcaagcaggagaacacctgcaatgtgaccatcgagggcctggatgctgagaagtgctacagcttctgggtgcgggtgaaggccatggaggatgtgtatggccctgacacctaccccagcgactggagcgaggtgacctgctggcagagaggagagatcagagatgcctgtgccgagacccccaccccacccaagcccaagctgagcaagttcatcctgatcagcagcctggccatcctgctgatggtgtccctgctgctgctgagcctgtggaagctgtggaggtag

SEQ ID NO: 211628 - DNA, 768 bp, Artificial Sequence
  derived and/or modified sequence
atgggccgcctggtgctgctgtggggcgctgctgtgttcctgctgggcggctggatggccctgggccagggcggcgctgctgagggcgtgcagatccagatcatctacttcaacctggagaccgtgcaggtgacctggaatgccagcaagtacagcaggaccaacctgaccttccactaccgcttcaatggagatgaggcctatgaccagtgcaccaactacctgctgcaggagggccacaccagcggctgcctgctggatgctgagcagagagatgacatcctgtacttcagcatcagaaatggcacccaccctgtgttcaccgccagccgctggatggtgtactacctgaagcccagcagccccaagcacgtgcgcttctcctggcaccaggatgctgtgacagtgacctgcagcgacctgtcctatggagacctgctgtatgaggtgcagtaccgcagcccctttgacacagagtggcagagcaagcaggagaacacctgcaatgtgaccatcgagggcctggatgctgagaagtgctacagcttctgggtgcgggtgaaggccatggaggatgtgtatggccctgacacctaccccagcgactggagcgaggtgacctgctggcagagaggagagatcagagatgcctgtgccgagacccccaccccacccaagcccaagctgagcaagttcatcctgatcagcagcctggccatcctgctgatggtgtccctgctgctgctgagcctgtggaagctgtggtag

SEQ ID NO: 211629 - DNA, 771 bp, Artificial Sequence
  derived and/or modified sequence
atgggccggctggtgctgctgtggggcgccgccgtgttcctgctgggaggctggatggcactggggcagggcggcgcagccgagggcgtccagattcagatcatctactttaatcttgaaaccgtacaagtgacctggaatgcatccaagtacagccggacaaacttaacttttcactatagatttaatggcgatgaggcctatgaccagtgtactaactacctcttgcaggaaggccatacgagcggctgtcttctggatgctgaacaacgcgacgatatcctgtactttagcattcgcaacggcacacatccagtattcaccgcaagccgatggatggtgtactatctgaaaccttcatctccaaagcatgtccgcttcagctggcatcaggatgctgtcactgtgacatgtagcgacctgagttacggagatctcctttatgaggttcagtaccgctcacctttcgataccgagtggcagagtaagcaagagaatacatgtaatgtcactattgagggactggacgctgagaagtgttacagcttctgggtcagagtgaaggcaatggaggatgtgtatggtcctgacacatacccctccgattggagcgaggttacctgttggcagagaggagagatccgggatgcttgtgccgagacgcccacaccacccaaacctaagctctccaagtttattttgatcagtagtctcgcaattttactgatggtgtccctcctcctgctgagcttatggaaactgtggcggtag

SEQ ID NO: 211630 - DNA, 768 bp, Artificial Sequence
  derived and/or modified sequence
atgggccggctggtgctgctgtggggcgccgccgtgttcctgctgggcggctggatggccttgggtcagggaggggccgctgaaggtgtgcaaatccaaattatctactttaacctggagaccgtgcaagtgacttggaacgcttcgaaatacagtagaacaaatttgacatttcactatcgcttcaatggagatgaggcctacgatcagtgcaccaactatttgctccaagaggggcacactagtggctgcctgctggatgctgaacaaagagatgacatcctgtatttctctatccgaaacggaactcacccggtattcactgcaagccgctggatggtttactatctcaagccctccagcccaaagcacgtccggttctcctggcaccaagacgccgtcactgtgacttgtagtgacctatcctatggcgacctgctttatgaggtgcaataccggtcgccttttgacacagaatggcagagtaaacaggaaaatacctgcaacgtgacaatcgagggactggatgccgagaaatgctattctttctgggtgcgggtgaaggctatggaggacgtatatggacctgacacctacccgagtgactggtccgaagtgacctgctggcaaaggggggaaatcagggacgcctgcgctgagacgcctacgcctccgaaacctaagctgagtaagtttatactgattagctctctggctatcctgctgatggtgtctctcctacttttgagcctctggaaactgtggtag

SEQ ID NO: 211631 - DNA, 771 bp, Artificial Sequence
  derived and/or modified sequence
atgggccgtctagtgctgctatggggagccgcagtgtttctcctgggtggctggatggcgcttggccaggggggtgctgccgagggagtccagatacagatcatctacttcaacctcgagacagttcaggtgacctggaatgcatctaagtactcacgaaccaaccttaccttccactacagattcaacggagacgaagcatatgatcagtgcacgaactatttactccaggagggccatacttcaggctgtttactggatgctgagcagcgcgacgatattctgtatttctccattaggaatggcactcacccagtcttcacagcctcgcggtggatggtgtactatctgaaaccctcaagtccaaagcatgtgcggttcagctggcatcaggatgctgtgacagtaacttgctccgatttgtcttacggggatctgttgtacgaggtccagtatcgcagcccgttcgatacagaatggcagagcaagcaggaaaacacctgtaatgtgacaatcgagggcctcgatgcggaaaaatgctatagcttttgggtacgcgtcaaagcgatggaggacgtctatgggccagacacctaccctagtgactggtccgaagtcacatgctggcagcgcggtgaaatcagggacgcatgcgccgagaccccaacgcctcccaaaccaaagctgtccaaattcatcctgattagcagcctcgccattctcctgatggtgagcctcttactgttatcactatggaagctctggaggtag

SEQ ID NO: 211632 - DNA, 768 bp, Artificial Sequence
  derived and/or modified sequence
atggggcgactagtccttctttggggagccgcagtcttcctgttagggggttggatggccctcgggcagggaggagctgcagaaggagttcaaatccagataatttatttcaatttggaaacagttcaggtgacttggaacgctagtaagtattctcgcactaatctgactttccattacagattcaacggtgatgaagcatatgaccagtgcacaaattacctgctgcaggaagggcacacatccggctgcctgttggacgctgagcagagggatgatatcctctacttcagcatccggaatggaacccacccagtcttcacagccagccggtggatggtgtactatctgaaaccttcaagtcccaagcatgtccgattctcttggcatcaggacgcagtgactgttacttgctcggatctcagctacggcgacttgctgtatgaggtgcaatatcgaagtcctttcgacacggagtggcagagcaaacaggaaaatacatgcaatgtcactattgaagggcttgatgcggaaaaatgttactcattctgggtaagagtgaaagccatggaggacgtgtacggcccagatacttacccgtctgactggagtgaggtgacgtgttggcagcgaggagagatacgagatgcttgtgctgagacacctacaccgccaaagccgaaactgagtaagttcatcctgatcagcagcctggcaatcctcttgatggtgtctctgcttttgctgagtctgtggaagttgtggtag

SEQ ID NO: 211633 - DNA, 771 bp, Artificial Sequence
  derived and/or modified sequence
atggggcggctggttctgctgtggggagctgccgtctttctgctgggaggctggatggctttggggcaaggaggagcagcagaaggagtacagattcagatcatctacttcaatttagaaaccgtgcaggtgacatggaatgccagcaaatactccaggaccaacctgactttccactacagattcaacggtgatgaggcctatgaccagtgcaccaactaccttctccaggaaggtcacacttcggggtgcctcctagacgcagagcagcgagacgacattctctatttctccatcaggaatgggacgcaccccgttttcaccgcaagtcgctggatggtttattacctgaaacccagttccccgaagcacgtgagattttcgtggcatcaggatgcagtgacggtgacgtgttctgacctgtcctacggggatctcctctatgaggttcagtaccggagccccttcgacaccgagtggcagtccaaacaggaaaatacctgcaacgtcaccatagaaggcttggatgccgagaagtgttactctttctgggtcagggtgaaggctatggaggatgtatatgggccagacacatacccaagcgactggtcagaggtgacatgctggcagagaggcgagattcgggatgcctgtgcagagacaccaacgcctcccaaaccaaagctgtccaaatttattttaatttccagcctggccatccttctgatggtgtctctcctccttctgtctttatggaaattatggaggtaa

SEQ ID NO: 211634 - DNA, 770 bp, Artificial Sequence
  derived and/or modified sequence
ggcatggggcggctggttctgctgtggggagctgccgtctttctgctgggaggctggatggctttggggcaaggaggagcagcagaaggagtacagattcagatcatctacttcaatttagaaaccgtgcaggtgacatggaatgccagcaaatactccaggaccaacctgactttccactacagattcaacggtgatgaggcctatgaccagtgcaccaactaccttctccaggaaggtcacacttcggggtgcctcctagacgcagagcagcgagacgacattctctatttctccatcaggaatgggacgcaccccgttttcaccgcaagtcgctggatggtttattacctgaaacccagttccccgaagcacgtgagattttcgtggcatcaggatgcagtgacggtgacgtgttctgacctgtcctacggggatctcctctatgaggttcagtaccggagccccttcgacaccgagtggcagtccaaacaggaaaatacctgcaacgtcaccatagaaggcttggatgccgagaagtgttactctttctgggtcagggtgaaggctatggaggatgtatatgggccagacacatacccaagcgactggtcagaggtgacatgctggcagagaggcgagattcgggatgcctgtgcagagacaccaacgcctcccaaaccaaagctgtccaaatttattttaatttccagcctggccatccttctgatggtgtctctcctccttctgtctttatggaaattatggag

SEQ ID NO: 211635 - DNA, 771 bp, Artificial Sequence
  derived and/or modified sequence
atgggcagactggtgctgctgtggggcgccgccgtgttcctgctgggcggctggatggccctgggccagggcggcgccgccgagggcgtgcagatccagatcatctacttcaacctggagaccgtgcaggtgacctggaacgccagcaagtacagcagaaccaacctgaccttccactacagattcaacggcgacgaggcctacgaccagtgcaccaactacctgctgcaggagggccacaccagcggctgcctgctggacgccgagcagagagacgacatcctgtacttcagcatcagaaacggcacccaccccgtgttcaccgccagcagatggatggtgtactacctgaagcccagcagccccaagcacgtgagattcagctggcaccaggacgccgtgaccgtgacctgcagcgacctgagctacggcgacctgctgtacgaggtgcagtacagaagccccttcgacaccgagtggcagagcaagcaggagaacacctgcaacgtgaccatcgagggcctggacgccgagaagtgctacagcttctgggtgagagtgaaggccatggaggacgtgtacggccccgacacctaccccagcgactggagcgaggtgacctgctggcagagaggcgagatcagagacgcctgcgccgagacccccaccccccccaagcccaagctgagcaagttcatcctgatcagcagcctggccatcctgctgatggtgagcctgctgctgctgagcctgtggaagctgtggagatag

SEQ ID NO: 211636 - DNA, 768 bp, Artificial Sequence
  derived and/or modified sequence
atgggcagactggtgctgctgtggggcgccgccgtgttcctgctgggcggctggatggccctgggccagggcggcgccgccgagggcgtgcagatccagatcatctacttcaacctggagaccgtgcaggtgacctggaacgccagcaagtacagcagaaccaacctgaccttccactacagattcaacggcgacgaggcctacgaccagtgcaccaactacctgctgcaggagggccacaccagcggctgcctgctggacgccgagcagagagacgacatcctgtacttcagcatcagaaacggcacccaccccgtgttcaccgccagcagatggatggtgtactacctgaagcccagcagccccaagcacgtgagattcagctggcaccaggacgccgtgaccgtgacctgcagcgacctgagctacggcgacctgctgtacgaggtgcagtacagaagccccttcgacaccgagtggcagagcaagcaggagaacacctgcaacgtgaccatcgagggcctggacgccgagaagtgctacagcttctgggtgagagtgaaggccatggaggacgtgtacggccccgacacctaccccagcgactggagcgaggtgacctgctggcagagaggcgagatcagagacgcctgcgccgagacccccaccccccccaagcccaagctgagcaagttcatcctgatcagcagcctggccatcctgctgatggtgagcctgctgctgctgagcctgtggaagctgtggtag

SEQ ID NO: 211637 - protein, 196 aa, Artificial Sequence [sequence omitted]

SEQ ID NO: 211638 - DNA, 591 bp, Artificial Sequence
  derived and/or modified sequence
atggaaataattagttccaagctatttatcttgctgactctcgctaccagttccctattgacctccaacatcttttgcgccgacgaactcgtcatcagcaacttacattctaaagagaattatgataaatactcggaaccgaggggctatccaaagggagagaggtctctgaacttcgaagagttaaaggactggggcccaaagaatgtgattaaaatgtctacacccgcagtgaataaaatgcctcattcttttgctaacttgccactccgcttcggccgcaacgttcaggaagaaagatccgcaggcgccacagccaacctgccgctgagaagtgggagaaatatggaggtgtccctcgtccgaagagtgcccaatctgccacagcgattcggcagaacgacgacggccaaatccgtgtgccggatgctctcagatctgtgccaggggagtatgcactcaccttgtgccaatgacctcttctatagtatgacctgtcagcatcaagagatccagaaccctgatcagaagcagagccggcgcctcctgtttaaaaagattgatgatgctgagctcaagcaggagaaatag

SEQ ID NO: 211639 - DNA, 591 bp, Artificial Sequence
  derived and/or modified sequence
atggagatcatcagcagcaagctgttcatcctgctgaccctggccaccagcagcctgctgaccagcaacatcttctgtgctgatgagctggtgatcagcaacctgcacagcaaagaaaattatgacaagtacagcgagccccggggctaccccaagggggagaggagcctgaactttgaggagctgaaggactggggccccaagaatgtcatcaagatgagcaccccagctgtgaacaagatgccccacagctttgccaacctgcccctgcgcttcggcagaaatgtgcaggaggagaggtctgctggggccacagccaacctgcccctgcggagcggcaggaacatggaggtgtccctggtgcggcgggtgcccaacctgccccagagatttggaagaaccaccacagccaagtctgtgtgcaggatgctgagtgacctgtgccagggctccatgcacagcccctgtgccaatgacctcttctacagcatgacctgccagcaccaggagatccagaacccagaccagaagcagagccggcggctgctcttcaagaagattgatgatgctgagctgaagcaggagaagtag

SEQ ID NO: 211640 - DNA, 591 bp, Artificial Sequence
  derived and/or modified sequence
atggagatcatcagcagcaagctgttcatcctgctgaccctggccacctctagtctgctgacatccaatatcttttgtgctgacgagctcgtgatcagtaatctgcacagcaaagaaaactacgacaagtattcagaaccgagaggctacccaaaaggggaacggtctctcaattttgaagaacttaaggattggggcccaaaaaacgttatcaaaatgtcaactcctgcagtaaacaagatgccacatagcttcgccaatctcccccttcggttcggtcggaacgtgcaagaggagcggtcagctggagctacagcaaatctgccactccgatccggaagaaatatggaagtgagcctcgtgaggagggtgccaaatctgccccaaagattcggaaggaccacaaccgccaaaagcgtctgtcggatgctgagtgatctctgccagggatctatgcactcaccgtgcgctaacgatctgttctacagcatgacttgccagcatcaggagatacagaatcccgaccagaagcagagtaggaggctgctgtttaagaagatcgatgatgcggaattaaaacaggagaagtag

SEQ ID NO: 211641 - DNA, 591 bp, Artificial Sequence
  derived and/or modified sequence
atggaaattatcagtagcaaattgtttatcttactaactctcgcaacttcctcactgcttacctctaacattttctgcgctgatgagctcgtgattagcaatctgcactcaaaggagaactacgataaatatagtgagcctcgaggctatccaaagggcgagcgctccttaaattttgaggagttgaaagattggggccctaagaacgtcattaagatgtccactcccgcagtcaataaaatgccccatagctttgcaaacctcccattgagattcggcaggaatgtccaggaggaacgctctgccggagccaccgccaatctcccattgaggtctggacggaatatggaagtcagcttggttcgtcgggtgccgaacttacctcagcgcttcggccgtactactactgccaaaagcgtgtgtcggatgctgtcagatctttgtcagggttctatgcatagcccctgcgctaatgatttattctattctatgacttgccagcaccaggagatccaaaaccccgaccaaaaacagagtagacggcttctatttaagaagatcgatgacgccgaattgaagcaagagaaatag

SEQ ID NO: 211642 - DNA, 591 bp, Artificial Sequence
  derived and/or modified sequence
atggagatcatatcgtcaaagctgtttattctcctcacactggcaacctcatcactgttgacctcaaacatattctgtgctgacgagctggtcatttcaaacctgcactcgaaggaaaattacgataaatactctgaacctcgaggctatccaaagggtgagagaagcttgaattttgaagaactgaaggattgggggccaaagaatgttatcaagatgagcacaccagcagtgaataaaatgcctcattccttcgctaacctgcctctccgcttcggacggaacgtacaggaggagaggtccgccggagcaacagccaatctcccactgcgttctggcagaaatatggaagtcagcttggtgaggagggtgcccaatctccctcagcgattcggccggaccaccacagctaagagtgtctgcaggatgctttctgacttatgccaagggtccatgcactcgccttgcgcaaacgatttgttctactcaatgacatgtcaacaccaggaaatacagaacccggatcaaaaacagagccgccgcctgctttttaagaaaattgacgacgccgaactgaagcaggaaaaatag

SEQ ID NO: 211643 - DNA, 591 bp, Artificial Sequence
  derived and/or modified sequence
atggaaatcatctccagtaaactatttatcttgctcaccctcgctacatcctcattactcacctcgaacatcttctgcgccgatgaactggtgatctccaatctacactccaaagaaaactacgataaatattccgaacccagaggctatcccaagggcgagcggtccttgaactttgaagagctgaaagactggggcccgaaaaacgttatcaaaatgtcaacaccagcggtcaacaaaatgcctcactcctttgcaaatctgcctctaaggttcggcagaaacgtacaagaagagcggtccgctggagctacagccaacctcccactgcgctctggaaggaacatggaggttagcctcgtacgtcgcgttcccaatttacctcagaggtttggcagaactaccaccgccaaatccgtttgcaggatgctcagcgatttgtgccaaggcagcatgcattccccctgcgcaaatgacctcttctacagtatgacttgccaacaccaggaaattcagaacccagatcagaagcaatcacggcgccttctcttcaagaaaattgacgatgctgaactcaaacaggagaagtag

SEQ ID NO: 211644 - DNA, 591 bp, Artificial Sequence
  derived and/or modified sequence
atggagatcatcagcagcaagctgttcatcctgctgaccctggccaccagcagcctgctgaccagcaacatcttctgcgccgacgagctggtgatcagcaacctgcacagcaaggagaactacgacaagtacagcgagcccagaggctaccccaagggcgagagaagcctgaacttcgaggagctgaaggactggggccccaagaacgtgatcaagatgagcacccccgccgtgaacaagatgccccacagcttcgccaacctgcccctgagattcggcagaaacgtgcaggaggagagaagcgccggcgccaccgccaacctgcccctgagaagcggcagaaacatggaggtgagcctggtgagaagagtgcccaacctgccccagagattcggcagaaccaccaccgccaagagcgtgtgcagaatgctgagcgacctgtgccagggcagcatgcacagcccctgcgccaacgacctgttctacagcatgacctgccagcaccaggagatccagaaccccgaccagaagcagagcagaagactgctgttcaagaagatcgacgacgccgagctgaagcaggagaagtag

SEQ ID NO: 211645 - DNA, 1190 bp, Artificial Sequence
  derived and/or modified sequence
ataaacattgggctgcacatagagacttaattttagatttagacaaaatggaaattatttcatcaaaactattcattttattgactttagccacttcaagcttgttaacatcaaacattttttgtgcagatgaattagtgatctccaatcttcacagcaaagaaaattatgacaaatattctgagcctagaggatacccaaaaggggaaagaagcctcaattttgaggaattaaaagattggggaccaaaaaatgttattaagatgagtacacctgcagtcaataaaatgccacactccttcgccaacttgccattgagatttgggaggaacgttcaagaagaaagaagtgctggagcaacagccaacctgcctctgagatctggaagaaatatggaggtgagcctcgtgagacgtgttcctaacctgccccaaaggtttgggagaacaacaacagccaaaagtgtctgcaggatgctgagtgatttgtgtcaaggatccatgcattcaccatgtgccaatgacttattttactccatgacctgccagcaccaagaaatccagaatcccgatcaaaaacagtcaaggagactgctattcaagaaaatagatgatgcagaattgaaacaagaaaaataagaaacctggagcctgtccctaaagctgtggcctgtaatctacaaatggctctatagcgaagaccacacggaagagtagctacatacacttcatcagctatggatcatcaacggcaatttttccttgtcagtacagctataatagtatcttgaaagttgtaaaaaaattaaagcatatttgttacgtaaagttaaaatgatttttgtctgaataaaaaaaaagcattgcaaatgctttagaaatctctgataatggagagagagacagaggaccctcctcactaccctatataaaaatcattggcacagttacacttaataaaaaaaattaaacagaagagcaccctgaaaaacattatgatggaaattaaatagtatgccagaataacatggttgacaaataagtgaacaaggattaaaaatcacttacaaacgtgtttctgtacaccctttctatcgtgtcaaatgttaatgaatctgtgatcaattgaaatgtaaatgtctgtgtaaaactacaaaataaaaactcttagactttagggagaaaagaaaa

SEQ ID NO: 211646 - RNA, 591 nt, Artificial Sequence
  derived and/or modified sequence
auggagaucauaucgucaaagcuguuuauucuccucacacuggcaaccucaucacuguugaccucaaacauauucugugcugacgagcuggucauuucaaaccugcacucgaaggaaaauuacgauaaauacucugaaccucgaggcuauccaaagggugagagaagcuugaauuuugaagaacugaaggauugggggccaaagaauguuaucaagaugagcacaccagcagugaauaaaaugccucauuccuucgcuaaccugccucuccgcuucggacggaacguacaggaggagagguccgccggagcaacagccaaucucccacugcguucuggcagaaauauggaagucagcuuggugaggagggugcccaaucucccucagcgauucggccggaccaccacagcuaagagugucugcaggaugcuuucugacuuaugccaaggguccaugcacucgccuugcgcaaacgauuuguucuacucaaugacaugucaacaccaggaaauacagaacccggaucaaaaacagagccgccgccugcuuuuuaagaaaauugacgacgccgaacugaagcaggaaaaauag

SEQ ID NO: 211647 - RNA, 591 nt, Artificial Sequence
  derived and/or modified sequence
auggaaaucaucuccaguaaacuauuuaucuugcucacccucgcuacauccucauuacucaccucgaacaucuucugcgccgaugaacuggugaucuccaaucuacacuccaaagaaaacuacgauaaauauuccgaacccagaggcuaucccaagggcgagcgguccuugaacuuugaagagcugaaagacuggggcccgaaaaacguuaucaaaaugucaacaccagcggucaacaaaaugccucacuccuuugcaaaucugccucuaagguucggcagaaacguacaagaagagcgguccgcuggagcuacagccaaccucccacugcgcucuggaaggaacauggagguuagccucguacgucgcguucccaauuuaccucagagguuuggcagaacuaccaccgccaaauccguuugcaggaugcucagcgauuugugccaaggcagcaugcauucccccugcgcaaaugaccucuucuacaguaugacuugccaacaccaggaaauucagaacccagaucagaagcaaucacggcgccuucucuucaagaaaauugacgaugcugaacucaaacaggagaaguag

SEQ ID NO: 211648 - protein, 351 aa, Artificial Sequence
  derived and/or modified sequence
MTLRLLEDWCRGMDMNPRKALLIAGISQSCSVAEIEEALQAGLAPLGEYRLLGRMFRRDENRKVALVGLTAETSHALVPKEIPGKGGIWRVIFKPPDPDNTFLSRLNEFLAGEGMTVGELSRALGHENGSLDPEQGMIPEMWAPMLAQALEALQPALQCLKYKKLRVFSGRESPEPGEEEFGRWMFHTTQMIKAWQVPDVEKRRRLLESLRGPALDVIRVLKINNPLITVDECLQALEEVFGVTDNPRELQVKYLTTYQKDEEKLSAYVLRLEPLLQKLVQRGAIERDAVNQARLDQVIAGAVHKTIRRELNLPEDGPAPGFLQLLVLIKDYEAAEEEEALLQAILEGNFT

SEQ ID NO: 211649 - DNA, 1056 bp, Artificial Sequence
  derived and/or modified sequence
atgaccttgagactcttggaagattggtgcaggggaatggatatgaatccccgtaaggcattgctgattgccggaataagccagagctgttctgtagccgagatcgaggaggccctgcaagcaggtctggcacccctcggagagtaccgcctgctgggtcggatgtttaggcgggacgagaaccggaaagtcgcattggtcggactcacggcggaaacgtcccatgcattggtacctaaggaaatcccaggcaagggtgggatatggagggtgattttcaagccacctgatccggacaacaccttcctctcccggctaaacgaattcctggcaggcgagggcatgaccgtaggtgagctatctcgcgctctaggccacgagaacggttccctggaccccgagcagggcatgattcccgagatgtgggcgcctatgctagcacaggcgctcgaggctctgcagcccgcgcttcaatgtctcaagtacaaaaagctgagagtgttctccggccgtgaaagccccgagccgggcgaagaagaattcggacggtggatgttccatacaacacagatgataaaagcatggcaggttcctgacgttgagaagcggcgaagactactcgagtcacttaggggccccgcattggacgtcatccgggtactgaagataaacaaccctcttatcacagtagacgaatgcctgcaggcactggaggaggtgtttggagtgactgacaaccctcgcgaactgcaagttaaatacctcacaacgtaccaaaaggacgaagagaagctgtctgcgtatgttctcaggctggaaccccttctccaaaaattggtgcagcgaggggccattgaaagagacgccgtcaatcaggctcggttggatcaggtgattgcaggcgctgttcacaaaacaattaggcgagagctcaacctcccggaggatggcccggcccctggatttctgcagctccttgttctaataaaggactacgaggcagcggaggaggaagaagcactgttgcaggcaatcctggagggcaatttcacatag

SEQ ID NO: 211650 - DNA, 1056 bp, Artificial Sequence
  derived and/or modified sequence
atgaccctgcgactcctcgaagattggtgtagaggaatggatatgaaccccagaaaagcactactaatcgccggtatcagccagtcttgtagtgtcgccgaaatcgaagaagctctgcaggccggattggctcctctgggggagtataggctcctgggccggatgtttaggcgggatgagaatcggaaagtggccctggtcggactaacagccgagacaagtcacgccctggttcctaaggaaattcccgggaagggcgggatttggcgcgtgatatttaaaccacctgacccggataacacattcctgagccggttaaacgaatttcttgccggagaggggatgacagtcggagaattaagcagagcccttggtcatgaaaatggatccctggacccagagcaaggcatgatccctgaaatgtgggcacccatgctcgctcaggcgctggaagcactgcagccggccctgcaatgcctgaaatataaaaagcttcgtgtgttttctggccgcgagagcccagaaccaggcgaagaagaattcggaaggtggatgtttcatactacacagatgatcaaagcctggcaggtgcccgatgtcgagaaaagaagacggctgctggaatctctgcggggtcctgccttggatgtgatccgggtgctaaaaatcaataatcccctgataaccgtggacgaatgcctgcaggcattagaagaggtgttcggcgtcactgacaaccctcgggaactacaggttaaatatttaacaacttaccaaaaggatgaggagaagctgagtgcttatgtactgcgtctggaacccctcctgcagaaactggtacaaaggggagccattgagcgggacgctgtgaatcaggctaggctcgatcaggtgatcgcgggggcagtgcataagaccatccgacgggaacttaacctgcccgaagatggccctgcacccgggttccttcaacttttggttcttattaaggactacgaggcagcagaagaagaagaggcattacttcaagccatactagaggggaacttcacatag

SEQ ID NO: 211651 - DNA, 1056 bp, Artificial Sequence
  derived and/or modified sequence
atgaccctgcggctgctggaggactggtgccggggcatggacatgaaccccaggaaggccctgctgattgctggcatcagccagagctgcagcgtggccgagattgaggaggccctgcaggccggcctggcccccctgggggagtaccgcctgctgggccgcatgttcagaagagatgagaacaggaaggtggccctggtgggcctgacagctgagaccagccacgccctggtgcccaaggagatccctggaaaaggaggcatctggagggtcatcttcaagcccccagaccctgacaacaccttcctgagccggctgaatgagttcctggccggggagggcatgacagtgggggagctgagccgggccctgggccatgaaaatggcagcctggaccctgagcagggcatgatccctgagatgtgggcccccatgctggcccaggccctggaggccctgcagcctgccctgcagtgcctgaagtacaagaagctgcgggtcttcagcggccgggagagccctgagcccggggaggaggagtttggccgctggatgttccacaccacccagatgatcaaggcctggcaggtgcctgatgtggagaagagaagaaggctgctggagagcctgcggggccctgccctggatgtgatccgggtgctgaagatcaacaaccccctcatcaccgtggatgagtgcctgcaggccctggaggaggtgtttggagtgacagacaacccccgggagctgcaggtgaagtacctgaccacctaccagaaggatgaggagaagctgagcgcctacgtgctgcggctggagcccctgctgcagaagctggtgcagagaggagccatcgagagagatgctgtgaaccaggcccggctggaccaggtgattgctggagctgtgcacaagaccatccggcgggagctgaacctgcctgaagatggccctgcccctggcttcctgcagctgctggtgctgatcaaggactatgaggccgctgaggaggaggaggccctgctgcaggccatcctggagggcaacttcacctag

SEQ ID NO: 211652 - DNA, 1056 bp, Artificial Sequence
  derived and/or modified sequence
atgaccctgcggctgctggaggactggtgccggggcatggacatgaacccgcgtaaggctcttttaatcgctggaataagccagagctgtagtgtcgccgagattgaagaagcccttcaagctggcctggcaccactgggagagtaccgcctcctcggtaggatgttccgaagggacgagaaccggaaagtagcacttgtcggcttgacagctgaaacctcacacgcccttgtccccaaggaaatccctggaaaaggtggcatatggagggtaatattcaagcctcccgaccccgataatacttttctcagtcgactgaatgagttccttgcgggtgagggaatgacagtaggggaactctcccgggccctggggcacgagaatggctcattggatccagaacaaggtatgatacctgagatgtgggctccaatgctcgctcaggctctcgaggcactccaaccagccctgcagtgcctgaaatataagaagctgcgggttttctctggccgggaatcccccgaaccaggtgaggaagaatttggccgatggatgttccataccacacagatgataaaagcttggcaggtgccggacgtcgagaaaaggcgccggttgctggagagtttgaggggtcccgccctggacgtgatccgggtcttaaaaattaataacccgcttattactgtcgacgagtgtttgcaggcactggaggaagtattcggcgtgactgacaacccgcgggaattgcaggtgaaatatctgacaacgtaccagaaggatgaggagaaactatccgcgtacgtgcttcgactagaaccattgctgcagaaactggtccagcggggagcgattgagcgagatgctgtgaaccaggctcgcctcgatcaggtgattgcaggtgccgtgcacaagaccataaggcgcgagctcaacctcccagaggatgggcctgcgccaggctttcttcaactgctggtcctgatcaaggactacgaggccgcggaggaagaagaggcactcctccaggcgatcctggagggaaacttcacttag

SEQ ID NO: 211653 - DNA, 1056 bp, Artificial Sequence
  derived and/or modified sequence
atgaccctgcggctgctggaggactggtgccggggcatggacatgaacccgcggaaagccttgttaatagctggaatcagccaaagctgcagtgtggcagagatcgaggaagccctgcaggctggactcgcccctctgggcgaatacaggctgctgggcaggatgttccgaagggacgaaaataggaaagtggctttggtggggttgacagctgagacgagtcatgctctggtgccaaaagagatccccggaaaaggaggcatatggagagtgatttttaagcctcccgatcccgataatacctttttgtcacgccttaacgagtttttagccggagaggggatgacagtaggggaactctctagagcattgggccacgagaacgggtccctcgatccagaacagggtatgattccagaaatgtgggctcccatgctggcccaggctctcgaagcactgcagcccgccctgcagtgcctgaaatacaaaaagttaagggtattttcaggccgagaaagcccagaacccggagaagaggagtttggtcgatggatgttccataccacccagatgatcaaagcctggcaagtccccgatgtggagaaacgaaggaggttgctagaaagtttaaggggacctgccctggatgttattagggtgctaaagatcaacaacccactgatcacggtggatgagtgtctgcaggcgcttgaagaggtgtttggcgttaccgacaacccgcgcgaactacaggtgaaatatctcacaacataccagaaggatgaagaaaagctctctgcgtacgtcctgaggctggagccactgctgcagaagctcgtgcagcgcggggctatcgagagagacgcggtaaaccaagcgcgattggaccaggtcatcgcaggagccgttcacaagaccatcagacgggagctcaatctccctgaggacggccccgctcccggattcctccagcttctagtgttgattaaggactatgaagctgccgaggaagaggaagctctgctccaagctatcctcgaaggcaactttacgtag

SEQ ID NO: 211654 - DNA, 1056 bp, Artificial Sequence
  derived and/or modified sequence
atgactcttagactgcttgaagactggtgtcgcggtatggacatgaacccccgaaaggccctccttatagccggaatttctcagagttgcagtgtggcagaaattgaggaagcactccaggcaggactggcccctcttggagagtacagattacttggtcgcatgttcaggcgagacgagaataggaaggtcgcactagtggggctgacagcagaaacatcacatgctcttgtgccaaaggagatcccaggaaaaggaggcatctggagggtgatctttaaacctccagatcccgacaacacttttttgagccgtttgaatgagtttttagcaggcgaaggaatgactgtgggcgagctcagccgggcattaggccatgaaaatggctcactagacccagaacagggcatgataccggagatgtgggccccaatgctcgcgcaggctctggaggctctgcagccggcactccagtgtctcaagtataagaagctacgggtgttttctgggcgagaaagccccgaaccaggtgaggaggagtttggtcggtggatgttccacacaacgcagatgatcaaagcttggcaggtgccggatgtggagaaacgccgaaggctgttagagtcactgcgtggaccagccctggacgtgattagggttctgaagatcaacaatcccctcattactgtcgatgagtgcctgcaggcgctggaggaggtgttcggagtcacggataacccgcgagaactgcaggtcaaatatctgaccacctaccagaaggacgaggaaaagctgtcagcttacgtgctccgacttgagccccttcttcagaagctggtccaacggggagcaatcgaacgcgatgccgtcaatcaggctcgtttggatcaggtgatcgctggagccgttcataaaaccatcaggcgcgaactcaatttgcccgaagacggacctgcgcctggattcttgcagttgctggtgctcattaaagattacgaagccgcagaggaggaagaggctctgctccaggctatactggagggcaatttcacatag

SEQ ID NO: 211655 - DNA, 1056 bp, Artificial Sequence
  derived and/or modified sequence
atgactctaaggctgctggaggactggtgtaggggcatggatatgaacccacgcaaggccctgctaattgctggcatcagccagtcatgcagcgtggcagaaattgaggaggcccttcaggcaggtctggcacctctgggggaatacagactgctggggcgaatgttcaggagagacgagaaccggaaggtggcccttgtcggtctgaccgctgagacaagtcacgccctggtccccaaggaaatccccggaaaagggggtatctggcgcgtcatttttaagccgccagatccagacaatacgtttctaagtagattgaatgagtttctggccggtgaagggatgacagtcggggagctgagtagagcgttaggccacgaaaacggaagcctcgatcctgaacaaggaatgattcctgagatgtgggccccaatgttggctcaggctctcgaggctctgcagcctgcgttacaatgtttaaagtacaagaaactcagggtgttcagcggaagggaatcacctgaaccaggagaggaagagtttggccgatggatgttccacacaacgcagatgatcaaggcttggcaggtgcctgatgtggaaaagaggaggcggctgctggagagcttacggggacctgcgttagacgttatcagggtgttaaaaattaataatcccctgatcacagttgatgaatgtctgcaggccctggaagaagtattcggagttacagacaatccacgcgaacttcaagtgaagtatctgaccacctaccagaaggatgaagagaaactcagcgcttacgtcctgagattagaacctctgctgcaaaagcttgtgcagaggggagccatcgaaagagatgcagtgaatcaggctaggctcgatcaagtgattgctggtgccgtccacaaaaccataagaagggagctgaacctccccgaggacgggccagctcctggcttcctgcagctgttggtgctaatcaaggattacgaagcagccgaggaggaagaggcactgcttcaggccatcctggagggcaactttacctag

SEQ ID NO: 211656 - DNA, 2529 bp, Artificial Sequence
  derived and/or modified sequence
atgacgtcagatcgcccccgcccgccgcgcagcttccccgagcgagaccaaaacaggtggaatccgggctggagccggagctccggcggcgcgggtggcggcacgtccctccaggtgggtggctctctgggtctggcgactcagcgctcctcagccttgccccctggtgcccgctcgcgactgtcatcgccccatcacttctcgttgcagacagtaccacaggcacctggagtaccggcatcggtcgctgtggcccccgagtgtccgtcagagcctaggggagcctgccctcccgcgcctcgtcggggcccggccaggcaccttggccgccggcgcacggacgcgggcacgagcactagatcacggctgctggacctcggcacgttgacaagatttctctggggtaccgcggaggattactttgaatttcggtggtcgcctgtggtctggcatatttagaacttaagtctattatttcgggcaccatgactttgaggcttttagaagactggtgcagggggatggacatgaaccctcggaaagcgctattgattgccggcatctcccagagctgcagtgtggcagaaatcgaggaggctctgcaggctggtttagctcccttgggggagtacagactgcttggaaggatgttcaggagggatgagaacaggaaagtagccttagtagggcttactgcggagactagtcacgccctggtccctaaggagataccgggaaaagggggtatctggagagtgatctttaagccccctgacccagataatacatttttaagcagattaaatgaatttttagcgggagagggcatgacagtgggtgagttgagcagagctcttggacatgaaaatggctccttagacccagagcagggcatgatcccggaaatgtgggcccctatgttggcacaggcattagaggctcttcagcctgccctgcaatgcttgaagtataaaaagctgagagtgttctcgggcagggagtctccagaaccaggagaagaagaatttggacgctggatgtttcatactactcagatgataaaggcgtggcaggtgccagatgtagagaagagaaggcgattgctagagagccttcgaggcccagcacttgatgttattcgtgtcctcaagataaacaatcctttaattactgtcgatgaatgtctgcaggctcttgaggaggtatttggggttacagataatcctagggagttgcaggtcaaatatctaaccacttaccagaaggatgaggaaaagttgtcggcttatgtactaaggctggagcctttgttacagaagctggtacagagaggagcaattgagagagatgctgtgaatcaggcccgcctagaccaagtcattgctggggcagtccacaaaacaattcgcagagagcttaatctgccagaggatggcccagcccctggtttcttgcagttattggtactaataaaggattatgaggcagctgaggaggaggaggcccttctccaggcaatattggaaggtaatttcacctgagtctcagggaaccacgaagggatatggcaatgagtagagcatgaaggtagaacagtctatatactcttgtgacacatacaatccctaccttgtgctgccaagtaactcatttttgtgcaattctcagtataagccctttgtcgtttctgtgcctatttaaagtctcctaaaggtgtaattgactaggaaggatgtagttctacactgccatttacctatttaaattcatccttgtgaatatctttgttgttgttgttgagacagagtctcgctctgtcacccaggctggagtgcagtggcgtgatcttggctcactgcatcctccgccttccaggtttaagctattctcctgcctcagttgcccgagtagctgggactacaggcatgtgccaccacgcccagctaagttttgcattatcagtagagacggggtttcaccatgttggccaggctagtttcgaactcctgacctcaagtgatccacctgcttcggcctctgaaagtgctgggattacaggcgtgagacactgcgcccagcctcatccctgtgaatttcttattgtacacaagttctttcactatctgtgtgcagtgctctgaggggacagacaaggcttgggtgtatatgccaaccagatctcattgaagtatcagcttgtttggtactaggtgcaagtgtagcatgtcacatgtgaccatgttggatcattgacaatttttaggtatgtactgacctacatttatgatgaagatcctgagcggaggttaagatattaagttattttccatatgaatcagaattatattgattctgtgcaatcaaaacaaaaggcagaatagaatgctgagattggttaagtttgcaatgaccatcttgaaccacagatttctgctatgtgtcatcaaaacatctagttctgagtaacattttcacgattgttataaaattataggtgtgaacttctaaaataaaggaatgctaataaaa

SEQ ID NO: 211657 - DNA, 2441 bp, Artificial Sequence
  derived and/or modified sequence
ccctcatgacgtcagatcgcccccgcccgccgcgcagcttccccgagcgagaccaaaacaggtggaatccgggctggagccggagctccggcggcgcgggtggcggcacgtccctccagacagtaccacaggcacctggagtaccggcatcggtcgctgtggcccccgagtgtccgtcagagcctaggggagcctgccctcccgcgcctcgtcggggcccggccaggcaccttggccgccggcgcacggacgcgggcacgagcactagatcacggctgctggacctcggcacgttgacaagatttctctggggtaccgcggaggattactttgaatttcggtggtcgcctgtggtctggcatatttagaacttaagtctattatttcgggcaccatgactttgaggcttttagaagactggtgcagggggatggacatgaaccctcggaaagcgctattgattgccggcatctcccagagctgcagtgtggcagaaatcgaggaggctctgcaggctggtttagctcccttgggggagtacagactgcttggaaggatgttcaggagggatgagaacaggaaagtagccttagtagggcttactgcggagactagtcacgccctggtccctaaggagataccgggaaaagggggtatctggagagtgatctttaagccccctgacccagataatacatttttaagcagattaaatgaatttttagcgggagagggcatgacagtgggtgagttgagcagagctcttggacatgaaaatggctccttagacccagagcagggcatgatcccggaaatgtgggcccctatgttggcacaggcattagaggctcttcagcctgccctgcaatgcttgaagtataaaaagctgagagtgttctcgggcagggagtctccagaaccaggagaagaagaatttggacgctggatgtttcatactactcagatgataaaggcgtggcaggtgccagatgtagagaagagaaggcgattgctagagagccttcgaggcccagcacttgatgttattcgtgtcctcaagataaacaatcctttaattactgtcgatgaatgtctgcaggctcttgaggaggtatttggggttacagataatcctagggagttgcaggtcaaatatctaaccacttaccagaaggatgaggaaaagttgtcggcttatgtactaaggctggagcctttgttacagaagctggtacagagaggagcaattgagagagatgctgtgaatcaggcccgcctagaccaagtcattgctggggcagtccacaaaacaattcgcagagagcttaatctgccagaggatggcccagcccctggtttcttgcagttattggtactaataaaggattatgaggcagctgaggaggaggaggcccttctccaggcaatattggaaggtaatttcacctgagtctcagggaaccacgaagggatatggcaatgagtagagcatgaaggtagaacagtctatatactcttgtgacacatacaatccctaccttgtgctgccaagtaactcatttttgtgcaattctcagtataagccctttgtcgtttctgtgcctatttaaagtctcctaaaggtgtaattgactaggaaggatgtagttctacactgccatttacctatttaaattcatccttgtgaatatctttgttgttgttgttgagacagagtctcgctctgtcacccaggctggagtgcagtggcgtgatcttggctcactgcatcctccgccttccaggtttaagctattctcctgcctcagttgcccgagtagctgggactacaggcatgtgccaccacgcccagctaagttttgcattatcagtagagacggggtttcaccatgttggccaggctagtttcgaactcctgacctcaagtgatccacctgcttcggcctctgaaagtgctgggattacaggcgtgagacactgcgcccagcctcatccctgtgaatttcttattgtacacaagttctttcactatctgtgtgcagtgctctgaggggacagacaaggcttgggtgtatatgccaaccagatctcattgaagtatcagcttgtttggtactaggtgcaagtgtagcatgtcacatgtgaccatgttggatcattgacaatttttaggtatgtactgacctacatttatgatgaagatcctgagcggaggttaagatattaagttattttccatatgaatcagaattatattgattctgtgcaatcaaaacaaaaggcagaatagaatgctgagattggttaagtttgcaatgaccatcttgaaccacagatttctgctatgtgtcatcaaaacatctagttctgagtaacattttcacgattgttataaaattataggtgtgaacttctaaaataaaggaatgctaataaaatga

SEQ ID NO: 211658 - DNA, 1056 bp, Artificial Sequence
  derived and/or modified sequence
atgaccctgagactgctggaggactggtgcagaggcatggacatgaaccccagaaaggccctgctgatcgccggcatcagccagagctgcagcgtggccgagatcgaggaggccctgcaggccggcctggcccccctgggcgagtacagactgctgggcagaatgttcagaagagacgagaacagaaaggtggccctggtgggcctgaccgccgagaccagccacgccctggtgcccaaggagatccccggcaagggcggcatctggagagtgatcttcaagccccccgaccccgacaacaccttcctgagcagactgaacgagttcctggccggcgagggcatgaccgtgggcgagctgagcagagccctgggccacgagaacggcagcctggaccccgagcagggcatgatccccgagatgtgggcccccatgctggcccaggccctggaggccctgcagcccgccctgcagtgcctgaagtacaagaagctgagagtgttcagcggcagagagagccccgagcccggcgaggaggagttcggcagatggatgttccacaccacccagatgatcaaggcctggcaggtgcccgacgtggagaagagaagaagactgctggagagcctgagaggccccgccctggacgtgatcagagtgctgaagatcaacaaccccctgatcaccgtggacgagtgcctgcaggccctggaggaggtgttcggcgtgaccgacaaccccagagagctgcaggtgaagtacctgaccacctaccagaaggacgaggagaagctgagcgcctacgtgctgagactggagcccctgctgcagaagctggtgcagagaggcgccatcgagagagacgccgtgaaccaggccagactggaccaggtgatcgccggcgccgtgcacaagaccatcagaagagagctgaacctgcccgaggacggccccgcccccggcttcctgcagctgctggtgctgatcaaggactacgaggccgccgaggaggaggaggccctgctgcaggccatcctggagggcaacttcacctag

SEQ ID NO: 211659 - protein, 307 aa, Artificial Sequence
  derived and/or modified sequence
ASPRRPRPARSPAPEVPLRVRRRHGRPHGPGGRQLALGIPALRSLPGCVPRLLGPVDKGHDVTFYKTWYRSSRGEVQTCSERRPIRNLTFQDLHLHHGGHQAANTSHDLAQRHGLESASDHHGNFSITMRNLTLLDSGLYCCLVVEIRHHHSEHRVHGAMELQVQTGKDAPSNCVVYPSSSQDSENITAAALATGACIVGILCLPLILLLVYKQRQAASNRLAQELLAQDSNIQGIENPGFEASPPAQGIPEAKVRHPLSYVAQRQPSESGRHLLSEPSTPLSPPGPGDVFFPSLDPVPDSPNFEVI

SEQ ID NO: 211660 - protein, 311 aa, Artificial Sequence
  derived and/or modified sequence
MGVPTALEAGSWRWGSLLFALFLAASLGPVAAFKVATPYSLYVCPEGQNVTLTCRLLGPVDKGHDVTFYKTWYRSSRGEVQTCSERRPIRNLTFQDLHLHHGGHQAANTSHDLAQRHGLESASDHHGNFSITMRNLTLLDSGLYCCLVVEIRHHHSEHRVHGAMELQVQTGKDAPSNCVVYPSSSQDSENITAAALATGACIVGILCLPLILLLVYKQRQAASNRRAQELVRMDSNIQGIENPGFEASPPAQGIPEAKVRHPLSYVAQRQPSESGRHLLSEPSTPLSPPGPGDVFFPSLDPVPDSPNFEVI

SEQ ID NO: 211661 - DNA, 1923 bp, Artificial Sequence
  derived and/or modified sequence
gggggcgggtgcctggagcacggcgctggggccgcccgcagcgctcactcgctcgcactcagtcgcgggaggcttccccgcgccggccgcgtcccgcccgctccccggcaccagaagttcctctgcgcgtccgacggcgacatgggcgtccccacggccctggaggccggcagctggcgctggggatccctgctcttcgctctcttcctggctgcgtccctaggctcttgggccctgtggacaaagggcacgatgtgaccttctacaagacgtggtaccgcagctcgaggggcgaggtgcagacctgctcagagcgccggcccatccgcaacctcacgttccaggaccttcacctgcaccatggaggccaccaggctgccaacaccagccacgacctggctcagcgccacgggctggagtcggcctccgaccaccatggcaacttctccatcaccatgcgcaacctgaccctgctggatagcggcctctactgctgcctggtggtggagatcaggcaccaccactcggagcacagggtccatggtgccatggagctgcaggtgcagacaggcaaagatgcaccatccaactgtgtggtgtacccatcctcctcccaggatagtgaaaacatcacggctgcagccctggctacgggtgcctgcatcgtaggaatcctctgcctccccctcatcctgctcctggtctacaagcaaaggcaggcagcctccaaccgcctagctcaagaacttttggctcaggacagcaacattcaagggattgaaaaccccggctttgaagcctcaccacctgcccaggggatacccgaggccaaagtcaggcaccccctgtcctatgtggcccagcggcagccttctgagtctgggcggcatctgctttcggagcccagcacccccctgtctcctccaggccccggagacgtcttcttcccatccctggaccctgtccctgactctccaaactttgaggtcatctagcccagctgggggacagtgggctgttgtggctgggtctggggcaggtgcatttgagccagggctggctctgtgagtggcctccttggcctcggccctggttccctccctcctgctctgggctcagatactgtgacatcccagaagcccagcccctcaacccctctggatgctacatggggatgctggacggctcagcccctgttccaaggattttggggtgctgagattctcccctagagacctgaaattcaccagctacagatgccaaatgacttacatcttaagaagtctcagaacgtccagcccttcagcagctctcgttctgagacatgagccttgggatgtggcagcatcagtgggacaagatggacactgggccaccctcccaggcaccagacacagggcacggtggagagacttctcccccgtggccgccttggctcccccgttttgcccgaggctgctcttctgtcagacttcctctttgtaccacagtggctctggggccaggcctgcctgcccactggccatcgccaccttccccagctgcctcctaccagcagtttctctgaagatctgtcaacaggttaagtcaatctggggcttccactgcctgcattccagtccccagagcttggtggtcccgaaacgggaagtacatattggggcatggtggcctccgtgagcaaatggtgtcttgggcaatctgaggccaggacagatgttgccccacccactggagatggtgctgagggaggtgggtggggccttctgggaaggtgagtggagaggggcacctgccccccgccctccccatcccctactcccactgctcagcgcgggccattgcaagggtgccacacaatgtcttgtccaccctgggacacttctgagtatgaagcgggatgctattaaaaactacatgggg

SEQ ID NO: 211662 - DNA, 4689 bp, Artificial Sequence
  derived and/or modified sequence
ccggccgcgtcccgcccgctccccggcaccagaagttcctctgcgcgtccgacggcgacatgggcgtccccacggccctggaggccggcagctggcgctggggatccctgctcttcgctctcttcctggctgcgtccctaggtccggtggcagccttcaaggtcgccacgccgtattccctgtatgtctgtcccgaggggcagaacgtcaccctcacctgcaggctcttgggccctgtggacaaagggcacgatgtgaccttctacaagacgtggtaccgcagctcgaggggcgaggtgcagacctgctcagagcgccggcccatccgcaacctcacgttccaggaccttcacctgcaccatggaggccaccaggctgccaacaccagccacgacctggctcagcgccacgggctggagtcggcctccgaccaccatggcaacttctccatcaccatgcgcaacctgaccctgctggatagcggcctctactgctgcctggtggtggagatcaggcaccaccactcggagcacagggtccatggtgccatggagctgcaggtgcagacaggcaaagatgcaccatccaactgtgtggtgtacccatcctcctcccaggatagtgaaaacatcacggctgcagccctggctacgggtgcctgcatcgtaggaatcctctgcctccccctcatcctgctcctggtctacaagcaaaggcaggcagcctccaaccgccgtgcccaggagctggtgcggatggacagcaacattcaagggattgaaaaccccggctttgaagcctcaccacctgcccaggggatacccgaggccaaagtcaggcaccccctgtcctatgtggcccagcggcagccttctgagtctgggcggcatctgctttcggagcccagcacccccctgtctcctccaggccccggagacgtcttcttcccatccctggaccctgtccctgactctccaaactttgaggtcatctagcccagctgggggacagtgggctgttgtggctgggtctggggcaggtgcatttgagccagggctggctctgtgagtggcctccttggcctcggccctggttccctccctcctgctctgggctcagatactgtgacatcccagaagcccagcccctcaacccctctggatgctacatggggatgctggacggctcagcccctgttccaaggattttggggtgctgagattctcccctagagacctgaaattcaccagctacagatgccaaatgacttacatcttaagaagtctcagaacgtccagcccttcagcagctctcgttctgagacatgagccttgggatgtggcagcatcagtgggacaagatggacactgggccaccctcccaggcaccagacacagggcacggtggagagacttctcccccgtggccgccttggctcccccgttttgcccgaggctgctcttctgtcagacttcctctttgtaccacagtggctctggggccaggcctgcctgcccactggccatcgccaccttccccagctgcctcctaccagcagtttctctgaagatctgtcaacaggttaagtcaatctggggcttccactgcctgcattccagtccccagagcttggtggtcccgaaacgggaagtacatattggggcatggtggcctccgtgagcaaatggtgtcttgggcaatctgaggccaggacagatgttgccccacccactggagatggtgctgagggaggtgggtggggccttctgggaaggtgagtggagaggggcacctgccccccgccctccccatcccctactcccactgctcagcgcgggccattgcaagggtgccacacaatgtcttgtccaccctgggacacttctgagtatgaagcgggatgctattaaaaactacatggggaaacaggtgcaaaccctggagatggattgtaagagccagtttaaatctgcactctgctgctcctcccccacccccaccttccactccatacaatctgggcctggtggagtcttcgcttcagagccattcggccaggtgcgggtgatgttcccatctcctgcttgtgggcatgccctggctttgtttttatacacataggcaaggtgagtcctctgtggaattgtgattgaaggattttaaagcaggggaggagagtagggggcatctctgtacactctgggggtaaaacagggaaggcagtgcctgagcatggggacaggtgaggtggggctgggcagaccccctgtagcgtttagcaggatgggggccccaggtactgtggagagcatagtccagcctgggcatttgtctcctagcagcctacactggctctgctgagctgggcctgggtgctgaaagccaggatttggggctaggcgggaagatgttcgcccaattgcttggggggttggggggatggaaaaggggagcacctctaggctgcctggcagcagtgagccctgggcctgtggctacagccagggaaccccacctggacacatggccctgcttctaagccccccagttaggcccaaaggaatggtccactgagggcctcctgctctgcctgggctgggccaggggctttgaggagagggtaaacataggcccggagatggggctgacacctcgagtggccagaatatgcccaaaccccggcttctcccttgtccctaggcagaggggggtcccttcttttgttccctctggtcaccacaatgcttgatgccagctgccataggaagagggtgctggctggccatggtggcacacacctgtcctcccagcactttgcagggctgaggtggaaggaccgcttaagcccaggtgttcaaggctgctgtgagctgtgttcgagccactacactccagcctggggacggagcaaaactttgcctcaaaacaaattttaaaaagaaagaaagaaggaaagagggtatgtttttcacaattcatgggggcctgcatggcaggagtggggacaggacacctgctgttcctggagtcgaaggacaagcccacagcccagattccggttctcccaactcaggaagagcatgccctgccctctggggaggctggcctggccccagccctcagctgctgaccttgaggcagagacaacttctaagaatttggctgccagaccccaggcctggctgctgctgtgtggagagggaggcggcccgcagcagaacagccaccgcacttcctcctcagcttcctctggtgcggccctgccctctcttctctggacccttttacaactgaacgcatctgggcttcgtggtttcctgttttcagcgaaatttactctgagctcccagttccatcttcatccatggccacaggccctgcctacaacgcactagggacgtccctccctgctgctgctggggaggggcaggctgctggagccgccctctgagttgcccgggatggtagtgcctctgatgccagccctggtggctgtgggctggggtgcatgggagagctgggtgcgagaacatggcgcctccagggggcgggaggagcactaggggctggggcaggaggctcctggagcgctggattcgtggcacagtctgaggccctgagagggaaatccatgcttttaagaactaattcattgttaggagatcaatcaggaattaggggccatcttacctatctcctgacattcacagtttaatagagacttcctgcctttattccctcccagggagaggctgaaggaatggaattgaaagcaccatttggagggttttgctgacacagcggggactgctcagcactccctaaaaacacaccatggaggccactggtgactgctggtgggcaggctggccctgcctgggggagtccgtggcgatgggcgctggggtggaggtgcaggagccccaggacctgcttttcaaaagacttctgcctgaccagagctcccactacatgcagtggcccagggcagaggggctgatacatggcctttttcagggggtgctcctcgcggggtggacttgggagtgtgcagtgggacagggggctgcaggggtcctgccaccaccgagcaccaacttggcccctggggtcctgcctcatgaatgaggccttccccagggctggcctgactgtgctgggggctgggttaacgttttctcagggaaccacaatgcacgaaagaggaactggggttgctaaccaggatgctgggaacaaaggcctcttgaagcccagccacagcccagctgagcatgaggcccagcccatagacggcacaggccacctggcccattccctgggcattccctgctttgcattgctgcttctcttcaccccatggaggctatgtcaccctaactatcctggaatgtgttgagagggattctgaatgatcaatatagcttggtgagacagtgccgagatagatagccatgtctgccttgggcacgggagagggaagtggcagcatgcatgctgtttcttggccttttctgttagaatacttggtgctttccaacacactttcacatgtgttgtaacttgtttgatccacccccttccctgaaaatcctgggaggttttattgctgccatttaacacagagggcaatagaggttctgaaaggtctgtgtcttgtcaaaacaagtaaacggtggaactacgact

SEQ ID NO: 211663 - DNA, 924 bp, Artificial Sequence
  derived and/or modified sequence
gccagccccagaagacccagacccgccagaagccccgcccccgaggtgcccctgagagtgagaagaagacacggcagaccccacggccccggcggcagacagctggccctgggcatccccgccctgagaagcctgcccggctgcgtgcccagactgctgggccccgtggacaagggccacgacgtgaccttctacaagacctggtacagaagcagcagaggcgaggtgcagacctgcagcgagagaagacccatcagaaacctgaccttccaggacctgcacctgcaccacggcggccaccaggccgccaacaccagccacgacctggcccagagacacggcctggagagcgccagcgaccaccacggcaacttcagcatcaccatgagaaacctgaccctgctggacagcggcctgtactgctgcctggtggtggagatcagacaccaccacagcgagcacagagtgcacggcgccatggagctgcaggtgcagaccggcaaggacgcccccagcaactgcgtggtgtaccccagcagcagccaggacagcgagaacatcaccgccgccgccctggccaccggcgcctgcatcgtgggcatcctgtgcctgcccctgatcctgctgctggtgtacaagcagagacaggccgccagcaacagactggcccaggagctgctggcccaggacagcaacatccagggcatcgagaaccccggcttcgaggccagcccccccgcccagggcatccccgaggccaaggtgagacaccccctgagctacgtggcccagagacagcccagcgagagcggcagacacctgctgagcgagcccagcacccccctgagcccccccggccccggcgacgtgttcttccccagcctggaccccgtgcccgacagccccaacttcgaggtgatctag

SEQ ID NO: 211664 - DNA, 936 bp, Artificial Sequence
  derived and/or modified sequence
atgggcgtgcccaccgccctggaggccggcagctggagatggggcagcctgctgttcgccctgttcctggccgccagcctgggccccgtggccgccttcaaggtggccaccccctacagcctgtacgtgtgccccgagggccagaacgtgaccctgacctgcagactgctgggccccgtggacaagggccacgacgtgaccttctacaagacctggtacagaagcagcagaggcgaggtgcagacctgcagcgagagaagacccatcagaaacctgaccttccaggacctgcacctgcaccacggcggccaccaggccgccaacaccagccacgacctggcccagagacacggcctggagagcgccagcgaccaccacggcaacttcagcatcaccatgagaaacctgaccctgctggacagcggcctgtactgctgcctggtggtggagatcagacaccaccacagcgagcacagagtgcacggcgccatggagctgcaggtgcagaccggcaaggacgcccccagcaactgcgtggtgtaccccagcagcagccaggacagcgagaacatcaccgccgccgccctggccaccggcgcctgcatcgtgggcatcctgtgcctgcccctgatcctgctgctggtgtacaagcagagacaggccgccagcaacagaagagcccaggagctggtgagaatggacagcaacatccagggcatcgagaaccccggcttcgaggccagcccccccgcccagggcatccccgaggccaaggtgagacaccccctgagctacgtggcccagagacagcccagcgagagcggcagacacctgctgagcgagcccagcacccccctgagcccccccggccccggcgacgtgttcttccccagcctggaccccgtgcccgacagccccaacttcgaggtgatctag

SEQ ID NO: 211665 - DNA, 924 bp, Artificial Sequence
  derived and/or modified sequence
gcatctcctcgcagaccaaggcctgctaggtcgccagcgccagaggttccactccgcgtgcgtagacgccacggccggccccacgggcccggcggccggcagctggcactcggcattccggcgctgaggagcctgcctgggtgcgtcccccggttgctggggccggtcgacaagggtcatgatgttacattctacaaaacatggtaccgtagctcacggggggaagtgcagacttgttccgaaaggcgacccattaggaacttaacattccaagacttgcatctgcatcacggaggccaccaggccgccaacacttctcatgacctagcgcagcgtcatggtcttgaaagcgcatcagaccaccatggaaattttagcattaccatgagaaatctgaccctgctcgactcaggcctgtactgttgcctggtagtagagattcggcaccatcacagcgagcatagggtgcatggcgccatggagctgcaggttcagacgggcaaggacgctccttcaaattgtgtcgtctatccttctagttctcaggactcagaaaatatcacagccgcagcattggccacaggcgcatgcattgtgggtatcctgtgtttgcctctcatcctgcttctggtttacaaacagagacaggccgccagcaataggctcgcccaagagctgcttgctcaggattcaaatatccagggaattgaaaatccaggcttcgaggcttcccctccggcccagggtattcctgaagccaaggtcagacacccgctgagctacgtagctcagaggcagccatctgaatcaggcagacaccttctgagcgagccatccaccccactcagcccgcccgggcctggcgatgtttttttcccatccctcgacccagttcctgattcacccaatttcgaggtcatatag

SEQ ID NO: 211666 - DNA, 936 bp, Artificial Sequence
  derived and/or modified sequence
atgggggtgcccaccgccctagaggccggcagttggcgctggggctctctcctgtttgccctgtttctggccgcgagcttgggcccagtggcagccttcaaggtggcaaccccatattccttgtatgtgtgcccagaggggcagaatgtgactcttacatgccggctgttgggtccagtcgataagggccatgacgtcaccttctacaagacgtggtatcggtcttctcgtggcgaggtccagacctgttccgagcggcggcctattcggaacctaaccttccaagatctgcatcttcaccatggcggccaccaggctgcaaatactagccacgatctcgctcagcgacatggactggagtccgccagcgaccatcacggaaatttcagtataaccatgcgaaatttaactctcctggactctgggttgtactgttgcttggtcgtagagattaggcaccaccatagcgagcatcgggtgcatggcgctatggagctacaggttcagacgggaaaggatgctcccagcaattgtgttgtgtatcctagtagtagtcaggactccgaaaatatcacagccgcggctttggctacaggagcctgtatcgttggtatcctgtgcctgcccctgattctgttgcttgtttacaaacaaagacaagctgcttctaacaggagagcccaagagctggtcaggatggattcaaatattcagggcatcgagaaccccgggttcgaggcatccccacctgcccagggcattccggaggctaaggtgcggcatcctctgagttatgtcgcgcaacggcaaccaagcgaaagcggacggcacctgctgtcagaaccttccacgccactgtccccccccggaccaggagacgtgttttttccgagcctggatccagtacccgattctccaaatttcgaagtcatttag

SEQ ID NO: 211667 - DNA, 924 bp, Artificial Sequence
  derived and/or modified sequence
gccagcccccggcggcccaggcctgcccggagccctgcccctgaggtgcccctgcgggtgagaagaagacatggccggccccacggccctgggggccggcagctggccctgggcatcccagccctgcggagcctgcccggctgtgtgccccggctgctgggccctgtggacaagggccatgatgtgaccttctacaagacctggtaccgcagcagcagaggagaggtgcagacctgcagcgagcggcggcccatccggaacctgaccttccaggacctgcacctgcaccacggcggccaccaggccgccaacaccagccatgacctggcccagagacatggcctggagagcgccagtgaccaccacggcaacttcagcatcaccatgaggaacctgaccctgctggacagcggcctgtactgctgcctggtggtggagatccgccaccaccacagcgagcaccgggtgcatggagccatggagctgcaggtgcagacaggcaaggatgcccccagcaactgtgtggtgtaccccagcagcagccaggacagcgagaacatcacagctgctgccctggccaccggggcctgcatcgtgggcatcctgtgcctgcccctcatcctgctgctggtgtacaagcagaggcaggccgccagcaaccggctggcccaggagctgctggcccaggacagcaacatccagggcattgaaaatcctggctttgaggccagccccccagcccagggcatccctgaggccaaggtgcgccaccccctgtcctatgtggcccagaggcagcccagcgagagcggccgccacctgctgtctgagcccagcacccccctgagccccccaggccctggagatgtgttcttccccagcctggaccctgtgcctgacagccccaactttgaggtgatctag

SEQ ID NO: 211668 - DNA, 936 bp, Artificial Sequence
  derived and/or modified sequence
atgggcgtgcccacagccctggaggccggctcctggcgctggggcagcctgctgtttgccctcttcctggccgccagcctgggccctgtggccgccttcaaggtggccaccccctacagcctgtatgtgtgcccagagggccagaatgtgaccctgacctgccgcctgctgggccctgtggacaagggccatgatgtgaccttctacaagacctggtaccgcagcagcagaggagaggtgcagacctgcagcgagcggcggcccatccggaacctgaccttccaggacctgcacctgcaccacggcggccaccaggccgccaacaccagccatgacctggcccagagacatggcctggagagcgccagtgaccaccacggcaacttcagcatcaccatgaggaacctgaccctgctggacagcggcctgtactgctgcctggtggtggagatccgccaccaccacagcgagcaccgggtgcatggagccatggagctgcaggtgcagacaggcaaggatgcccccagcaactgtgtggtgtaccccagcagcagccaggacagcgagaacatcacagctgctgccctggccaccggggcctgcatcgtgggcatcctgtgcctgcccctcatcctgctgctggtgtacaagcagaggcaggccgccagcaacagaagagcccaggagctggtgaggatggacagcaacatccagggcattgaaaatcctggctttgaggccagccccccagcccagggcatccctgaggccaaggtgcgccaccccctgtcctatgtggcccagaggcagcccagcgagagcggccgccacctgctgtctgagcccagcacccccctgagccccccaggccctggagatgtgttcttccccagcctggaccctgtgcctgacagccccaactttgaggtgatctag

SEQ ID NO: 211669 - DNA, 924 bp, Artificial Sequence
  derived and/or modified sequence
gccagcccccggcggccccggcccgcccggagccccgcccccgaggtgcctttgagggtacggagaaggcacggaaggcctcacggtcccggggggcgtcagttagcactgggtatccccgcgctccgtagtttgcccgggtgcgtacctagactgctgggaccagtggacaaaggccacgatgtgaccttctataagacctggtatagatcctcaagaggcgaggttcaaacatgtagtgagcgccgcccaattagaaatcttacctttcaggacctgcaccttcaccacggtgggcaccaggctgcgaacacctcgcatgacctggctcaacgacatggtctggaatcggcatccgatcaccacggcaacttcagcattactatgcgcaacttaaccctgctggacagcggactgtactgctgtctcgttgtggaaatccgacaccatcatagcgaacaccgggtacatggcgcgatggaactgcaggttcagacaggaaaagatgctccttccaattgtgtggtctacccctctagctcacaagacagcgagaacatcacagcagctgccctcgccacgggggcttgcattgtcggaatcttatgcctgccgctaatactcctgctcgtctacaagcagaggcaggcagccagcaatcggctcgcacaagaattgctggcgcaggactctaacatacaggggattgaaaatcctggattcgaggccagtcccccagcgcagggcattccagaagctaaagtccgacatcctttgagctatgtagcacagcgtcaacccagcgagagcggccgtcacctgctgtctgagccatccacgccgttgtcccctcctgggccaggagatgtattctttccgagtctggatcctgtgccagattcccctaactttgaagtgatctag

SEQ ID NO: 211670 - DNA, 936 bp, Artificial Sequence
  derived and/or modified sequence
atgggcgtgcccaccgccctggaggccggcagctggcggtggggctcactgctcttcgcgctctttctagcggctagtcttggtccagtggccgcatttaaagtggccacgccatactctctttatgtgtgccctgaagggcagaatgtcaccctcacttgtagactacttggacccgttgataaaggacatgacgtgacattctacaaaacatggtaccgcagctcgcgcggagaggtccagacatgtagcgagcggagacccatcagaaatctcactttccaggacttacacttgcaccacggggggcaccaagctgccaacactagtcacgacctggcccagcgccacggcttggagtccgccagtgaccatcacgggaactttagcattacaatgcgaaacctgacactccttgactctggtctctactgctgcctggtggtcgagataagacatcaccatagtgaacaccgggtgcacggggcaatggagcttcaagtgcaaacaggcaaggatgcaccctctaactgcgtggtatacccctccagctcccaggacagtgagaacatcaccgcagcagccctggccacaggagcctgtattgtcggaatactatgcctccccctaatcctgttactggtgtataaacaacgacaggccgccagtaatagaagggcacaagagctggtgagaatggacagcaatatccagggaattgagaatcctggcttcgaggcttcccccccggcccaaggaatacccgaggctaaggtccgccatcctctgtcttatgtagcccagaggcaaccatctgaatcaggacggcaccttctgtcagaaccatccacccctctttctccgcctggtcccggggacgtgtttttcccctcactggatcctgtgccggatagccccaactttgaagtgatttag

SEQ ID NO: 211671 - DNA, 924 bp, Artificial Sequence
  derived and/or modified sequence
gcctcaccgcgacggccacgtccagcccgtagccccgctccggaggtgccccttagggtacgtaggaggcacggaaggccacatggtcctggaggccgtcagttggccctaggtatccctgcccttcggtcactgcccggttgcgtacccaggctcttaggccctgttgataaaggacatgacgtgaccttttataaaacatggtataggtccagccgaggagaggtgcaaacctgctcagagcgcaggcccatcaggaatctcaccttccaagatctgcatctccaccacggcggtcaccaggcagcaaacaccagccacgacctcgctcagcgccatggcctagagtctgcgtcggatcaccatgggaatttcagcattaccatgagaaatctcaccctgttggattcaggtctctactgttgcctcgttgttgagattcgccaccatcattccgagcatagggtccatggagccatggagctccaggtgcagacaggaaaggacgctcccagcaattgtgtcgtctatcccagttctagtcaggatagcgagaacatcactgccgctgcactggcaaccggtgcctgcatagtgggcatcctctgcctgcccctgatcctgttgctcgtgtataagcagcggcaggctgcctccaacaggctggcccaggagcttctggctcaggacagcaacatccagggtatcgagaatcctgggtttgaagctagccctcctgcacagggcattcccgaagccaaagtgcggcatcctctcagttacgtagcccagcgccagcctagcgaatccgggagacacctcctatcagagcctagcacacctctttctccgcctgggcctggtgatgtgttcttcccttccctggaccccgtgcccgactcccccaactttgaggtgatttag

SEQ ID NO: 211672 - DNA, 936 bp, Artificial Sequence
  derived and/or modified sequence
atgggcgttcctaccgcactagaagctggatcgtggagatgggggagtctgctcttcgcactgtttcttgcagcaagtcttggcccagtcgccgcatttaaagtagccacaccctactccctgtatgtgtgtccagaggggcagaacgttacactgacatgcagactcctcgggccagttgataagggccacgacgtgacattctataagacgtggtatagaagttcacggggtgaagtgcaaacttgctcagagaggagacccattcgtaacctcactttccaggacctgcacttgcaccacggaggacatcaagccgcaaatacgtcgcacgatctggctcagcggcacggactggagagcgcctcggaccaccacgggaatttctccatcaccatgagaaatttgactcttctggattccggtctctattgttgccttgtggttgaaatcagacatcaccactccgaacaccgtgtccatggggctatggagcttcaagtgcagacaggaaaagacgcgccttccaattgcgtcgtgtaccctagctccagccaggatagcgaaaacatcaccgctgctgccctcgccaccggcgcttgtatcgtaggcatactgtgtctgcctctgatcctgctgcttgtgtacaagcaaaggcaagcagcatccaacaggcgcgctcaagagttggtcagaatggacagtaatatacaaggaatagagaacccagggttcgaggcgagcccccctgcccaaggcataccagaagcaaaagttaggcatccactgtcttacgtcgcccagaggcagccctcagagtccgggagacatctgctgagcgagccttcgacccctttgagccctcctggccctggcgacgtgtttttcccctcactggacccggtcccagattctcccaatttcgaggtcatatag

SEQ ID NO: 211673 - protein, 309 aa, Artificial Sequence
  derived and/or modified sequence
MEQLLRAELRTATLRAFGGPGAGCISEGRAYDTDAGPVFVKVNRRTQARQMFEGEVASLEALRSTGLVRVPRPMKVIDLPGGGAAFVMEHLKMKSLSSQASKLGEQMADLHLYNQKLREKLKEEENTVGRRGEGAEPQYVDKFGFHTVTCCGFIPQVNEWQDDWPTFFARHRLQAQLDLIEKDYADREARELWSRLQVKIPDLFCGLEIVPALLHGDLWSGNVAEDDVGPIIYDPASFYGHSEFELAIALMFGGFPRSFFTAYHRKIPKAPGFDQRLLLYQLFNYLNHWNHFGREYRSPSLGTMRRLLK

SEQ ID NO: 211674 - protein, 202 aa, Artificial Sequence
  derived and/or modified sequence
MEQLLRAELRTATLRAFGGPGAGCISEGRAYDTDAGPVFVKVNRRTQARQMFEGEVASLEALRSTGLVRVPRPMKVIDLPGGGAAFVMEHLKMKSLSSQASKLGEQMADLHLYNQKLREKLKEEENTVGRRGEGAEPQYVDKFGFHTVTCCGFIPQEPLEPSSLKSVKFQRRLWTAQLPCASLEEANIGPYFGFVRNTAPII

SEQ ID NO: 211675 - protein, 177 aa, Artificial Sequence
  derived and/or modified sequence
MQARQMFEGEVASLEALRSTGLVRVPRPMKVIDLPGGGAAFVMEHLKMKSLSSQASKLGEQMADLHLYNQKLREKLKEEENTVGRRGEGAEPQYVDKFGFHTVTCCGFIPQVNEWQDDWPTFFARHRLQAQLDLIEKDYADREARELWSRLQVGTAVTSLGKSWSSHDPAAFVRVHL

SEQ ID NO: 211676 - DNA, 930 bp, Artificial Sequence
  derived and/or modified sequence
atggagcagctgctgagagccgagctgagaaccgccaccctgagagccttcggcggccccggcgccggctgcatcagcgagggcagagcctacgacaccgacgccggccccgtgttcgtgaaggtgaacagaagaacccaggccagacagatgttcgagggcgaggtggccagcctggaggccctgagaagcaccggcctggtgagagtgcccagacccatgaaggtgatcgacctgcccggcggcggcgccgccttcgtgatggagcacctgaagatgaagagcctgagcagccaggccagcaagctgggcgagcagatggccgacctgcacctgtacaaccagaagctgagagagaagctgaaggaggaggagaacaccgtgggcagaagaggcgagggcgccgagccccagtacgtggacaagttcggcttccacaccgtgacctgctgcggcttcatcccccaggtgaacgagtggcaggacgactggcccaccttcttcgccagacacagactgcaggcccagctggacctgatcgagaaggactacgccgacagagaggccagagagctgtggagcagactgcaggtgaagatccccgacctgttctgcggcctggagatcgtgcccgccctgctgcacggcgacctgtggagcggcaacgtggccgaggacgacgtgggccccatcatctacgaccccgccagcttctacggccacagcgagttcgagctggccatcgccctgatgttcggcggcttccccagaagcttcttcaccgcctaccacagaaagatccccaaggcccccggcttcgaccagagactgctgctgtaccagctgttcaactacctgaaccactggaaccacttcggcagagagtacagaagccccagcctgggcaccatgagaagactgctgaagtag

SEQ ID NO: 211677 - DNA, 609 bp, Artificial Sequence
  derived and/or modified sequence
atggagcagctgctgagagccgagctgagaaccgccaccctgagagccttcggcggccccggcgccggctgcatcagcgagggcagagcctacgacaccgacgccggccccgtgttcgtgaaggtgaacagaagaacccaggccagacagatgttcgagggcgaggtggccagcctggaggccctgagaagcaccggcctggtgagagtgcccagacccatgaaggtgatcgacctgcccggcggcggcgccgccttcgtgatggagcacctgaagatgaagagcctgagcagccaggccagcaagctgggcgagcagatggccgacctgcacctgtacaaccagaagctgagagagaagctgaaggaggaggagaacaccgtgggcagaagaggcgagggcgccgagccccagtacgtggacaagttcggcttccacaccgtgacctgctgcggcttcatcccccaggagcccctggagcccagcagcctgaagagcgtgaagttccagagaagactgtggaccgcccagctgccctgcgccagcctggaggaggccaacatcggcccctacttcggcttcgtgagaaacaccgcccccatcatctag

SEQ ID NO: 211678 - DNA, 534 bp, Artificial Sequence
  derived and/or modified sequence
atgcaggccagacagatgttcgagggcgaggtggccagcctggaggccctgagaagcaccggcctggtgagagtgcccagacccatgaaggtgatcgacctgcccggcggcggcgccgccttcgtgatggagcacctgaagatgaagagcctgagcagccaggccagcaagctgggcgagcagatggccgacctgcacctgtacaaccagaagctgagagagaagctgaaggaggaggagaacaccgtgggcagaagaggcgagggcgccgagccccagtacgtggacaagttcggcttccacaccgtgacctgctgcggcttcatcccccaggtgaacgagtggcaggacgactggcccaccttcttcgccagacacagactgcaggcccagctggacctgatcgagaaggactacgccgacagagaggccagagagctgtggagcagactgcaggtgggcaccgccgtgaccagcctgggcaagagctggagcagccacgaccccgccgccttcgtgagagtgcacctgtag

SEQ ID NO: 211679 - DNA, 930 bp, Artificial Sequence
  derived and/or modified sequence
atggaacagttactgcgcgccgaactcagaacagccaccctgcgtgccttcggaggcccaggcgccgggtgtatctccgaaggccgggcttacgacaccgatgctggaccggtcttcgtgaaggttaataggagaactcaagcgagacagatgtttgaaggggaggttgctagcctggaggcactcagaagcaccggcctcgtgagggtgccacgccctatgaaagtcatagacctcccagggggtggcgccgcctttgtgatggaacacttaaagatgaagtcactctcgagccaggcctcaaagctgggggaacagatggctgacctgcacctgtacaatcaaaagctcagagagaaactgaaagaagaggagaacaccgtcggccgccgcggggaaggtgccgagccccagtatgtggataagttcgggtttcacacagtgacctgctgcggttttattccccaggtcaacgagtggcaggatgactggcctacattctttgccagacatcgactgcaggcacagctagacctcattgaaaaagattacgctgacagagaagcccgcgagctgtggagcaggcttcaggtcaaaatccctgacctgttctgtggattagagattgtccctgccctgctccacggagatctttggtccgggaacgtggctgaagacgatgtgggtcctatcatctatgaccctgcttccttttatgggcactccgaatttgaattggccattgctctaatgttcggagggtttccacggtcgttttttactgcctaccataggaaaatccccaaagcccctggatttgatcaaaggctgttgctgtaccagttgtttaactatttgaaccactggaatcatttcggaagagagtacagatctccaagccttggaaccatgcggagactgctgaaatag

SEQ ID NO: 211680 - DNA, 609 bp, Artificial Sequence
  derived and/or modified sequence
atggagcagctgctacgcgccgagttgcgcacggctacacttcgtgcatttggaggcccgggcgcaggatgtatctcggaggggagagcatacgacactgatgcgggtcccgtcttcgtcaaggtgaaccgcagaactcaggcacgtcagatgtttgagggggaggtcgcgagccttgaggcgctgcgaagcaccgggttagtgagggtgcctcgtcctatgaaagtcatcgatcttcccggaggcggtgcagcctttgtgatggagcacctcaaaatgaaatcgttgagttcacaagcttccaaactgggcgagcagatggcggatcttcatctctacaatcagaagctacgtgaaaagctcaaggaggaagaaaataccgtgggaagacgcggggagggtgcagaaccacaatacgttgacaagtttggtttccacactgtaacttgctgcgggtttatacctcaggaaccactggaacccagctctttgaaatctgttaagtttcagcgcagactatggactgcacagctgccttgcgcctcactcgaggaggccaatatcggtccctactttggcttcgtccgaaacaccgcgccgattatctag

SEQ ID NO: 211681 - DNA, 534 bp, Artificial Sequence
  derived and/or modified sequence
atgcaggcaaggcagatgttcgagggcgaagtggccagtctcgaagcccttagaagcaccggtctagtgcgggtacctcgcccaatgaaagtaatcgatctgcccgggggaggcgccgcattcgtgatggagcaccttaaaatgaaatctctgagttctcaggcgtccaaactgggggaacagatggccgacttgcacctctacaaccagaagttgagggagaaactaaaggaggaggaaaatacggtgggacgccgcggcgagggagcagagccccaatacgtagataaatttggattccatacagtaacctgctgcggctttattcctcaggtcaacgagtggcaggacgactggcccacattcttcgcgcgccaccgtctccaggcccagctggacctcatcgagaaggattatgcagatcgcgaggcacgagagctgtggtcccgtcttcaggtgggaacagccgtgacaagtctggggaaaagctggtccagccacgatcccgcagcctttgtccgcgttcatttgtag

SEQ ID NO: 211682 - DNA, 930 bp, Artificial Sequence
  derived and/or modified sequence
atggagcagctgctgcgggcagagctgaggacagccaccctgcgggcctttggaggccctggggccggctgcatcagcgagggccgggcctatgacacagatgctggccctgtgtttgtgaaggtgaacagaaggacccaggcccggcagatgtttgaaggagaggtggccagcctggaggccctgcggagcacaggcctggtgcgggtgccccggcccatgaaggtgattgacctgcccggcggcggggccgcctttgtgatggagcacctgaagatgaagagcctgagcagccaggccagcaagctgggggagcagatggctgacctgcacctgtacaaccagaagctgcgggagaagctgaaggaggaggagaacacagtgggccggcggggggagggcgctgagccccagtatgtggacaagtttggcttccacacagtgacctgctgcggcttcatcccccaggtgaatgagtggcaggatgactggcccaccttctttgcccggcaccggctgcaggcccagctggacctgattgagaaggactatgctgaccgggaggcccgggagctgtggagccggctgcaggtgaagatcccagacctcttctgtggcctggagatcgtgcctgccctgctgcatggagacctgtggagcggaaatgtggctgaagatgatgtgggccccatcatctatgaccctgccagcttctacggccacagcgagtttgagctggccatcgccctgatgtttggaggcttccccaggagcttcttcaccgcctaccacaggaagatccccaaggcccctggctttgaccagaggctgctgctgtaccagctgttcaactacctgaaccactggaaccacttcggccgggagtaccgcagccccagcctgggcaccatgaggcggctgctgaagtag

SEQ ID NO: 211683 - DNA, 609 bp, Artificial Sequence
  derived and/or modified sequence
atggagcagctgctgcgggcagagctgaggacagccaccctgcgggcctttggaggccctggggccggctgcatcagcgagggccgggcctatgacacagatgctggccctgtgtttgtgaaggtgaacagaaggacccaggcccggcagatgtttgaaggagaggtggccagcctggaggccctgcggagcacaggcctggtgcgggtgccccggcccatgaaggtgattgacctgcccggcggcggggccgcctttgtgatggagcacctgaagatgaagagcctgagcagccaggccagcaagctgggggagcagatggctgacctgcacctgtacaaccagaagctgcgggagaagctgaaggaggaggagaacacagtgggccggcggggggagggcgctgagccccagtatgtggacaagtttggcttccacacagtgacctgctgcggcttcatcccccaggagcccctggagcccagcagcctgaagtctgtgaagttccagaggcggctgtggacagcccagctgccctgtgccagcctggaggaggccaacatcggcccctacttcggctttgtgaggaacacagcccccatcatctag

SEQ ID NO: 211684 - DNA, 534 bp, Artificial Sequence
  derived and/or modified sequence
atgcaggcccggcagatgtttgaaggagaggtggccagcctggaggccctgcggagcacaggcctggtgcgggtgccccggcccatgaaggtgattgacctgcccggcggcggggccgcctttgtgatggagcacctgaagatgaagagcctgagcagccaggccagcaagctgggggagcagatggctgacctgcacctgtacaaccagaagctgcgggagaagctgaaggaggaggagaacacagtgggcagaagaggagagggcgctgagccccagtatgtggacaagtttggcttccacacagtgacctgctgcggcttcatcccccaggtgaatgagtggcaggatgactggcccaccttctttgcccggcaccggctgcaggcccagctggacctgattgagaaggactatgctgaccgggaggcccgggagctgtggagccggctgcaggtgggcacagctgtgaccagcctgggcaagtcctggagcagccatgaccctgctgcctttgtgcgggtgcacctgtag

SEQ ID NO: 211685 - DNA, 1433 bp, Artificial Sequence
  derived and/or modified sequence
ccccgcagcgcctcagccgacaggggcttccgagcgagcagagtcccgcgccccgcactccatggagcagctgctgcgcgccgagctgcgcaccgcgaccctgcgggccttcggcggccccggcgccggctgcatcagcgagggccgagcctacgacacggacgcaggcccagtgttcgtcaaagtcaaccgcaggacgcaggcccggcagatgtttgagggggaggtggccagcctggaggccctcaggagcacgggcctggtgcgggtgccgaggcccatgaaggtcatcgacctgccgggaggtggggccgcctttgtgatggagcatttgaagatgaagagcttgagcagtcaagcatcaaaacttggagagcagatggcagatttgcatctttacaaccagaagctcagggagaagttgaaggaggaggagaacacagtgggccgaagaggtgagggtgctgagcctcagtatgtggacaagttcggcttccacacggtgacgtgctgcggcttcatcccgcaggtgaatgagtggcaggatgactggccgacctttttcgcccggcaccggctccaggcgcagctggacctcattgagaaggactatgctgaccgagaggcacgagaactctggtcccggctacaggtgaagatcccggatctgttttgtggcctagagattgtccccgcgttgctccacggggatctctggtcgggaaacgtggctgaggacgacgtggggcccattatttacgacccggcttccttctatggccattccgagtttgaactggcaatcgccttgatgtttggggggttccccagatccttcttcaccgcctaccaccggaagatccccaaggctccgggcttcgaccagcggctgctgctctaccagctgtttaactacctgaaccactggaaccacttcgggcgggagtacaggagcccttccttgggcaccatgcgaaggctgctcaagtagcggcccctgccctcccttcccctgtccccgtccccgtctccgtctccccgtccctgtccccccgtcccccgtccctgtgcccccgtccctgtccccctgttcccgtctccccgtccctccgtctccatccccccgtccccccatcctcctgtccccgtccccccgtccccgtccctccatccctgtcccccgtccccctgtccccctgtccacataccaatccccctgtccccgaccccccatccccgtcccccatctccgtccccgtcccccctgccccgtccccgtctccgttcccccgtccccatcctccatccccgtctcccatcgccgtccccccgtccccgtcccccgtccccgtcccccctgtccctgtcccccttcccccgacccctcccagatcctggggaccaataaagcccgcagcgggtctcggctggcg

SEQ ID NO: 211686 - DNA, 1581 bp, Artificial Sequence
  derived and/or modified sequence
agagtcccgcgccccgcactccatggagcagctgctgcgcgccgagctgcgcaccgcgaccctgcgggccttcggcggccccggcgccggctgcatcagcgagggccgagcctacgacacggacgcaggcccagtgttcgtcaaagtcaaccgcaggacgcaggcccggcagatgtttgagggggaggtggccagcctggaggccctcaggagcacgggcctggtgcgggtgccgaggcccatgaaggtcatcgacctgccgggaggtggggccgcctttgtgatggagcatttgaagatgaagagcttgagcagtcaagcatcaaaacttggagagcagatggcagatttgcatctttacaaccagaagctcagggagaagttgaaggaggaggagaacacagtgggccgaagaggtgagggtgctgagcctcagtatgtggacaagttcggcttccacacggtgacgtgctgcggcttcatcccgcaggagcctcttgaaccatcatctttgaaatctgtgaagttccaaagaagactttggacagcccaactgccctgtgcttctcttgaagaagccaatattggaccatattttggttttgttaggaacacagcacccattatataagagctagttcaaagtcactgcttcttgaagagagaatactttcaaatctgtctccttgtcgacgcccgtcctgactagttgggtccctgcgaacaatgaccaagctctccctggtgtgggtagagggtgattctcccagctggaggtcacctggggcaagatcctcatgaagcccaagcagatttagggttcccagccaacaggcagtcctcacatctgggctcgctagaactgcacatggagcttaccagatttaccgagacccccgagatctcagccacagctggctcccctggggtcacacacctgtccggagccagtgagcagcaccctcttcacctgtccaggtgagcacggctgggtgcagcttgtggtcctgtggtcctgctgtggatgctgaggtcaagggctgcaagtggcgggctctacaggacttggctggcccagcagagtggtgtttcaaagaaatgaagtgaaatcttacccagagcccctgtgtgtgaagcagacgagaagggggctagtctgtttggagcacagggagcccctcaatgcccctcggactccaggatcaaggaacccacctcagatcaggtgcagcctggctaggaagggtgaggcgccagggaggacacctgccctgcttcctgcttgttgtgcctcggacagcaccaggttccggaggcttcccactccttgggagggctcaatgggtcctgggggaatgtgtgctgcagccaatggggggcagtgctgagcggcgggctcctcagacacctgggcactaaggccccctggggctgccagctgggtcggctgtggtgcttgccccatgctctgtacactgccacatacaggcacccttctaagcacttcactgaactcaactcacccacttgccctagcaggtaaccaggcagataatgtcactgatccgttttatagatgag

SEQ ID NO: 211687 - DNA, 2515 bp, Artificial Sequence
  derived and/or modified sequence
ctctgggccgcccctctcagcccaccgtcctcctggcagtgggaaagaagcagagacatggctgggcccctggcagggaccccacgggccaggccagcgttctccttcccacaggccttgtctgtgtttagacctgatttctatctcctgctgaaaatagttctgtttaagaatgtatggaaggccgggcgcggtggttcacacctgtaatcccatcactttgggaggccgaggtgagtggatccctgaggtcaggagttcgagaccatcctggccaacatggtgaaaccccgtctctaccaaaaaatgcaataattagccggatgtggtgccactggcctgtaatcccagctactcgggaggccgaagcaggagaatcgtttgaacccaggaggcggaggctgccgtgagccgagatcatgccactgccctccagcctgggtgacagagtgagaccctgtctcaaaacaaacatgcaattctataggccaaggtattcatggaccacgttcgtcaatgcatgttttcaaccaatgtgtactgtacgtgaggtgagtgttcacctaactgaaaactggaatgtttgtgggaatatttcagaaacaggaaggcccaggtcccacgggaggcgttgggggccggccgggtgtgccgtgccttttaccttcccagcccctgccctggacctgaggccccgcctgatgggcccagccctcttcttccctgcctgacgtgtgtgcccaagttagctccagtgaggcctctgctgtggctgccccaccctaagaggcagcaaggaaggtgggtagcccgggggtccagctctggaccttggttcactcacacctccccacgccctcagtgctcccgggcacccacacgtggcctgtgcatcctcctgtcacagcagcctgcagaccccacacccctcacggcccaggctcagcctcagccttgcagcctctcgtctccgacggggggcccctctgcaccctgccctctgtggtggacgccagctcccagccagagccagctatcagtgaatgaaggtccttgtgactcccacgtggtagcttctgtcaagggcccagtgggcagaggccctggctgagtcaacaaggctgacaaggctgtgttctggatgcaggcccggcagatgtttgagggggaggtggccagcctggaggccctcaggagcacgggcctggtgcgggtgccgaggcccatgaaggtcatcgacctgccgggaggtggggccgcctttgtgatggagcatttgaagatgaagagcttgagcagtcaagcatcaaaacttggagagcagatggcagatttgcatctttacaaccagaagctcagggagaagttgaaggaggaggagaacacagtgggccgaagaggtgagggtgctgagcctcagtatgtggacaagttcggcttccacacggtgacgtgctgcggcttcatcccgcaggtgaatgagtggcaggatgactggccgacctttttcgcccggcaccggctccaggcgcagctggacctcattgagaaggactatgctgaccgagaggcacgagaactctggtcccggctacaggtgggcacggcagtgacttctctgggaaagagctggtcctctcatgatcccgccgcatttgtgcgggttcatctgtaaaacggagctggagcagggaacactgagtcctggagcacacatcagggaggaaggggggcaggggcgggggttcccccaaaagggagtccgaaaggagtgaggagtgaagacacacttggctcctcgtgcccctctccactgctaggtcaccaggtatttagcctcagactttcctcatgtgaaacacaggtgcttgtaaatggtggtgtttaccatgattactgttcttactatcagtaacacttgtccactccatcgtgttcctctcccatgggaagatgtgggtaccagatgatccagaatgactgatttcaaaacataactctcggccgggcacagtggttcacgcctgtaatcgcagcatttgggaggcctaggtgggcagatcacttgaggtcaggagtttgagaccagcctggccaacatggtgaaaccctgtctgtactaaaaatgcaaaaattaaccgtgcatggtggtgcatgcctgtaatcccagctactcaggaggctgaggcaggagaatcacttgaacccgggaggcggaggctgcagtgaggggagattgcaccattgcactccagcctggacgacagagtgagatcctgtatcaaaaagaaaaaaaatcaaaatataactctcaaaatgttaaaaaagaatgtgcatgtcaatccagagtgagtatacatcaaagagacttgaactcattaatgaagaaactaggctgggcacggtggctcaagcctgtaatcctagcactttgggaggccgaggtggatagattttacctgaggtcaggatttcaagaccagactggccaatatggtgaaaccccatctctact

SEQ ID NO: 211688 - DNA, 930 bp, Artificial Sequence
  derived and/or modified sequence
atggagcagctgctgcgggccgagctgcggaccgccaccctgcgggcctttggaggacctggcgccgggtgtatcagcgaaggacgggcctacgatactgatgcgggacctgtgttcgtgaaagtcaaccgtcggacccaggcccgacaaatgttcgagggcgaagtcgcatccctggaggccctccgaagcactggcctggtgcgcgttcccagacccatgaaggttatcgatttgcctggagggggagccgctttcgtgatggagcatctcaaaatgaaatcattgagtagccaggccagcaaacttggagagcaaatggccgatctgcacttgtacaaccaaaagctccgggaaaagctaaaggaggaggagaacacagtgggccggagaggtgagggagccgagccacaatacgtggacaaatttgggttccataccgtgacctgctgtgggttcattcctcaagtcaatgagtggcaggacgactggcccacgtttttcgcacgccaccgattgcaagcgcagcttgatttgattgagaaggattacgccgaccgggaagccagagaattatggtctcggctgcaggtgaagatacctgatctattttgcggactcgaaatcgtgcctgcactcttgcatggcgatctgtggagcggcaacgtcgctgaggatgatgttggcccaataatctacgaccccgccagtttctacggacattctgagtttgagcttgcaattgccctcatgttcggagggttcccacggtcatttttcacagcatatcatcgcaaaatacccaaggcgccaggcttcgatcaaaggctgcttctctatcagcttttcaattatttgaaccactggaaccattttggtcgggaataccggtcccctagcctcggcaccatgaggaggctgttgaaatag

SEQ ID NO: 211689 - DNA, 609 bp, Artificial Sequence
  derived and/or modified sequence
atggagcagctgctgcgggccgagctgcggaccgccaccctgcgggcttttggcggccccggagcaggatgcatatcagagggtcgcgcctatgacaccgacgccggacccgtgtttgttaaagttaaccggcggacacaggcccggcaaatgtttgaaggggaggtcgcgtctctagaggcactgaggagtacaggattggttagagtgccacgacccatgaaggtgatcgacctccccggagggggcgctgcctttgtgatggagcatctcaagatgaaatccctttcttcccaggcttccaagcttggagagcagatggcagatctccacctgtataaccagaagctgcgagagaaactcaaggaggaggagaacactgttggacggcgcggcgagggcgcagaaccccaatacgttgataaattcggatttcacactgtgacttgctgtgggtttattccacaagaaccgctggaacctagcagcctgaagagcgtgaagtttcaacgaaggttatggactgcccagctcccctgcgccagtttggaggaggcaaatataggaccttacttcggctttgtaaggaacacagctccaatcatctag

SEQ ID NO: 211690 - DNA, 534 bp, Artificial Sequence
  derived and/or modified sequence
atgcaggcccggcagatgttcgagggcgaggtggccagcctggaggctctgcgttccacaggactggttcgcgtgcccagacctatgaaagtgatcgacctgcccggcgggggggcagcattcgtgatggagcaccttaaaatgaaaagcctctctagtcaggcctctaagctcggcgaacaaatggccgacctacatttatacaaccagaagctaagagagaaacttaaagaggaggagaacacagtgggcaggaggggggaaggagctgaacctcagtacgtcgacaaatttggctttcacaccgtgacctgttgtgggttcattccccaagtgaacgagtggcaggacgattggcctacttttttcgccaggcaccggctgcaggcgcaactagacctgatagaaaaagactatgctgatcgggaagccagagagctttggtctagactgcaggtggggactgcagtgacctccctgggcaaaagctggtcgtcacatgatcctgcagcatttgtgagagtgcatctatag

SEQ ID NO: 211691 - DNA, 930 bp, Artificial Sequence
  derived and/or modified sequence
atggaacagcttctgagagccgagttacggacggcaacactgcgggcatttggcggacctggtgctggttgtatctctgagggccgtgcctacgataccgacgccggacctgtttttgtcaaggttaatcgtagaactcaagccaggcagatgttcgaaggcgaggtagcaagcctcgaggcactccgtagcacgggcctggtgcgggttcctagaccgatgaaggtcatcgacctgcccggaggcggagcagccttcgtgatggagcatctgaaaatgaaatccctgagttcacaggcaagcaaactgggcgagcagatggctgaccttcacctctataaccagaagctaagggagaagctcaaagaagaggagaacacagttggacggcgtggggagggcgctgaaccccagtatgtcgataaatttggttttcatacagttacgtgctgcggcttcatcccccaagtcaatgaatggcaggacgattggcctaccttcttcgccaggcaccggctccaagctcagctggatctaattgaaaaggattatgcagaccgggaggctagggagctgtggtcccgtctccaggtgaaaattccagacctgttctgtgggctggagattgtgccagccctgctgcacggcgacctgtggtccggcaatgtggctgaggacgacgttggacctattatttatgacccggctagcttttacggtcactcagaattcgaactcgcgattgctctgatgttcggcggattccctcggagcttctttaccgcttaccacaggaagatacctaaagcacccggatttgaccaacgactgctcctgtaccagctgtttaactatctgaatcactggaatcacttcgggagagaatataggagcccgtccttgggaacgatgcgcagactactcaaatag

SEQ ID NO: 211692 - DNA, 609 bp, Artificial Sequence
  derived and/or modified sequence
atggagcagctcttgcgggcagaactcaggacagctaccctccgcgctttcggcggacctggtgccggatgcatttctgaaggaagagcctacgacaccgacgcgggtcccgttttcgtgaaggtgaatcgccgtactcaggcacgtcagatgttcgagggggaggttgcaagcctggaggccctgcgtagtactggtcttgtccgggtgccaaggcccatgaaagttattgacctgcctggaggcggagctgcatttgtcatggagcacctcaagatgaagtcattgagtagccaggcctctaaactgggcgagcagatggccgatctccacctgtataatcaaaaactcagggaaaaacttaaggaggaggagaacacggtgggacgaagaggcgagggagctgagccccagtacgtggacaaattcggctttcacacagtcacgtgttgcggatttataccacaggagcccctggaaccaagttccttgaaatcagttaagttccagcgtcgtctctggactgcccagctcccatgcgcatcactggaggaggccaatattggcccatatttcgggtttgtgagaaatacggcacctatcatttag

SEQ ID NO: 211693 - DNA, 534 bp, Artificial Sequence
  derived and/or modified sequence
atgcaggctcgacagatgttcgaaggtgaagtagctagtctcgaggcgctgcggtccaccggactggtgcgggtacctaggcctatgaaggtgatagacttgcctgggggaggggctgcctttgtgatggaacatctaaaaatgaagtctctaagcagccaggcttctaaattaggcgaacaaatggctgacttgcacctgtacaaccagaaactgagagagaagctcaaggaagaagaaaatactgtggggagacgtggtgagggggctgagccccagtatgtagacaagtttggctttcacacggtgacctgctgtggattcatcccccaggtaaatgaatggcaagacgattggccgacattttttgctaggcatcgcttgcaggcccaactggatctgatcgaaaaggactacgccgatcgcgaagcccgagagctgtggtcgcgccttcaggtgggaacagcggttacaagcctcggaaagtcttggagttcccatgacccagccgcttttgtaagagtgcacctctag

SEQ ID NO: 211694 - protein, 504 aa, Artificial Sequence
  derived and/or modified sequence
MERSQCGSRDRGVSGRPHLAPGLVVAAPPPPSPALPVPSGMQVPPAFLRPPSLFLRAAAAAAAAAAATSGSGGCPPAPGLESGVGAVGCGYPRTPKCARCRNHGVVSALKGHKRFCRWRDCACAKCTLIAERQRVMAAQVALRRQQAQEESEARGLQRLLCSGLSWPPGGRASGGGGRAENPQSTGGPAAGAALGLGALRQASGSATPAFEVFQQDYPEEKQEQKESKCESCQNGQEELISKSHQLYLGSSSRSNGVIGKQSIGSSISEYSNKPDSILSPHPGEQSGGEESPRSLSSSDLESGNESEWVKDLTATKASLPTVSSRPRDPLDILTKIFPNYRRSRLEGILRFCKGDVVQAIEQVLNGKEHKPDNRNLANSEELENTAFQRASSFSLAGIGFGTLGNKSAFSPLQTTSASYGGDSSLYGVNPRVGISPLRLAYSSAGRGLSGFMSPYLTPGLVPTLPFRPALDYAFSGMIRDSSYLSSKDSITCGRLYFRPNQDNP

SEQ ID NO: 211695 - DNA, 792 bp, Artificial Sequence
  derived and/or modified sequence
gcgcccgctgtcgtaaccatggtgtggtgtcagcgctcaagggccacaagcgcttctgccgctggcgggactgcgcgtgtgccaagtgcaccctgatcgccgagcgccagcgcgtcatggccgcccaggtggcgctgcgcaggcagcaggcgcaggaggagagcgaagcccgggggctacagaggctcctgtgctcggggctctcctggccccccggtggtcgggcatccgggggcggcggcagagccgagaatccacagtccacgggcggccctgcggcgggggctgcgctgggactgggtgccttgagacaggccagtggttccgcgacccccgctttcgaagttttccagcaagattatcctgaggaaaaacaagaacaaaaagagagtaaatgtgagtcatgccagaatggacaagaagaactgatctccaaatcccatcagctttacctaggatcatcttctaggtctaatggtgtcattgggaaacaaagtatcgggtcatctatttcagaatactccaacaagcctgatagtatcctgtctcctcatcctggagagcaatcaggaggtgaagagagtcccaggtccttatcatcctctgatctggaatcaggaaatgaaagtgaatgggtcaaagacttgactgcgaccaaggcaagccttccgacagtgtcctcaagaccaagagatcctcttgatatccttactaagattttcccaaattacaggcgcagccggctagaaggcattctacggttctgcaaaggggatgtggtccaagccattg

SEQ ID NO: 211696 - DNA, 1515 bp, Artificial Sequence
  derived and/or modified sequence
atggagcgatcgcagtgtgggtcaagggatagaggggttagcggcagaccgcacctggcccctggcctggttgttgccgcacctccccccccttccccagctctgcccgtgccaagtggcatgcaagtgccacccgctttcctgaggccaccctccctcttcctgcgtgccgctgccgctgccgccgctgcggcagctgccactagtgggtctggcggttgtccgccagcccctgggctggagtcaggggttggcgccgtaggctgtggctaccctaggaccccaaagtgtgccaggtgtagaaaccacggagtggtatccgcattgaaaggccataagcgcttttgccggtggagggactgtgcctgcgctaagtgcacactgatcgctgaacggcagcgcgtgatggctgcccaggtcgctctgcgccgacagcaggcacaggaggaatcggaggcacgcgggctgcagaggttgctgtgctctgggctctcttggccccctggaggaagggcctccggcggaggtggcagagctgagaacccacagagtactggtggtccagcggctggggcggccttaggcctgggggcactgcgccaggccagcggctcagccacccctgctttcgaggtctttcaacaagactacccggaagagaagcaggaacaaaaggagtctaaatgcgagagttgtcagaatggccaagaggagttgatcagtaagtctcaccagctttatttaggaagctcatcgagatcaaatggagtgattggtaaacaatcgatcggatcaagcattagtgagtactcaaacaagcccgactcaatcttgagcccccatcccggtgaacagtccggcggtgaagaatctcctaggtctctctcaagtagtgacctcgaaagcggaaacgagtccgaatgggtcaaagaccttactgccacgaaagcctctttgcccacggtatcttcccggccacgtgaccccctagacatcctgaccaagatattcccaaactaccggcgatctaggcttgagggtatcctgcgcttctgcaagggtgacgtagtccaagcgatagaacaagtgctgaatggaaaagaacataagccagacaaccgcaacctcgctaattcagaggagttagagaacacagccttccagcgggcttcaagcttctcgctcgccgggataggctttggaacccttgggaacaaatccgccttttccccattgcagactacaagtgcaagctacggaggcgattcttccttgtacggagtaaatccaagggtcggtatctctcctctaagacttgcctattcctccgcgggaaggggtttgtccgggttcatgtccccatatctcacgcctggactcgtgccgaccttgccctttaggcctgccctcgactatgcattctcggggatgattagagactcttcttacctgagttctaaggacagcattacatgtgggagactttactttaggccaaatcaggataacccctag

SEQ ID NO: 211697 - DNA, 1515 bp, Artificial Sequence
  derived and/or modified sequence
atggagaggagccagtgtggcagccgggaccggggcgtgtctggccggccccacctggcccctggcctggtggtggccgcccctcctccacccagccctgccctgcctgtgcccagcggcatgcaggtgcccccagccttcctgcggccccccagcctcttcctgcgggctgctgctgctgctgctgctgctgctgctgccaccagcggcagcggcggctgccccccagcccctggcctggagagcggcgtgggcgctgtgggctgcggctaccccaggacccccaagtgtgcccgctgcagaaatcatggagtggtgtctgccctgaagggccacaagcgcttctgccgctggagggactgtgcctgtgccaagtgcaccctgattgctgagcggcagagggtgatggccgcccaggtggccctgcggcggcagcaggcccaggaggagagcgaggcccggggcctgcagaggctgctgtgcagcggcctgtcctggcccccaggcggccgggccagcggcggcggcggccgggcagagaacccccagagcactggaggccctgctgctggggccgccctgggcctgggcgccctgcggcaggccagcggcagcgccaccccagcctttgaggtgttccagcaggactacccagaggagaagcaggagcagaaggagagcaaatgtgagagctgccagaatggccaggaggagctgatcagcaagagccaccagctgtacctgggcagcagcagccgcagcaatggagtcatcggcaagcagagcatcggcagcagcatcagcgagtacagcaacaagccagacagcatcctgagcccccaccctggagagcagagcggcggggaggagagccccaggagcctgagcagcagtgacctggagagcggaaatgaaagtgagtgggtgaaggacctgacagccaccaaggccagcctgcccaccgtgagcagccggccccgggaccccctggacatcctgaccaagatcttccccaactacagaagaagccggctggagggcatcctgcgcttctgcaagggagatgtggtgcaggccatcgagcaggtgctgaatggcaaggagcacaagccagacaacagaaacctggccaacagcgaggagctggagaacacagccttccagagggccagcagcttcagcctggccggcatcggcttcggcaccctgggcaacaagagcgccttcagccccctgcagaccaccagcgccagctatggaggagacagcagcctgtatggagtgaacccccgggtgggcatcagccccctgcggctggcctacagcagcgctggccggggcctgagcggcttcatgagcccctacctgaccccaggcctggtgcccaccctgcccttccggcctgccctggactatgccttcagcggcatgatccgggacagcagctacctgagcagcaaggacagcatcacctgtggccgcctgtacttccggcccaaccaggacaacccctag

SEQ ID NO: 211698 - DNA, 1515 bp, Artificial Sequence
  derived and/or modified sequence
atggagcggagccagtgcggcagccgggaccggggcgtgagcggccgacctcacctggcgccaggattggtggtagctgcgccccctccaccgtcacctgctttgccagtcccatccggaatgcaggtcccccccgcattccttaggcccccatctctgtttctcagggcagcagccgccgcggcagccgcagctgcagccacttccggatcaggcggctgccccccagccccaggactggagagtggcgtcggggccgttggctgtggataccccaggaccccaaaatgtgcacgatgccgtaaccacggcgtggtcagcgctcttaaaggccacaaaagattttgcagatggagagactgtgcttgtgctaaatgtaccctgatcgccgagcgccagcgggtgatggctgctcaagtcgcactacggcgacagcaggctcaggaagaaagcgaggcccgcggcctacagcgcttgctgtgctcaggactcagttggcctcctggcggaagggcctctggaggcggcggccgggcagagaacccccagtcaactggcgggccggccgccggcgccgccctcggcctaggtgcactgcggcaagcaagcggttcggcaacaccagccttcgaagtgttccagcaggactatcccgaggaaaaacaggaacagaaagagtcaaaatgtgagagttgtcagaacggccaagaggaactgatatctaaatctcatcagttatatttagggagctccagcaggagcaatggcgtcatcggtaaacaaagcattggcagctcaatcagcgaatactccaacaagccagatagtattctctccccacatccaggggaacagagcggaggggaggagagccccagatccttgtcctctagcgaccttgaatcgggtaacgaatcagagtgggttaaagatttaactgcaactaaggcatctctacccacggtatccagccgcccacgagatccgttagacatattgacaaagatttttccgaactacaggcgcagtaggctggagggcatactgcggttttgtaaaggcgacgtggtgcaggctatcgagcaagtcttgaacggcaaggaacacaagcctgacaaccgaaatctagccaacagtgaagagctggagaatacagccttccagagagcttcgtccttcagtcttgccggcataggatttggcacacttgggaataaatcagccttcagtccattgcagacaacttctgcctcctatggaggcgactcatccctctacggcgtgaacccaagagtggggatttcccccctgcgcctggcctactcttccgcaggcagggggctttcaggattcatgtctccatatttaacacccggtctggtccccactcttccttttaggccagcactagattatgcttttagcgggatgatccgcgacagctcctatttaagtagcaaggattctataacatgtggccggctgtattttagacccaaccaggataatccgtag

SEQ ID NO: 211699 - DNA, 1515 bp, Artificial Sequence
  derived and/or modified sequence
atggagagatcacagtgtggcagccgcgaccgaggtgtatctgggcgaccgcacttagcccctgggctcgttgtggcggctccccctcccccttccccagctctgccggttcctagcggtatgcaagttccccctgccttcttacgaccaccttctctgtttctgcgagccgctgctgctgcagctgccgctgcagctgcaacttcaggctcgggcggttgtccaccagccccaggactggaatcaggggtgggggcagtgggttgcggctacccgagaacccccaaatgcgctcgatgtagaaatcacggagtggtcagcgccctgaagggccataaacgattttgccgttggagggactgcgcctgtgccaagtgcaccctgatcgcggaacgacagcgggtgatggccgctcaggtggcacttcgtaggcagcaggctcaggaggagagtgaggctagaggactgcagcgccttttgtgttccggactgagctggccacctggcggacgcgcttctggcggtggcggacgggcagaaaatccacagagtacaggagggcctgccgctggcgctgctctggggctgggtgccctacggcaggccagcggctctgccaccccagcctttgaggtctttcaacaagattatccggaggaaaagcaggagcaaaaagagagcaaatgcgagtcctgccaaaacggccaagaggaactcatatcaaagtcacatcagctgtatctcggaagtagctctcgctcaaacggcgtaatcggtaaacagtctattggtagcagtatcagcgagtattccaacaagcccgacagcatcctatctccccatccaggcgagcagtccggtggtgaggagtccccgagatccttaagctcgtctgacctggaatcaggcaacgaatcagaatgggttaaggatctaacggccaccaaggcttctttgccaacggtgtcatcgcgcccaagggacccacttgacattctgaccaaaatttttcctaactatcggaggagccggcttgaaggtatcttgcgcttttgtaagggagacgtggtgcaggccatcgagcaggtgttaaatggcaaagagcacaagcccgataataggaacttagcaaacagcgaagaactagagaacacggctttccagcgggcttcctccttcagcttggcaggaatcgggttcggcacactggggaataaatcagcgttttcccctcttcagaccacctccgcaagctacggaggggatagtagcctatatggggtaaacccacgggtgggcatatctcccctgaggctcgcctatagttctgcaggcaggggcctatctggcttcatgtcgccatacctgactcccggactggtgccaaccctaccattcagaccagctttagattatgccttctccggcatgattagggattctagctatctcagtagcaaggacagtataacctgtggacgtctgtacttccgcccaaaccaggacaatccttag

SEQ ID NO: 211700 - DNA, 2302 bp, Artificial Sequence
  derived and/or modified sequence
ctctgccaggctcacgggacagctgcacctctcagcgtctccagctccaggacgcggtcgtcccaactccttccgagtggaaagagtgtaaaacttttgtccgtgcgcgggtggagctcagtaggaccacggcgcgtcctgccccggcttccccagcctcccagcagggttagctgcggtcagcgcactttccacttgggactcccggccagaaatttctcgggaatggagcggtcacagtgtggcagcagagaccgaggcgttagcggccgacctcacttggcccctgggctagtggtggctgcccctccgcccccgtccccggcgttgccggtaccatcggggatgcaggttcccccagcgttcctgcggccgcccagcctctttctgcgagcagcggccgcggccgccgccgccgctgccgccacctcgggaagcggaggctgcccgccggctcccgggctggagagcggggtaggcgcggtgggctgcggctacccgcggacgcccaagtgcgcccgctgtcgtaaccatggtgtggtgtcagcgctcaagggccacaagcgcttctgccgctggcgggactgcgcgtgtgccaagtgcaccctgatcgccgagcgccagcgcgtcatggccgcccaggtggcgctgcgcaggcagcaggcgcaggaggagagcgaagcccgggggctacagaggctcctgtgctcggggctctcctggccccccggtggtcgggcatccgggggcggcggcagagccgagaatccacagtccacgggcggccctgcggcgggggctgcgctgggactgggtgccttgagacaggccagtggttccgcgacccccgctttcgaagttttccagcaagattatcctgaggaaaaacaagaacaaaaagagagtaaatgtgagtcatgccagaatggacaagaagaactgatctccaaatcccatcagctttacctaggatcatcttctaggtctaatggtgtcattgggaaacaaagtatcgggtcatctatttcagaatactccaacaagcctgatagtatcctgtctcctcatcctggagagcaatcaggaggtgaagagagtcccaggtccttatcatcctctgatctggaatcaggaaatgaaagtgaatgggtcaaagacttgactgcgaccaaggcaagccttccgacagtgtcctcaagaccaagagatcctcttgatatccttactaagattttcccaaattacaggcgcagccggctagaaggcattctacggttctgcaaaggggatgtggtccaagccattgaacaggttttaaatggcaaagaacacaagccagacaacaggaacctagcaaactcagaagaactggaaaacacagcctttcagagagcttcaagttttagtcttgctggaattggttttggaactctaggtaataaatcagctttctctcctcttcaaactacttctgcttcttatggaggtgattcaagtctctacggcgtaaatcctagagtaggtatcagtccattaaggctggcatattcttctgcaggaagagggttatctggttttatgtcaccctacctaacacctgggttagtaccaaccttaccttttcggccagctttggattatgccttttcagggatgattagagattcttcctacctttccagtaaagactcaataacttgtggcagactgtacttcagaccaaatcaggacaatccgtaatgtatatgcccattctctctttctggagtttttccagcatacaatacatgcacgtgcacacacatacacacacatccattaatatacttcagtaagtatgtgagtggattatgaggtcttaaaatgctgggttttttttttttcaagcaatataataggtcttagatctgaaaactcttcattaggatttatcaagtgaaagaagtaaatctgaacattatatgtgccttgaataaagctatttcaggaaatatttaatgaattttctccctaaattatcatttgtaaacatttttattttaaaactagtttttattttattgaaaagtggaatttttagtgataaaatacatttgtaagtgtaaagcaatacagcataatagaatagaatataaaccgaaaggaagaactgaacaattaaggcaattctaaataattaccatttcaaaactgtttcttctattcctggttcataggaaagaaaaaagttattcaaagtatttttaaagcatttgatttgcagatgggtgattcgtaataaataaaacatttgagcattttg

SEQ ID NO: 211701 - DNA, 1515 bp, Artificial Sequence
  derived and/or modified sequence
atggagagaagccagtgcggcagcagagacagaggcgtgagcggcagaccccacctggcccccggcctggtggtggccgccccccccccccccagccccgccctgcccgtgcccagcggcatgcaggtgccccccgccttcctgagaccccccagcctgttcctgagagccgccgccgccgccgccgccgccgccgccgccaccagcggcagcggcggctgcccccccgcccccggcctggagagcggcgtgggcgccgtgggctgcggctaccccagaacccccaagtgcgccagatgcagaaaccacggcgtggtgagcgccctgaagggccacaagagattctgcagatggagagactgcgcctgcgccaagtgcaccctgatcgccgagagacagagagtgatggccgcccaggtggccctgagaagacagcaggcccaggaggagagcgaggccagaggcctgcagagactgctgtgcagcggcctgagctggccccccggcggcagagccagcggcggcggcggcagagccgagaacccccagagcaccggcggccccgccgccggcgccgccctgggcctgggcgccctgagacaggccagcggcagcgccacccccgccttcgaggtgttccagcaggactaccccgaggagaagcaggagcagaaggagagcaagtgcgagagctgccagaacggccaggaggagctgatcagcaagagccaccagctgtacctgggcagcagcagcagaagcaacggcgtgatcggcaagcagagcatcggcagcagcatcagcgagtacagcaacaagcccgacagcatcctgagcccccaccccggcgagcagagcggcggcgaggagagccccagaagcctgagcagcagcgacctggagagcggcaacgagagcgagtgggtgaaggacctgaccgccaccaaggccagcctgcccaccgtgagcagcagacccagagaccccctggacatcctgaccaagatcttccccaactacagaagaagcagactggagggcatcctgagattctgcaagggcgacgtggtgcaggccatcgagcaggtgctgaacggcaaggagcacaagcccgacaacagaaacctggccaacagcgaggagctggagaacaccgccttccagagagccagcagcttcagcctggccggcatcggcttcggcaccctgggcaacaagagcgccttcagccccctgcagaccaccagcgccagctacggcggcgacagcagcctgtacggcgtgaaccccagagtgggcatcagccccctgagactggcctacagcagcgccggcagaggcctgagcggcttcatgagcccctacctgacccccggcctggtgcccaccctgcccttcagacccgccctggactacgccttcagcggcatgatcagagacagcagctacctgagcagcaaggacagcatcacctgcggcagactgtacttcagacccaaccaggacaacccctag

SEQ ID NO: 211702 - protein, 193 aa, Artificial Sequence
  derived and/or modified sequence
MPLPWDYPEAPWRRLHSSPPRPCPRALQGGGRRGPNPDPRGSKGLKQTVGALNPNLHLWGICSCQFLLRSKGRDFVHSVQETHSQLLGSWDPWEEPEDAAPVAPSVPASGYPELPTPRREVQSESAQEPGARDVEAQLRRLQEERTCKVCLDRAVSIVFVPCGHLVCAECAPGLQLCPICRAPVRSRVRTFLS

SEQ ID NO: 211703 - protein, 280 aa, Artificial Sequence
  derived and/or modified sequence
MGPKDSAKCLHRGPQPSHWAAGDGPTQERCGPRSLGSPVLGLDTCRAWDHVDGQILGQLRPLTEEEEEEGAGATLSRGPAFPGMGSEELRLASFYDWPLTAEVPPELLAAAGFFHTGHQDKVRCFFCYGGLQSWKRGDDPWTEHAKWFPSCQFLLRSKGRDFVHSVQETHSQLLGSWDPWEEPEDAAPVAPSVPASGYPELPTPRREVQSESAQEPGARDVEAQLRRLQEERTCKVCLDRAVSIVFVPCGHLVCAECAPGLQLCPICRAPVRSRVRTFLS

SEQ ID NO: 211704 - DNA, 582 bp, Artificial Sequence
  derived and/or modified sequence
atgcccctgccctgggactaccccgaggccccctggagaagactgcacagcagcccccccagaccctgccccagagccctgcagggcggcggcagaagaggccccaaccccgaccccagaggcagcaagggcctgaagcagaccgtgggcgccctgaaccccaacctgcacctgtggggcatctgcagctgccagttcctgctgagaagcaagggcagagacttcgtgcacagcgtgcaggagacccacagccagctgctgggcagctgggacccctgggaggagcccgaggacgccgcccccgtggcccccagcgtgcccgccagcggctaccccgagctgcccacccccagaagagaggtgcagagcgagagcgcccaggagcccggcgccagagacgtggaggcccagctgagaagactgcaggaggagagaacctgcaaggtgtgcctggacagagccgtgagcatcgtgttcgtgccctgcggccacctggtgtgcgccgagtgcgcccccggcctgcagctgtgccccatctgcagagcccccgtgagaagcagagtgagaaccttcctgagctag

SEQ ID NO: 211705 - DNA, 582 bp, Artificial Sequence
  derived and/or modified sequence
atgcctctgccatgggattatccagaggctccttggcggaggctgcactcatccccccctcggccctgtcctcgggcactccagggaggagggaggagaggtcctaacccggacccacgaggcagtaagggcctgaagcaaactgtgggagctttgaatcccaatcttcacctgtggggcatctgttcctgccagttcctgttacgctccaaggggcgggatttcgtccacagtgtccaggagacccattctcagctcctgggctcttgggacccctgggaagagcccgaggacgcggcccctgtagccccgagtgttccagcctctggctaccctgagctgccaacacctcgtagggaggtacagtcagagtccgcacaggagcctggggctcgggatgtagaagctcaactccggagactgcaggaggagaggacgtgcaaggtatgcctggatcgcgctgtgtcaatcgtcttcgtcccatgcggccatctggtgtgcgctgagtgtgctccggggctgcagttatgtcctatatgccgtgccccagtccgctcaagggtgcggacattcctatcttag

SEQ ID NO: 211706 - DNA, 582 bp, Artificial Sequence
  derived and/or modified sequence
atgcccctgccctgggactacccagaggccccctggaggcggctgcacagcagccccccccggccctgcccccgggccctgcagggcggcggccggcggggccccaacccagacccccggggcagcaagggcctgaagcagacagtgggcgccctgaaccccaacctgcacctgtggggcatctgcagctgccagttcctgctgcggagcaagggccgggactttgtgcacagcgtgcaggagacccacagccagctgctgggctcctgggacccctgggaggagccagaagatgctgcccctgtggcccccagcgtgcctgccagcggctacccagagctgcccaccccccggcgggaggtgcagagcgagagcgcccaggagcccggggccagagatgtggaggcccagctgcggcggctgcaggaggagaggacctgcaaggtgtgcctggacagagctgtgtccatcgtgtttgtgccctgtggccacctggtgtgtgctgaatgtgcccctggcctgcagctgtgccccatctgccgggcccctgtgcgcagccgggtgaggaccttcctgtcctag

SEQ ID NO: 211707 - DNA, 582 bp, Artificial Sequence
  derived and/or modified sequence
atgcccctgccctgggactaccccgaggccccctggcggcggctgcatagctcgccaccacggccctgtccaagagctcttcagggtggcgggaggcggggtcctaaccccgaccctagaggatccaaaggcctcaaacagactgtgggtgcacttaaccccaatctacacctctggggcatttgctcctgccagtttctcctgaggtctaagggccgcgatttcgtgcactcagtgcaggaaacacattcccagctgctagggagctgggatccttgggaagagccagaggatgccgcacccgtagcccccagcgttcccgcctccggctatcccgaactgcctacacctaggagagaagttcagtctgagtcagcccaagaacccggagcacgcgacgtagaggcccagctccgccgtctgcaggaggagaggacatgtaaagtttgtctggatcgcgccgttagcattgtgttcgtgccttgcggccaccttgtgtgcgccgagtgcgcgcccggcttgcaactgtgccccatttgtagggcgcctgtgagaagtcgcgtgcggacgtttctgtcgtag

SEQ ID NO: 211708 - DNA, 582 bp, Artificial Sequence
  derived and/or modified sequence
atgcccctcccgtgggattacccggaggccccttggagaaggctgcactcctcccccccacgcccttgtcccagagccctccagggcggaggaagacggggacctaaccctgatccgaggggctcgaaagggcttaagcagacagtgggtgctttgaatcccaacctgcacttgtggggcatatgctcttgccaattcctccttcgatctaaggggcgagatttcgtgcacagcgtgcaagaaacccattcccaattactgggatcatgggacccgtgggaagaaccagaagacgcagccccagtggccccatccgtccccgctagcggatacccagagttacccactcctagaagagaggtacagagcgaaagcgcccaggaacctggggcaagggatgtggaggctcagctcaggaggctccaggaagaacgaacttgtaaagtttgtctcgatcgtgctgtgtctattgttttcgtcccatgtggccatctcgtctgcgccgaatgtgctcctggcctccaactgtgtcccatctgtcgggcaccagtgagatcccgggtcagaacctttcttagctag

SEQ ID NO: 211709 - DNA, 593 bp, Artificial Sequence
  derived and/or modified sequence
gcagaaatgcctctcccatgggactaccctgaagccccatggaggcgtctccacagcagccctcctcgcccatgcccacgggcactgcagggtggcgggaggagggggcccaaccctgacccccggggatccaagggcttgaagcagacagtgggggccctgaaccccaacctacatctctggggcatctgcagctgtcagttcctgctccggtcaaaaggaagagactttgtccacagtgtgcaggagactcactcccagctgctgggctcctgggacccgtgggaagaaccggaagacgcagcccctgtggccccctccgtccctgcctctgggtaccctgagctgcccacacccaggagagaggtccagtctgaaagtgcccaggagccaggagccagggatgtggaggcgcagctgcggcggctgcaggaggagaggacgtgcaaggtgtgcctggaccgcgccgtgtccatcgtctttgtgccgtgcggccacctggtctgtgctgagtgtgcccccggcctgcagctgtgccccatctgcagagcccccgtccgcagccgcgtgcgcaccttcctgtcctaggccag

SEQ ID NO: 211710 - DNA, 843 bp, Artificial Sequence
  derived and/or modified sequence
atgggcccaaaggacagcgcaaagtgtctgcataggggcccacaaccctctcactgggccgcaggagacggacctactcaggaacgatgcgggcctcggtccctgggttctccggtgctgggtttggacacatgtagggcttgggaccacgtggacggacagattctgggacagttgcggcctctaactgaggaggaggaagaagaaggtgcaggagccactctgagcagaggccccgcgttccccgggatgggaagcgaggagctgagactagcttccttctatgactggcccctgacagcggaggtgccaccagagctcctcgctgccgccggtttctttcacactggccatcaagacaaggtcagatgcttcttctgttatggcggtctgcagtcatggaagcgaggtgatgacccctggaccgagcacgccaagtggtttccctcatgccaattccttttgcggagcaagggccgggattttgtgcactccgtgcaggaaacccattctcagctgctggggagctgggacccttgggaagagcccgaagacgcagcccctgtggctccttccgtgcccgcctccggatatcctgagctgccaacccccagacgagaggtccaatctgaaagtgcgcaggagcccggcgctagggacgttgaggcacaactgcggaggttgcaggaggagcgtacctgtaaagtgtgcctagacagagcagtctccatcgtgttcgtgccctgcggacatctcgtgtgtgctgagtgcgcccctggcctgcagctttgtccgatctgccgggcacccgtccgttctagggtgcgcacatttctttcctag

SEQ ID NO: 211711 - DNA, 843 bp, Artificial Sequence
  derived and/or modified sequence
atgggccccaaggacagcgccaagtgcctgcaccggggcccccagcccagccactgggccgctggagatggccccacccaggagcgctgtggccccaggagcctgggcagccctgtgctgggcctggacacctgccgggcctgggaccacgtggatggccagatcctgggccagctgcggcccctgacagaggaggaggaggaggagggcgctggggccaccctgagccggggccctgccttccctggcatgggcagcgaggagctgcggctggccagcttctatgactggcccctgacagctgaggtgcccccagagctgctggccgctgctggcttcttccacacaggccaccaggacaaggtgcgctgcttcttctgctacggcggcctgcagagctggaagagaggagatgacccctggacagagcacgccaagtggttccccagctgccagttcctgctgcggagcaagggccgggactttgtgcacagcgtgcaggagacccacagccagctgctgggctcctgggacccctgggaggagccagaagatgctgcccctgtggcccccagcgtgcctgccagcggctacccagagctgcccaccccaagaagagaggtgcagagcgagagcgcccaggagcccggggccagagatgtggaggcccagctgcggcggctgcaggaggagaggacctgcaaggtgtgcctggacagagctgtgtccatcgtgtttgtgccctgtggccacctggtgtgtgccgagtgtgcccctggcctgcagctgtgccccatctgccgggcccctgtgcgcagccgggtgaggaccttcctgtcctag

SEQ ID NO: 211712 - DNA, 843 bp, Artificial Sequence
  derived and/or modified sequence
atgggccccaaggacagcgccaagtgcctgcaccggggcccccagccttcccactgggcagcgggtgatggaccgactcaggaacggtgtggcccacggagcttgggtagccctgtgttgggtctcgacacctgtcgggcctgggatcatgtggatggccagatcttgggacagctgcgaccactaactgaagaagaggaagaagaaggcgccggcgcgactctatcccgtggaccggcttttcctggcatgggctctgaagagctgagactggcctcgttttacgactggccactaactgctgaagttccacctgagttgctagccgccgcaggattttttcacaccggacaccaggacaaggtccgttgctttttctgctacggcggcctgcagtcatggaagaggggtgacgatccttggacggagcacgcaaagtggttccctagttgtcagttcctcctacgcagcaagggccgtgacttcgtgcattccgttcaagaaacccactcccagttgctcgggtcttgggatccgtgggaagaacccgaagacgccgcacctgtggcgccctcagtgccagccagtggctatccagagctgcccactccgagaagagaggtgcagtccgagtccgcccaggaacctggagcccgcgacgtggaggcacagttacggaggctacaggaagaaaggacgtgcaaggtctgcctggaccgagctgtctccattgtttttgtgccctgcggacatttagtgtgcgcagaatgtgcgcctgggctccaactgtgccctatttgtcgcgcaccagtgcggtctcgcgtgagaacctttctatcctag

SEQ ID NO: 211713 - DNA, 843 bp, Artificial Sequence
  derived and/or modified sequence
atgggccctaaagacagcgccaagtgccttcatcggggtccccagccctcacactgggctgcaggtgacggcccaactcaggagcgctgtggcccaaggagcctgggtagccccgtgctgggcttagatacttgtagggcctgggatcatgtcgatggacagatcttgggccagttgcggccactaacagaggaggaagaggaagagggcgcaggcgcaacactgtcccgcggtccagccttcccagggatgggctcagaggagttaaggctcgcctcgttttacgactggcccctgaccgcggaggtcccgcctgaactgttggccgctgctggattcttccatactgggcaccaagataaggtgagatgttttttttgttacggtggcttacagtcgtggaagaggggggacgacccctggacagagcatgcaaagtggtttcccagctgtcagtttctgctccgctccaaaggcagagatttcgttcattctgtgcaggagacacattcacagcttttggggtcctgggacccttgggaagagcctgaagatgccgctcccgtggccccttccgtgcctgcctctggttatcccgaactaccaactccacgcagggaggtacagagcgagagcgcacaggagccgggtgcacgtgacgttgaagcccagcttaggcggctgcaggaggagcgtacctgtaaggtgtgcctggaccgggctgtgtccatcgtttttgttccatgtggccaccttgtgtgcgccgagtgcgcgccaggtctgcagctctgtcctatatgccgtgccccagtaagatcccgcgtccgtacattcctgtcttag

SEQ ID NO: 211714 - DNA, 1302 bp, Artificial Sequence
  derived and/or modified sequence
gaccccagaggccaccctggccacttccagaaagctgtgggccctgggatactcccctcccagggtgtctggtggcaggcctgtgcctatccctgctgtccccagggtgggccccgggggtcaggagctccagaagggccagctgggcatattctgagattggccatcagcccccatttctgctgcaaacctggtcagagccagtgttccctccatgggacctaaagacagtgccaagtgcctgcaccgtggaccacagccgagccactgggcagccggtgatggtcccacgcaggagcgctgtggaccccgctctctgggcagccctgtcctaggcctggacacctgcagagcctgggaccacgtggatgggcagatcctgggccagctgcggcccctgacagaggaggaagaggaggagggcgccggggccaccttgtccagggggcctgccttccccggcatgggctctgaggagttgcgtctggcctccttctatgactggccgctgactgctgaggtgccacccgagctgctggctgctgccggcttcttccacacaggccatcaggacaaggtgaggtgcttcttctgctatgggggcctgcagagctggaagcgcggggacgacccctggacggagcatgccaagtggttccccagctgtcagttcctgctccggtcaaaaggaagagactttgtccacagtgtgcaggagactcactcccagctgctgggctcctgggacccgtgggaagaaccggaagacgcagcccctgtggccccctccgtccctgcctctgggtaccctgagctgcccacacccaggagagaggtccagtctgaaagtgcccaggagccaggagccagggatgtggaggcgcagctgcggcggctgcaggaggagaggacgtgcaaggtgtgcctggaccgcgccgtgtccatcgtctttgtgccgtgcggccacctggtctgtgctgagtgtgcccccggcctgcagctgtgccccatctgcagagcccccgtccgcagccgcgtgcgcaccttcctgtcctaggccaggtgccatggccggccaggtgggctgcagagtgggctccctgcccctctctgcctgttctggactgtgttctgggcctgctgaggatggcagagctggtgtccatccagcactgaccagccctgattccccgaccaccgcccagggtggagaaggaggcccttgcttggcgtgggggatggcttaactgtacctgtttggatgcttctgaatagaaataaagtgggttttccctggaggta

SEQ ID NO: 211715 - DNA, 843 bp, Artificial Sequence
  derived and/or modified sequence
atgggccccaaggacagcgccaagtgcctgcacagaggcccccagcccagccactgggccgccggcgacggccccacccaggagagatgcggccccagaagcctgggcagccccgtgctgggcctggacacctgcagagcctgggaccacgtggacggccagatcctgggccagctgagacccctgaccgaggaggaggaggaggagggcgccggcgccaccctgagcagaggccccgccttccccggcatgggcagcgaggagctgagactggccagcttctacgactggcccctgaccgccgaggtgccccccgagctgctggccgccgccggcttcttccacaccggccaccaggacaaggtgagatgcttcttctgctacggcggcctgcagagctggaagagaggcgacgacccctggaccgagcacgccaagtggttccccagctgccagttcctgctgagaagcaagggcagagacttcgtgcacagcgtgcaggagacccacagccagctgctgggcagctgggacccctgggaggagcccgaggacgccgcccccgtggcccccagcgtgcccgccagcggctaccccgagctgcccacccccagaagagaggtgcagagcgagagcgcccaggagcccggcgccagagacgtggaggcccagctgagaagactgcaggaggagagaacctgcaaggtgtgcctggacagagccgtgagcatcgtgttcgtgccctgcggccacctggtgtgcgccgagtgcgcccccggcctgcagctgtgccccatctgcagagcccccgtgagaagcagagtgagaaccttcctgagctag

SEQ ID NO: 211716 - protein, 1013 aa, Artificial Sequence
  derived and/or modified sequence
MCSQEAFQAQRSQLVELLVSGSLEGFESVLDWLLSWEVLSWEDYEGFHLLGQPLSHLARRLLDTVWNKGTWACQKLIAAAQEAQADSQSPKLHGCWDPHSLHPARDLQSHRPAIVRRLHSHVENMLDLAWERGFVSQYECDEIRLPIFTPSQRARRLLDLATVKANGLAAFLLQHVQELPVPLALPLEAATCKKYMAKLRTTVSAQSRFLSTYDGAETLCLEDIYTENVLEVWADVGMAGPPQKSPATLGLEELFSTPGHLNDDADTVLVVGEAGSGKSTLLQRLHLLWAAGQDFQEFLFVFPFSCRQLQCMAKPLSVRTLLFEHCCWPDVGQEDIFQLLLDHPDRVLLTFDGFDEFKFRFTDRERHCSPTDPTSVQTLLFNLLQGNLLKNARKVVTSRPAAVSAFLRKYIRTEFNLKGFSEQGIELYLRKRHHEPGVADRLIRLLQETSALHGLCHLPVFSWMVSKCHQELLLQEGGSPKTTTDMYLLILQHFLLHATPPDSASQGLGPSLLRGRLPTLLHLGRLALWGLGMCCYVFSAQQLQAAQVSPDDISLGFLVRAKGVVPGSTAPLEFLHITFQCFFAAFYLALSADVPPALLRHLFNCGRPGNSPMARLLPTMCIQASEGKDSSVAALLQKAEPHNLQITAAFLAGLLSREHWGLLAECQTSEKALLRRQACARWCLARSLRKHFHSIPPAAPGEAKSVHAMPGFIWLIRSLYEMQEERLARKAARGLNVGHLKLTFCSVGPTECAALAFVLQHLRRPVALQLDYNSVGDIGVEQLLPCLGVCKALYLRDNNISDRGICKLIECALHCEQLQKLALFNNKLTDGCAHSMAKLLACRQNFLALRLGNNYITAAGAQVLAEGLRGNTSLQFLGFWGNRVGDEGAQALAEALGDHQSLRWLSLVGNNIGSVGAQALALMLAKNVMLEELCLEENHLQDEGVCSLAEGLKKNSSLKILKLSNNCITYLGAEALLQALERNDTILEVWLRGNTFSLEEVDKLGCRDTRLLL

SEQ ID NO: 211717 - protein, 146 aa, Artificial Sequence
  derived and/or modified sequence
MCSQEAFQAQRSQLVELLVSGSLEGFESVLDWLLSWEVLSWEDYEGFHLLGQPLSHLARRLLDTVWNKGTWACQKLIAAAQEAQADSQSPKLHGCWDPHSLHPARDLQSHRPAIVRRLHSHVENMLDLAWERGFVSQYECDEIRLP

SEQ ID NO: 211718 - protein, 1040 aa, Artificial Sequence
  derived and/or modified sequence
MGEEGGSASHDEEERASVLLGHSPGCEMCSQEAFQAQRSQLVELLVSGSLEGFESVLDWLLSWEVLSWEDYEGFHLLGQPLSHLARRLLDTVWNKGTWACQKLIAAAQEAQADSQSPKLHGCWDPHSLHPARDLQSHRPAIVRRLHSHVENMLDLAWERGFVSQYECDEIRLPIFTPSQRARRLLDLATVKANGLAAFLLQHVQELPVPLALPLEAATCKKYMAKLRTTVSAQSRFLSTYDGAETLCLEDIYTENVLEVWADVGMAGPPQKSPATLGLEELFSTPGHLNDDADTVLVVGEAGSGKSTLLQRLHLLWAAGQDFQEFLFVFPFSCRQLQCMAKPLSVRTLLFEHCCWPDVGQEDIFQLLLDHPDRVLLTFDGFDEFKFRFTDRERHCSPTDPTSVQTLLFNLLQGNLLKNARKVVTSRPAAVSAFLRKYIRTEFNLKGFSEQGIELYLRKRHHEPGVADRLIRLLQETSALHGLCHLPVFSWMVSKCHQELLLQEGGSPKTTTDMYLLILQHFLLHATPPDSASQGLGPSLLRGRLPTLLHLGRLALWGLGMCCYVFSAQQLQAAQVSPDDISLGFLVRAKGVVPGSTAPLEFLHITFQCFFAAFYLALSADVPPALLRHLFNCGRPGNSPMARLLPTMCIQASEGKDSSVAALLQKAEPHNLQITAAFLAGLLSREHWGLLAECQTSEKALLRRQACARWCLARSLRKHFHSIPPAAPGEAKSVHAMPGFIWLIRSLYEMQEERLARKAARGLNVGHLKLTFCSVGPTECAALAFVLQHLRRPVALQLDYNSVGDIGVEQLLPCLGVCKALYLRDNNISDRGICKLIECALHCEQLQKLALFNNKLTDGCAHSMAKLLACRQNFLALRLGNNYITAAGAQVLAEGLRGNTSLQFLGFWGNRVGDEGAQALAEALGDHQSLRWLSLVGNNIGSVGAQALALMLAKNVMLEELCLEENHLQDEGVCSLAEGLKKNSSLKILKLSNNCITYLGAEALLQALERNDTILEVWLRGNTFSLEEVDKLGCRDTRLLL

SEQ ID NO: 211719 - DNA, 3042 bp, Artificial Sequence
  derived and/or modified sequence
atgtgcagccaggaggccttccaggcccagagaagccagctggtggagctgctggtgagcggcagcctggagggcttcgagagcgtgctggactggctgctgagctgggaggtgctgagctgggaggactacgagggcttccacctgctgggccagcccctgagccacctggccagaagactgctggacaccgtgtggaacaagggcacctgggcctgccagaagctgatcgccgccgcccaggaggcccaggccgacagccagagccccaagctgcacggctgctgggacccccacagcctgcaccccgccagagacctgcagagccacagacccgccatcgtgagaagactgcacagccacgtggagaacatgctggacctggcctgggagagaggcttcgtgagccagtacgagtgcgacgagatcagactgcccatcttcacccccagccagagagccagaagactgctggacctggccaccgtgaaggccaacggcctggccgccttcctgctgcagcacgtgcaggagctgcccgtgcccctggccctgcccctggaggccgccacctgcaagaagtacatggccaagctgagaaccaccgtgagcgcccagagcagattcctgagcacctacgacggcgccgagaccctgtgcctggaggacatctacaccgagaacgtgctggaggtgtgggccgacgtgggcatggccggccccccccagaagagccccgccaccctgggcctggaggagctgttcagcacccccggccacctgaacgacgacgccgacaccgtgctggtggtgggcgaggccggcagcggcaagagcaccctgctgcagagactgcacctgctgtgggccgccggccaggacttccaggagttcctgttcgtgttccccttcagctgcagacagctgcagtgcatggccaagcccctgagcgtgagaaccctgctgttcgagcactgctgctggcccgacgtgggccaggaggacatcttccagctgctgctggaccaccccgacagagtgctgctgaccttcgacggcttcgacgagttcaagttcagattcaccgacagagagagacactgcagccccaccgaccccaccagcgtgcagaccctgctgttcaacctgctgcagggcaacctgctgaagaacgccagaaaggtggtgaccagcagacccgccgccgtgagcgccttcctgagaaagtacatcagaaccgagttcaacctgaagggcttcagcgagcagggcatcgagctgtacctgagaaagagacaccacgagcccggcgtggccgacagactgatcagactgctgcaggagaccagcgccctgcacggcctgtgccacctgcccgtgttcagctggatggtgagcaagtgccaccaggagctgctgctgcaggagggcggcagccccaagaccaccaccgacatgtacctgctgatcctgcagcacttcctgctgcacgccaccccccccgacagcgccagccagggcctgggccccagcctgctgagaggcagactgcccaccctgctgcacctgggcagactggccctgtggggcctgggcatgtgctgctacgtgttcagcgcccagcagctgcaggccgcccaggtgagccccgacgacatcagcctgggcttcctggtgagagccaagggcgtggtgcccggcagcaccgcccccctggagttcctgcacatcaccttccagtgcttcttcgccgccttctacctggccctgagcgccgacgtgccccccgccctgctgagacacctgttcaactgcggcagacccggcaacagccccatggccagactgctgcccaccatgtgcatccaggccagcgagggcaaggacagcagcgtggccgccctgctgcagaaggccgagccccacaacctgcagatcaccgccgccttcctggccggcctgctgagcagagagcactggggcctgctggccgagtgccagaccagcgagaaggccctgctgagaagacaggcctgcgccagatggtgcctggccagaagcctgagaaagcacttccacagcatcccccccgccgcccccggcgaggccaagagcgtgcacgccatgcccggcttcatctggctgatcagaagcctgtacgagatgcaggaggagagactggccagaaaggccgccagaggcctgaacgtgggccacctgaagctgaccttctgcagcgtgggccccaccgagtgcgccgccctggccttcgtgctgcagcacctgagaagacccgtggccctgcagctggactacaacagcgtgggcgacatcggcgtggagcagctgctgccctgcctgggcgtgtgcaaggccctgtacctgagagacaacaacatcagcgacagaggcatctgcaagctgatcgagtgcgccctgcactgcgagcagctgcagaagctggccctgttcaacaacaagctgaccgacggctgcgcccacagcatggccaagctgctggcctgcagacagaacttcctggccctgagactgggcaacaactacatcaccgccgccggcgcccaggtgctggccgagggcctgagaggcaacaccagcctgcagttcctgggcttctggggcaacagagtgggcgacgagggcgcccaggccctggccgaggccctgggcgaccaccagagcctgagatggctgagcctggtgggcaacaacatcggcagcgtgggcgcccaggccctggccctgatgctggccaagaacgtgatgctggaggagctgtgcctggaggagaaccacctgcaggacgagggcgtgtgcagcctggccgagggcctgaagaagaacagcagcctgaagatcctgaagctgagcaacaactgcatcacctacctgggcgccgaggccctgctgcaggccctggagagaaacgacaccatcctggaggtgtggctgagaggcaacaccttcagcctggaggaggtggacaagctgggctgcagagacaccagactgctgctgtag

SEQ ID NO: 211720 - DNA, 3042 bp, Artificial Sequence
  derived and/or modified sequence
atgtgttcacaggaagctttccaagctcaacgctcacagctggtggagctactagtgtcagggagtctggagggttttgaatctgtcctggattggctgctcagttgggaagttttgtcttgggaagattacgagggctttcacctgcttggccagccgttgtcacacctggcccgacgcctgctggatactgtgtggaacaaggggacgtgggcctgtcagaagctgatcgcagctgctcaggaggctcaggcggactctcagtcacctaaactacacggatgttgggatccacattctctgcacccggcccgcgatctgcagtcacatagacctgctattgtgcgcaggttgcatagccacgtggagaacatgttagatttggcctgggaaaggggtttcgtctcccaatacgagtgcgatgaaatacggttacccatctttacaccgtcccagcgcgcgcggcgcctactggacctggcaactgtgaaagcaaatggcctcgctgccttcctgctgcagcatgttcaggaattgccagtccccctggcactgccattggaggcagctacctgtaagaaatatatggcgaaattgcgaaccactgtgagcgcccagtctcgattcctctccacatatgatggagctgaaacattatgcctcgaagacatttacactgagaacgttctggaagtgtgggctgacgtgggtatggcaggaccacctcagaagagcccagccactctgggtctggaggaactgttcagcacaccaggccacctgaacgacgacgcagacaccgtgctggtggtcggtgaagccggctctggcaaaagcactcttcttcagcgcctgcacttgctctgggctgccggtcaagatttccaggagtttctgttcgttttcccattttcttgcagacagctgcaatgtatggcaaagccactgtcagtccggacacttctttttgagcactgctgctggccggacgtgggccaagaagatattttccagctgctcctggatcatcccgaccgggttcttctaacctttgacggcttcgacgagttcaaatttcgcttcaccgatcgagagcgccactgcagcccaacagatcccacgtccgttcagaccctcctctttaatttgttgcagggaaacctgctgaaaaatgcccgcaaggtcgtgacttcccgacccgcagctgtctccgccttcttgagaaagtatattaggacagagtttaacttgaagggcttttccgagcaagggatagagctgtaccttcgtaaaaggcaccacgagccaggcgttgccgaccggttgattagattgctccaggaaacttccgccctccacggcctgtgtcacttaccggtgttttcatggatggtgtctaaatgtcaccaggagcttctgttacaggagggcggttctcctaaaactacaaccgatatgtacctgctcatcctccagcactttctgctgcacgccacaccccctgattctgcatcacaaggccttggcccatcgctgctccgcgggcgcctgcccactttgctccatttggggcgcctagccctgtggggcctgggaatgtgttgctacgttttctccgcacagcagttacaagccgcccaggttagcccagacgacattagcctggggtttctcgtacgtgctaaaggagttgtgcccggatccacagccccccttgaattcttacatatcacattccagtgcttcttcgcagccttttatctagctctgtccgcagatgttccaccagctctgctccgtcacctttttaattgtggaagacctgggaactctccgatggctcgccttctaccaacaatgtgcatccaagcgagcgagggcaaggatagctccgtggccgctctattacagaaagccgagccgcacaatctccagatcaccgccgccttcttggccggcctcttaagccgagagcattggggcctgttggccgaatgtcaaacgtcagagaaagcgctgctgcggagacaggcttgtgctaggtggtgcctggccaggagtctgagaaaacatttccattcaatcccccctgcagccccgggagaggcgaaatccgtccacgccatgcccggcttcatctggctcattcggtctttatatgagatgcaggaagaacgactggcccgcaaggcagctaggggtctgaacgtggggcacctcaagttgacattctgttccgtgggtcccaccgagtgcgctgctctcgctttcgtgttgcagcatctacggcggcccgtggcactacagctggactataacagcgtgggagacattggcgttgaacagcttctgccctgcctgggtgtgtgcaaggcgctttatttgcgagataacaatatctccgatcgcggcatatgcaaactgattgaatgcgccctccactgcgagcagcttcaaaagttggcccttttcaacaacaagctaaccgatggctgcgcccattctatggcaaagctcctggcttgtcgccaaaattttttggctctgaggctggggaataactatatcactgcagccggggctcaagtgctggccgaaggtctccgcggtaacacttcgctacagttcctgggtttctgggggaacagagtcggcgatgaaggggcccaagcattagccgaagccctcggggaccatcagtccctcaggtggcttagtctagtcggaaacaacatcgggagcgtcggcgcacaggcccttgccctcatgttggcaaagaatgtgatgctagaagagctctgcctagaggagaaccacctacaggacgagggcgtgtgttctcttgcggaaggactaaaaaagaacagctctttgaagatcttgaagcttagtaataactgcatcacctatttaggggcagaggccctgcttcaggcattggagcggaacgatacaattctcgaagtgtggttacgagggaatacctttagtcttgaggaagtggacaagctgggctgtagggacacccgcctgctcctgtag

SEQ ID NO: 211721 - DNA, 3042 bp, Artificial Sequence
  derived and/or modified sequence
atgtgcagccaggaggccttccaggcccagaggagccagctggtggagctgctggtgtctggcagcctggagggctttgagagcgtgctggactggctgctgtcctgggaggtgctgtcctgggaggactatgagggcttccacctgctgggccagcccctgagccacctggcccggcggctgctggacacagtgtggaacaagggcacctgggcctgccagaagctgattgctgctgcccaggaggcccaggccgacagccagagccccaagctgcacggctgctgggacccccacagcctgcacccagcccgggacctgcagagccacaggcctgccatcgtgcggcggctgcacagccacgtggagaacatgctggacctggcctgggagcggggctttgtgtcccagtatgaatgtgatgagatccggctgcccatcttcacccccagccagagggcccggcggctgctggacctggccaccgtgaaggccaacggcctggccgccttcctgctgcagcacgtgcaggagctgcctgtgcccctggccctgcccctggaggccgccacctgcaagaagtacatggccaagctgcggaccaccgtgtctgcccagagccgcttcctgagcacctatgatggagctgagaccctgtgcctggaggacatctacacagaaaatgtgctggaggtgtgggcagatgtgggcatggccggccccccccagaagagccctgccaccctgggcctggaggagctgttcagcaccccaggccacctgaatgatgatgctgacacagtgctggtggtgggggaggccggcagcggcaagagcaccctgctgcagaggctgcacctgctgtgggccgccggccaggacttccaggagttcctgtttgtgttccccttcagctgccggcagctgcagtgcatggccaagcccctgtctgtgaggaccctgctgtttgagcactgctgctggccagatgtgggccaggaggacatcttccagctgctgctggaccacccagacagagtgctgctgacctttgatggctttgatgagttcaagttccgcttcacagaccgggagcggcactgcagccccacagaccccacctctgtgcagaccctgctcttcaacctgctgcagggcaacctgctgaagaatgccaggaaggtggtgaccagcaggcctgctgctgtgtctgccttcctgaggaagtacatcagaacagagttcaacctgaagggcttcagcgagcagggcatcgagctgtacctgaggaagaggcaccacgagcccggggtggccgacaggctcatccggctgctgcaggagaccagcgccctgcacggcctgtgccacctgcctgtgttctcctggatggtgtccaagtgccaccaggagctgctgctgcaggagggcggcagccccaagaccaccacagacatgtacctgctgatcctgcagcacttcctgctgcacgccaccccaccagattctgccagccagggcctgggccccagcctgctgcggggccgcctgcccaccctgctgcacctgggccgcctggccctgtggggcctgggcatgtgctgctacgtgttttctgcccagcagctgcaggccgcccaggtgtccccagatgacatcagcctgggcttcctggtgcgggccaagggcgtggtgcccggcagcacagcccccctggagttcctgcacatcaccttccagtgcttctttgctgccttctacctggccctgtctgcagatgtgcccccagccctgctgcggcacctgttcaactgtggccggcccggcaacagccccatggcccggctgctgcccaccatgtgcatccaggccagcgagggcaaggacagctctgtggccgccctgctgcagaaggccgagccccacaacctgcagatcacagctgccttcctggccggcctgctgagccgggagcactggggcctgctggccgagtgccagaccagcgagaaggccctgctgcggcggcaggcctgtgcccgctggtgcctggcccggagcctgaggaagcacttccacagcatccccccagctgcccctggagaggccaagtctgtgcacgccatgcctggcttcatctggctgatccgcagcctgtatgagatgcaggaggagcggctggccaggaaggccgcccggggcctgaatgtgggccacctgaagctgaccttctgcagcgtgggccccacagaatgtgccgccctggcctttgtgctgcagcacctgcggcggcctgtggccctgcagctggactacaacagcgtgggggacatcggcgtggagcagctgctgccctgcctgggcgtgtgcaaggccctgtacctgcgggacaacaacatcagtgaccggggcatctgcaagctgattgaatgtgccctgcactgtgagcagctgcagaagctggccctcttcaacaacaagctgacagatggctgtgcccacagcatggccaagctgctggcctgccggcagaacttcctggccctgcggctgggcaacaactacatcacagctgctggggcccaggtgctggccgagggcctgcggggcaacaccagcctgcagttcctgggcttctggggcaacagagtgggagatgagggcgcccaggccctggccgaggccctgggggaccaccagagcctgcgctggctgagcctggtgggcaacaacatcggctctgtgggcgcccaggccctggccctgatgctggccaagaatgtgatgctggaggagctgtgcctggaggagaaccacctgcaggatgagggcgtgtgcagcctggccgagggcctgaagaagaacagcagcctgaagatcctgaagctgagcaacaactgcatcacctacctgggcgctgaggccctgctgcaggccctggagagaaatgacaccatcctggaggtgtggctgcggggcaacaccttcagcctggaggaggtggacaagctgggctgccgggacacccggctgctgctgtag

SEQ ID NO: 211722 - DNA, 3042 bp, Artificial Sequence
  derived and/or modified sequence
atgtgcagccaggaggccttccaggcccagcggagccagctggtggaacttttagtttcggggagtttggaaggcttcgagagcgtactcgattggcttctgtcctgggaggtactgtcttgggaggactacgagggttttcacctgctgggccaaccactgagtcatctcgcccgcaggctcctggatacggtttggaacaaggggacatgggcctgccagaagctaattgccgccgcccaagaggcccaggctgatagtcagagccctaagctacatggctgctgggaccctcactcactgcaccccgcccgcgatctgcagtcacatcgccccgccatagtgaggaggctacattcgcacgtagagaacatgctggacctagcgtgggaacgaggctttgtgagtcagtatgaatgcgacgagattcgactgccgatattcacccctagtcagcgggctcgccgcctgctcgacctggccactgtaaaagccaacggactggccgcctttcttctgcaacatgtacaagagttgccagttccacttgcccttccactagaggcagccacttgtaagaagtatatggcgaaactgcgaacaaccgtctcagcccagtcacgttttctgtccacctacgacggagccgaaactctgtgtctagaggatatctatacagagaacgttcttgaggtgtgggccgatgtgggaatggccggccccccccagaagtccccggcgactcttggcctggaggagcttttcagtactcccggccatttgaacgacgacgctgatacggtgctcgtagttggcgaagccggcagtgggaaaagtaccctgcttcagaggctccatttactatgggcagctgggcaagactttcaggagtttctttttgtgttccccttctcatgccggcaattgcagtgtatggctaaaccactgagcgtgagaaccctgttgtttgagcactgttgctggcctgatgtggggcaagaggatattttccaattgctactagaccatcccgacagagtgctcctgacgttcgacggcttcgacgaatttaaattcagattcacggatcgagagagacattgcagccccaccgatccaactagcgtgcagaccctactcttcaacctgctccaggggaacttactgaaaaatgctcgaaaagttgtgaccagtcgccccgctgctgtgagcgcatttttgcggaagtatatcagaacggagttcaacctcaaggggtttagcgaacaggggatcgagctatatcttaggaagagacatcacgagccaggcgtggccgacaggctcatacgcctgctgcaagaaacgagcgctctccacggtttgtgtcacctgcccgtattcagctggatggtttcaaagtgtcaccaggaactgttactgcaggaaggcgggtcccctaaaacaacaacagatatgtatctgctgattcttcagcatttcctgttgcatgccaccccacctgatagcgcatcacagggcctagggccaagcttgctgagagggcggttgccgactctgctgcacctgggccgcctcgccctgtggggactgggcatgtgctgctatgtgttttctgcacagcaattacaggcagcccaggtatccccagacgatatctcgttagggtttctcgtgcgagccaagggtgtggtgcccggctccacagctccattggagtttctgcacataacatttcaatgcttctttgccgcgttttacctcgccttgtctgcggacgtgcctcctgctctcctgaggcacctgtttaactgtggaagacccggaaattcccctatggctaggctactgcccaccatgtgtatccaggctagtgaggggaaggactcctcagtcgccgccttgctccagaaggcagagcctcacaacttgcagatcacagctgcattcctcgcaggcctgttgtcccgggaacattggggcctgcttgcggaatgtcagacaagcgagaaggcattgctgcgcaggcaggcttgtgcccgctggtgcctggccaggagcctgcgcaagcactttcacagtatccctcccgctgcaccaggggaagcgaagtccgttcatgctatgcctggcttcatatggctgatccgatcactgtacgagatgcaggaggaacggctcgccagaaaagccgctcgaggtctgaatgttggccacttaaaattgacattctgcagcgtagggcctacagaatgcgccgccctcgctttcgtcctgcaacacttgagacgtccagtagcccttcaacttgactacaactctgttggggatataggggtggagcagctgctcccatgtctcggagtgtgcaaggccctttatctccgggacaacaatatctccgatagaggaatttgcaagttgatagagtgtgccctgcactgcgaacagctgcagaagcttgcattgtttaacaacaaactaaccgacggctgcgcccacagtatggccaaactgctggcctgccgacaaaactttctggctctcaggctgggcaataattacatcaccgccgccggcgcgcaggtgcttgcagaggggttacggggtaatacctcattgcagttcctggggttttgggggaacagagtaggcgatgagggagcccaggccttggcggaggcccttggggatcaccaaagtctgagatggttgtcccttgtgggtaacaatattggcagcgttggggcccaggccttagcgctaatgctcgctaaaaacgtgatgttagaagaactgtgcctcgaggaaaatcatctccaagacgagggcgtctgttcactggctgaaggactaaaaaaaaatagctctttaaaaattctaaaattgagtaacaattgtatcacttaccttggtgccgaagccttactgcaggccctggagagaaatgacaccatcctagaagtatggctgcgcgggaatacttttagcctggaggaggtcgataaactcggctgccgagacacacgtctgctcctctag

SEQ ID NO: 211723 - DNA, 3110 bp, Artificial Sequence
  derived and/or modified sequence
gccggagccgggagtcgtggcccggagtgggccttggagtcggcgcgcaggcggctcgcggttgtgaaatgtgctcgcaggaggcttttcaggcacagaggagccagctggtcgagctgctggtctcagggtccctggaaggcttcgagagtgtcctggactggctgctgtcctgggaggtcctctcctgggaggactacgagggcttccacctcctgggccagcctctctcccacttggccaggcgccttctggacaccgtctggaataagggtacttgggcctgtcagaagctcatcgcggctgcccaagaagcccaggccgacagccagtcccccaagctgcatggctgctgggacccccactcgctccacccagcccgagacctgcagagtcaccggccagccattgtcaggaggctccacagccatgtggagaacatgctggacctggcatgggagcggggtttcgtcagccagtatgaatgtgatgaaatcaggttgccgatcttcacaccgtcccagagggcaagaaggctgcttgatcttgccacggtgaaagcgaatggattggctgccttccttctacaacatgttcaggaattaccagtcccattggccctgcctttggaagctgccacatgcaagaagtatatggccaagctgaggaccacggtgtctgctcagtctcgcttcctcagtacctatgatggagcagagacgctctgcctggaggacatatacacagagaatgtcctggaggtctgggcagatgtgggcatggctggacccccgcagaagagcccagccaccctgggcctggaggagctcttcagcacccctggccacctcaatgacgatgcggacactgtgctggtggtgggtgaggcgggcagtggcaagagcacgctcctgcagcggctgcacttgctgtgggctgcagggcaagacttccaggaatttctctttgtcttcccattcagctgccggcagctgcagtgcatggccaaaccactctctgtgcggactctactctttgagcactgctgttggcctgatgttggtcaagaagacatcttccagttactccttgaccaccctgaccgtgtcctgttaacctttgatggctttgacgagttcaagttcaggttcacggatcgtgaacgccactgctccccgaccgaccccacctctgtccagaccctgctcttcaaccttctgcagggcaacctgctgaagaatgcccgcaaggtggtgaccagccgtccggccgctgtgtcggcgttcctcaggaagtacatccgcaccgagttcaacctcaagggcttctctgaacagggcatcgagctgtacctgaggaagcgccatcatgagcccggggtggcggaccgcctcatccgcctgctccaagagacctcagccctgcacggtttgtgccacctgcctgtcttctcatggatggtgtccaaatgccaccaggaactgttgctgcaggagggggggtccccaaagaccactacagatatgtacctgctgattctgcagcattttctgctgcatgccacccccccagactcagcttcccaaggtctgggacccagtcttcttcggggccgcctccccaccctcctgcacctgggcagactggctctgtggggcctgggcatgtgctgctacgtgttctcagcccagcagctccaggcagcacaggtcagccctgatgacatttctcttggcttcctggtgcgtgccaaaggtgtcgtgccagggagtacggcgcccctggaattccttcacatcactttccagtgcttctttgccgcgttctacctggcactcagtgctgatgtgccaccagctttgctcagacacctcttcaattgtggcaggccaggcaactcaccaatggccaggctcctgcccacgatgtgcatccaggcctcggagggaaaggacagcagcgtggcagctttgctgcagaaggccgagccgcacaaccttcagatcacagcagccttcctggcagggctgttgtcccgggagcactggggcctgctggctgagtgccagacatctgagaaggccctgctccggcgccaggcctgtgcccgctggtgtctggcccgcagcctccgcaagcacttccactccatcccgccagctgcaccgggtgaggccaagagcgtgcatgccatgcccgggttcatctggctcatccggagcctgtacgagatgcaggaggagcggctggctcggaaggctgcacgtggcctgaatgttgggcacctcaagttgacattttgcagtgtgggccccactgagtgtgctgccctggcctttgtgctgcagcacctccggcggcccgtggccctgcagctggactacaactctgtgggtgacattggcgtggagcagctgctgccttgccttggtgtctgcaaggctctgtatttgcgcgataacaatatctcagaccgaggcatctgcaagctcattgaatgtgctcttcactgcgagcaattgcagaagttagctctattcaacaacaaattgactgacggctgtgcacactccatggctaagctccttgcatgcaggcagaacttcttggcattgaggctggggaataactacatcactgccgcgggagcccaagtgctggccgaggggctccgaggcaacacctccttgcagttcctgggattctggggcaacagagtgggtgacgagggggcccaggccctggctgaagccttgggtgatcaccagagcttgaggtggctcagcctggtggggaacaacattggcagtgtgggtgcccaagccttggcactgatgctggcaaagaacgtcatgctagaagaactctgcctggaggagaaccatctccaggatgaaggtgtatgttctctcgcagaaggactgaagaaaaattcaagtttgaaaatcctgaagttgtccaataactgcatcacctacctaggggcagaagccctcctgcaggcccttgaaaggaatgacaccatcctggaagtctggctccgagggaacactttctctctagaggaggttgacaagctcggctgcagggacaccagactcttgctttga

SEQ ID NO: 211724 - DNA, 624 bp, Artificial Sequence
  derived and/or modified sequence
ggagtgggccttggagtcggcgcgcaggcggctcgcgcaaggaagtgatcctttctctacatgggcctcaccttggggaggacaatggtgtctttgaagttgtagtaactgaagtagagatcaaaaggcaatgcagatagactgacagatttcgcctgaagaggggaagcccgaccaggttgtgaaatgtgctcgcaggaggcttttcaggcacagaggagccagctggtcgagctgctggtctcagggtccctggaaggcttcgagagtgtcctggactggctgctgtcctgggaggtcctctcctgggaggactacgagggcttccacctcctgggccagcctctctcccacttggccaggcgccttctggacaccgtctggaataagggtacttgggcctgtcagaagctcatcgcggctgcccaagaagcccaggccgacagccagtcccccaagctgcatggctgctgggacccccactcgctccacccagcccgagacctgcagagtcaccggccagccattgtcaggaggctccacagccatgtggagaacatgctggacctggcatgggagcggggtttcgtcagccagtatgaatgtgatgaaatcaggttgccg

SEQ ID NO: 211725 - DNA, 3042 bp, Artificial Sequence
  derived and/or modified sequence
atgtgtagccaggaggcatttcaggctcaacgctcacagttagttgaactgctcgtgtctggatctctggagggttttgagtccgtactcgactggctgctcagttgggaagttctgtcatgggaagactacgagggctttcaccttcttggtcagcccctgtcccacctggcccgaagattgttggatacggtgtggaacaaaggaacctgggcctgccagaaactgattgctgctgcccaggaagcacaggccgacagtcagtcgccgaagctgcatggatgctgggaccctcacagccttcaccccgctcgggatttacagtcacacagaccagccatagtgagaagattacactcccatgtggagaacatgcttgatctcgcctgggagaggggctttgtgagccagtacgagtgcgacgagatcagactccctatcttcactccatcccagcgagccaggagactattagatctggcgacggtcaaggcgaatgggctggcagccttcttgctgcagcatgttcaggagctgccagttcccctggctctgccgctggaagcggctacctgtaagaaatatatggcgaaactgcggactactgtatctgcccaatcaagattcctgtccacatatgacggcgctgaaacactgtgcctcgaagatatttacacggaaaacgttctggaagtttgggcggacgtgggaatggccggaccgccacagaagtccccagctacgctgggcctggaagagctcttcagtacgcctgggcatctgaacgatgatgcggataccgtgctggtcgttggcgaggcaggttctggcaagagtactttgttgcagcgcctgcacctactttgggctgcaggacaggactttcaagagttcctgtttgttttccctttttcctgtaggcagttgcagtgcatggccaaacccctctcagttcgcaccttgctgtttgaacactgttgctggcctgacgtggggcaagaagatatcttccagctgttgcttgatcaccctgaccgggttctcttgacatttgatgggttcgatgaattcaaatttagattcacagatagggagagacactgcagccctacagatcccaccagcgtgcaaacgctcttatttaatttgttgcagggcaacctccttaagaatgccagaaaggtagtgacttcaaggccggcagccgtgagcgctttccttaggaagtacatcagaacagaatttaacttaaagggattctccgagcaaggaattgaactctacctgaggaagcggcaccacgagcctggggttgcagaccgcctcatccggcttctgcaagaaacctcagctcttcacggcctgtgtcacctgccagtgttctcatggatggtctcgaaatgtcaccaggaacttctcctccaggaggggggttcccccaagaccacgaccgatatgtaccttttgatcctgcagcactttctgctgcacgcgactcccccagattccgccagtcagggcctgggaccaagcctccttaggggtcggctccccacactgcttcatcttgggcgacttgcactgtggggcctgggaatgtgttgttacgtgtttagtgcccaacagttgcaggcagctcaggtgagtcccgacgatatctctctgggcttcttggtgcgcgctaaaggagtcgtgcccggatcaacagcccctttggagtttctgcacattactttccagtgtttttttgccgcattttatctggccctgtccgccgatgttccccctgctttgttacggcaccttttcaattgtggaaggcccggaaattctccgatggcacgactgcttccaaccatgtgtatacaggcatccgagggcaaagacagcagcgtcgccgcactactgcagaaagcagagcctcacaacctccagattactgccgcatttctcgccggactcctatcaagggagcactgggggctgctcgcggagtgccaaacgagcgaaaaggcccttttgcggcgtcaagcctgtgccagatggtgcctcgctcgcagcctgcggaaacatttccactctatccctccagcagcacccggagaagctaagagcgtgcatgcgatgcctggctttatatggctaattagatccctctacgagatgcaggaggaaaggctggctagaaaggccgctaggggtttgaacgtgggccatctgaagctcactttttgctcggtaggtccaactgagtgcgccgcactcgctttcgttttgcaacacctgcggaggccagtcgccctgcagctagactacaatagcgtaggcgacataggagtcgaacaacttctgccctgcctgggggtatgtaaggccctctacctaagagacaataatattagtgatcgcggaatctgcaagctgatcgagtgtgcacttcattgcgagcagcttcagaaactggcactttttaataacaaacttaccgacggctgcgcacactcgatggccaaactgctggcctgcagacaaaattttctggcactccgcctcggaaataattacataactgccgctggggcacaggtgctggcggagggactgagggggaacacgtctcttcagtttctggggttctgggggaaccgtgttggcgatgagggtgcccaagctctcgcagaggccttgggggaccaccagtccttacgatggttgtctctcgtgggtaacaacattgggtcagtgggggcacaggcccttgctctgatgctagccaaaaatgtgatgttggaggagctgtgccttgaggaaaatcatctgcaggatgagggcgtatgttccctcgcagagggtttgaaaaagaacagcagtttaaagattcttaagctgtcaaataactgtatcacttatctgggggcagaggctttactgcaggctctggaaagaaatgataccatcttggaggtgtggcttcggggtaacacattttcactcgaggaggtcgataaattgggttgcagggatacaaggttgctactgtag

SEQ ID NO: 211726 - DNA, 3123 bp, Artificial Sequence
  derived and/or modified sequence
atgggggaggaagggggctccgcatctcacgacgaagaggagagggcctctgtgctgctcggacacagccccggttgtgagatgtgcagtcaggaagcatttcaggcacagagatcacagctggttgagttgctggttagcggatctctggagggcttcgaaagtgtgctcgactggctgctgtcttgggaagtgttatcatgggaggattatgagggcttccacttactcgggcaacctctcagccacttagccagacgactactcgacaccgtttggaataagggcacatgggcctgccaaaaactcattgcagctgcgcaagaagcacaggctgattcgcaaagccccaagcttcacggctgttgggacccccacagtcttcaccctgctcgcgacctgcagtcacatcgcccagccatcgtgcggcggcttcattcacacgtcgagaatatgcttgacttggcttgggagcgtggctttgtctcacagtacgaatgcgacgaaatccgactgcccatctttactccatcgcagcgggcgcggcgtctgctggacctagcaacagtcaaggccaatggattggccgcctttctgctccaacatgtacaagagttaccagtgccccttgctctgccactggaggccgcaacatgtaagaaatacatggcaaagttacgcaccacagtttccgcccagtcccgctttctgtccacctatgacggcgctgagaccctgtgcctggaggacatatacaccgaaaacgtcttggaggtctgggcggatgttggaatggcaggacctccccagaagtcccctgccaccctcggcctagaagagttgttctctactccgggccaccttaacgacgatgctgacacagtgctggttgtcggagaggcagggtctgggaagagcacactcctgcagcggctgcatctcttgtgggctgccggccaggacttccaagagttccttttcgtattccctttttcctgccggcagttacagtgcatggccaagccactctccgtgcgaacattgctcttcgagcactgctgttggcccgatgtcggtcaggaggatatttttcagcttcttctcgaccaccccgatcgcgtactgttaacctttgacggcttcgacgaattcaaattccgcttcacagacagagagcggcattgcagccccaccgaccccacatctgtacagaccctgctcttcaatctgctgcagggaaacctgttgaagaatgcccgtaaggttgtcactagccgacccgccgctgtctcagcattcctgcgcaaatacatccgtacagagttcaacctgaagggattctcagaacagggcatcgagttgtacctgagaaaacgccaccacgagccaggcgtggctgacagactgattagacttctgcaggagacctccgctctgcacggcctgtgtcatttgcctgtctttagctggatggtcagcaagtgtcaccaggaactactgcttcaggagggcggctctcctaaaactacaacagatatgtatttactgattctccaacacttcctactccatgccacacctcctgactctgcatcccagggtctgggcccctctcttctgcgaggtaggctacccacactgcttcatcttggccggttggctctgtggggcctcgggatgtgctgctacgtatttagcgcccagcagctccaggccgcccaggtttcccccgatgacattagtctcgggtttctggtgcgcgcaaagggggtggtacccggctctactgcccctctggaattcctgcacattacattccagtgtttcttcgctgcgttctatcttgctctttctgctgatgtcccccctgccctgttgaggcaccttttcaattgtggccggcccggaaactctccgatggcacgactgctcccgactatgtgcatacaggcttcggaggggaaagactccagcgtcgctgccctgctgcagaaggctgaacctcacaatttacagataaccgctgctttcttagctggtttactgtccagggagcattggggcctccttgccgaatgtcagacaagcgagaaagctctcttacggaggcaagcttgtgctaggtggtgtcttgcacggagcctgcgtaagcacttccactcaatcccacctgctgcacctggcgaagcaaagtcggttcacgcaatgcccggtttcatatggttgatccgcagcttgtatgaaatgcaggaggagaggctagcaaggaaggctgcaaggggactgaacgtgggccatctgaagctgaccttctgctccgtcggaccaactgagtgtgccgccctggcctttgtgctccagcacctcagacgccccgttgcactccagctggactacaacagtgtaggcgacatcggagtggaacagttactcccctgtctcggcgtgtgcaaagctctgtatttgcgggacaataacatttccgatcgtgggatttgtaaactgattgaatgcgccttgcactgtgaacagctgcagaagctcgccttgttcaacaacaagctgactgacgggtgtgctcactctatggcaaagttactggcctgtagacagaattttctggcattgagactcggcaataattatatcactgcagccggcgcacaggtgttggccgaaggacttcgggggaatacgtccctacagtttctgggcttttggggcaatagagttggcgacgaaggcgctcaggctttagctgaggcgcttggcgaccaccagagcctgcggtggctgagtctcgtggggaacaacatcggctctgtgggcgcacaagcgctggctctgatgctcgcaaagaacgtgatgttagaagagctgtgtctggaagaaaaccacctgcaggacgaaggcgtctgtagcctcgccgagggtcttaagaagaactctagcctgaagatcctcaaactgtctaataattgcataacatatttgggtgctgaagccctcctgcaggcccttgagagaaacgatactatcctcgaggtatggctgcgagggaatacattcagcctagaagaagtagataaactcggctgccgcgacactcgtttacttctgtag

SEQ ID NO: 211727 - DNA, 3123 bp, Artificial Sequence
  derived and/or modified sequence
atgggagaggagggcggcagcgccagccatgatgaggaggagcgggcctctgtgctgctgggccacagccctggctgtgagatgtgcagccaggaggccttccaggcccagaggagccagctggtggagctgctggtgtctggcagcctggagggctttgaatctgtgctggactggctgctgtcctgggaggtgctgtcctgggaggactatgagggcttccacctgctgggccagcccctgagccacctggcccggcggctgctggacacagtgtggaacaagggcacctgggcctgccagaagctgattgctgctgcccaggaggcccaggccgacagccagagccccaagctgcacggctgctgggacccccacagcctgcacccagcccgggacctgcagagccacaggcctgccatcgtgcggcggctgcacagccacgtggagaacatgctggacctggcctgggagcggggctttgtgtcccagtatgaatgtgatgagatccggctgcccatcttcacccccagccagagggcccggcggctgctggacctggccaccgtgaaggccaacggcctggccgccttcctgctgcagcacgtgcaggagctgcctgtgcccctggccctgcccctggaggccgccacctgcaagaagtacatggccaagctgcggaccaccgtgtctgcccagagccgcttcctgagcacctatgatggagctgagaccctgtgcctggaggacatctacacagaaaatgtgctggaggtgtgggcagatgtgggcatggccggccccccccagaagagccctgccaccctgggcctggaggagctgttcagcaccccaggccacctgaatgatgatgctgacacagtgctggtggtgggggaggccggcagcggcaagagcaccctgctgcagaggctgcacctgctgtgggccgccggccaggacttccaggagttcctgtttgtgttccccttcagctgccggcagctgcagtgcatggccaagcccctgtctgtgaggaccctgctgtttgagcactgctgctggccagatgtgggccaggaggacatcttccagctgctgctggaccacccagacagagtgctgctgacctttgatggctttgatgagttcaagttccgcttcacagaccgggagcggcactgcagccccacagaccccacctctgtgcagaccctgctcttcaacctgctgcagggcaacctgctgaagaatgccaggaaggtggtgaccagcaggcctgctgctgtgtctgccttcctgaggaagtacatcagaacagagttcaacctgaagggcttcagcgagcagggcatcgagctgtacctgaggaagaggcaccacgagcccggggtggccgacaggctcatccggctgctgcaggagaccagcgccctgcacggcctgtgccacctgcccgtcttctcctggatggtgtccaagtgccaccaggagctgctgctgcaggagggcggcagccccaagaccaccacagacatgtacctgctgatcctgcagcacttcctgctgcacgccaccccaccagacagcgccagccagggcctgggccccagcctgctgcggggccgcctgcccaccctgctgcacctgggccgcctggccctgtggggcctgggcatgtgctgctacgtgttcagcgcccagcagctgcaggccgcccaggtgtccccagatgacatcagcctgggcttcctggtgcgggccaagggcgtggtgcccggcagcacagcccccctggagttcctgcacatcaccttccagtgcttctttgctgccttctacctggccctgtctgcagatgtgcccccagccctgctgcggcacctgttcaactgtggccggcccggcaacagccccatggcccggctgctgcccaccatgtgcatccaggccagcgagggcaaggacagctctgtggccgccctgctgcagaaggccgagccccacaacctgcagatcacagctgccttcctggccggcctgctgagccgggagcactggggcctgctggccgagtgccagaccagcgagaaggccctgctgcggcggcaggcctgtgcccgctggtgcctggcccggagcctgaggaagcacttccacagcatccccccagctgcccctggagaggccaagtctgtgcacgccatgcctggcttcatctggctgatccgcagcctgtatgagatgcaggaggagcggctggccaggaaggccgcccggggcctgaatgtgggccacctgaagctgaccttctgcagcgtgggccccacagaatgtgccgccctggcctttgtgctgcagcacctgcggcggcctgtggccctgcagctggactacaacagcgtgggggacattggagtggagcagctgctgccctgcctgggcgtgtgcaaggccctgtacctgcgggacaacaacatcagtgaccggggcatctgcaagctgattgaatgtgccctgcactgtgagcagctgcagaagctggccctcttcaacaacaagctgacagatggctgtgcccacagcatggccaagctgctggcctgccggcagaacttcctggccctgcggctgggcaacaactacatcacagctgctggggcccaggtgctggccgagggcctgcggggcaacaccagcctgcagttcctgggcttctggggcaacagagtgggagatgaaggagcccaggccctggccgaggccctgggggaccaccagagcctgcgctggctgagcctggtgggcaacaacatcggctctgtgggcgcccaggccctggccctgatgctggccaagaatgtgatgctggaggagctgtgcctggaggagaaccacctgcaggatgaaggagtgtgcagcctggccgagggcctgaagaagaacagcagcctgaagatcctgaagctgagcaacaactgcatcacctacctgggcgctgaggccctgctgcaggccctggagagaaatgacaccatcctggaggtgtggctgcggggcaacaccttcagcctggaggaggtggacaagctgggctgccgggacacccggctgctgctgtag

SEQ ID NO: 211728 - DNA, 3123 bp, Artificial Sequence
  derived and/or modified sequence
atgggcgaggagggcggcagcgccagccacgacgaggaggagcgggcttccgtcttgttgggtcattcacccgggtgtgaaatgtgctctcaagaggccttccaagcccagcgtagccagcttgtggagttgctagtgtccgggtctctcgaaggtttcgagtccgtgctggactggcttttgtcttgggaggtactttcctgggaggactacgagggctttcacctcctgggacagccactgtctcatctggcccggcggctgttggacaccgtatggaataaaggaacatgggcatgccaaaagctcatcgctgccgcacaggaagcgcaagccgatagtcagtcccctaagctgcatgggtgttgggatccgcacagcttacacccagcccgggatctgcaatcccaccgtcccgctatcgtgagacgactgcactcacatgttgagaacatgctggatctcgcatgggaacgtggatttgtttctcaatatgaatgcgacgagattagacttcccattttcactccctcacagcgcgcacgtaggcttcttgacttggccaccgttaaggccaacggactggcagcctttctcctacaacacgtgcaggagctgcccgtaccgctcgcgctgcccctagaagccgcgacctgcaaaaaatatatggcgaagctgcgcacaacggtctcggcccaaagccgcttcttgtcaacctacgacggagctgagactctctgcctagaagacatctacacggaaaatgtgctcgaggtctgggccgatgtcggcatggctgggcctccacagaaatcacctgcaaccttgggactggaggagcttttctctactcccggacacctgaacgacgacgctgatactgtgttggtcgtgggtgaggcaggaagcggaaagtcgaccctgcttcagcgcctgcaccttctttgggccgctgggcaagattttcaggagttcctgtttgtgtttcccttctcatgccgtcaactgcaatgtatggccaagcccctaagcgtgcgcacattgctattcgaacactgttgttggcctgacgtcggacaggaagacattttccagctgttacttgatcacccggaccgtgtattgcttacttttgatggtttcgacgagttcaaattccggtttactgacagggagcggcactgctcccccactgacccaaccagcgtacagacactgctcttcaatctgctgcagggtaaccttctgaaaaacgctaggaaagtagtgacttctcggccagccgcagtgtccgcctttctgcggaagtatatccggaccgagtttaatctgaaaggcttcagtgaacaaggcattgagctctacctaaggaagaggcaccacgagcccggagtggctgatcggctgatccgcctgctgcaggagacctccgctctccacgggctctgccatttgcctgtattctcttggatggtcagcaagtgccatcaagagcttctccttcaggagggcggttccccgaagactaccacggatatgtacttgctgatactgcagcactttctcctacacgctacccccccggatagcgcttctcaaggactggggcccagccttcttagaggaagacttcctaccctgcttcacctgggcaggcttgctttatggggtctggggatgtgctgttatgtcttttcagcccagcaactccaggccgctcaggtgagtccagacgatatttcgctggggtttctggtcagagccaagggcgtggtacccggttcaaccgcacctctggagtttctccacattaccttccagtgcttcttcgccgccttctatcttgccctctccgccgatgtgccacctgcattgctgaggcatctcttcaactgcggccgccctggcaatagcccaatggccagactcctgccaacgatgtgtattcaagccagtgaagggaaggatagcagcgtggctgccctcctacagaaagcagaaccccacaatcttcaaattacagctgcttttctagccggcctgctgtcccgcgagcactggggccttcttgcagaatgtcagacaagcgagaaggccttgctcaggcggcaggcctgtgccaggtggtgcttagcgagaagcctgaggaaacatttccattctatacctccggctgcaccaggagaggccaagtccgtgcacgctatgcctgggtttatctggctgattcggtcactatatgaaatgcaggaggagcgcctggcccgcaaggctgcccgtggcttgaatgtcggccatctcaagttaaccttttgtagtgtggggcccaccgagtgtgccgcactggccttcgtcctacagcatctgagacgcccagttgcactgcagttggattataacagtgtgggtgacatcggtgtggagcagctgctgccttgcctcggcgtgtgtaaagctctgtatctgcgagataataacatctcagatcgtgggatatgtaagctgatcgaatgtgcactgcattgtgagcagctgcagaagctagctttattcaataacaagctgaccgatgggtgcgcgcactccatggctaagctactagcctgcagacagaatttcctggccctgcggctcgggaacaattacatcaccgccgctggtgcacaggtgctggccgaaggactgagaggcaacacctctttgcagttcctcgggttctggggcaacagagtgggcgatgagggtgcacaagctctggccgaagctctgggagaccatcaaagcttgcggtggctctccctagtcggtaacaacatcggcagcgtcggcgcacaggctttagcccttatgctggcaaagaatgtaatgctggaggagttatgtttagaagaaaatcacctgcaggatgagggtgtatgttccttagccgagggccttaagaaaaactcaagtttgaaaatcctgaagctctcgaacaactgcattacttacctcggcgccgaggcccttctgcaggcattagagagaaacgacaccatcctggaagtttggctgaggggcaacacgttcagtttagaagaggtcgataaactggggtgtcgggatactcgcctgttgctgtag

SEQ ID NO: 211729 - DNA, 4485 bp, Artificial Sequence
  derived and/or modified sequence
gtagacagatccaggctcaccagtcctgtgccactgggcttttggcgttctgcacaaggcctacccgcagatgccatgcctgctcccccagcctaatgggctttgatgggggaagagggtggttcagcctctcacgatgaggaggaaagagcaagtgtcctcctcggacattctccgggttgtgaaatgtgctcgcaggaggcttttcaggcacagaggagccagctggtcgagctgctggtctcagggtccctggaaggcttcgagagtgtcctggactggctgctgtcctgggaggtcctctcctgggaggactacgagggcttccacctcctgggccagcctctctcccacttggccaggcgccttctggacaccgtctggaataagggtacttgggcctgtcagaagctcatcgcggctgcccaagaagcccaggccgacagccagtcccccaagctgcatggctgctgggacccccactcgctccacccagcccgagacctgcagagtcaccggccagccattgtcaggaggctccacagccatgtggagaacatgctggacctggcatgggagcggggtttcgtcagccagtatgaatgtgatgaaatcaggttgccgatcttcacaccgtcccagagggcaagaaggctgcttgatcttgccacggtgaaagcgaatggattggctgccttccttctacaacatgttcaggaattaccagtcccattggccctgcctttggaagctgccacatgcaagaagtatatggccaagctgaggaccacggtgtctgctcagtctcgcttcctcagtacctatgatggagcagagacgctctgcctggaggacatatacacagagaatgtcctggaggtctgggcagatgtgggcatggctggacccccgcagaagagcccagccaccctgggcctggaggagctcttcagcacccctggccacctcaatgacgatgcggacactgtgctggtggtgggtgaggcgggcagtggcaagagcacgctcctgcagcggctgcacttgctgtgggctgcagggcaagacttccaggaatttctctttgtcttcccattcagctgccggcagctgcagtgcatggccaaaccactctctgtgcggactctactctttgagcactgctgttggcctgatgttggtcaagaagacatcttccagttactccttgaccaccctgaccgtgtcctgttaacctttgatggctttgacgagttcaagttcaggttcacggatcgtgaacgccactgctccccgaccgaccccacctctgtccagaccctgctcttcaaccttctgcagggcaacctgctgaagaatgcccgcaaggtggtgaccagccgtccggccgctgtgtcggcgttcctcaggaagtacatccgcaccgagttcaacctcaagggcttctctgaacagggcatcgagctgtacctgaggaagcgccatcatgagcccggggtggcggaccgcctcatccgcctgctccaagagacctcagccctgcacggtttgtgccacctgcctgtcttctcatggatggtgtccaaatgccaccaggaactgttgctgcaggagggggggtccccaaagaccactacagatatgtacctgctgattctgcagcattttctgctgcatgccacccccccagactcagcttcccaaggtctgggacccagtcttcttcggggccgcctccccaccctcctgcacctgggcagactggctctgtggggcctgggcatgtgctgctacgtgttctcagcccagcagctccaggcagcacaggtcagccctgatgacatttctcttggcttcctggtgcgtgccaaaggtgtcgtgccagggagtacggcgcccctggaattccttcacatcactttccagtgcttctttgccgcgttctacctggcactcagtgctgatgtgccaccagctttgctcagacacctcttcaattgtggcaggccaggcaactcaccaatggccaggctcctgcccacgatgtgcatccaggcctcggagggaaaggacagcagcgtggcagctttgctgcagaaggccgagccgcacaaccttcagatcacagcagccttcctggcagggctgttgtcccgggagcactggggcctgctggctgagtgccagacatctgagaaggccctgctccggcgccaggcctgtgcccgctggtgtctggcccgcagcctccgcaagcacttccactccatcccgccagctgcaccgggtgaggccaagagcgtgcatgccatgcccgggttcatctggctcatccggagcctgtacgagatgcaggaggagcggctggctcggaaggctgcacgtggcctgaatgttgggcacctcaagttgacattttgcagtgtgggccccactgagtgtgctgccctggcctttgtgctgcagcacctccggcggcccgtggccctgcagctggactacaactctgtgggtgacattggcgtggagcagctgctgccttgccttggtgtctgcaaggctctgtatttgcgcgataacaatatctcagaccgaggcatctgcaagctcattgaatgtgctcttcactgcgagcaattgcagaagttagctctattcaacaacaaattgactgacggctgtgcacactccatggctaagctccttgcatgcaggcagaacttcttggcattgaggctggggaataactacatcactgccgcgggagcccaagtgctggccgaggggctccgaggcaacacctccttgcagttcctgggattctggggcaacagagtgggtgacgagggggcccaggccctggctgaagccttgggtgatcaccagagcttgaggtggctcagcctggtggggaacaacattggcagtgtgggtgcccaagccttggcactgatgctggcaaagaacgtcatgctagaagaactctgcctggaggagaaccatctccaggatgaaggtgtatgttctctcgcagaaggactgaagaaaaattcaagtttgaaaatcctgaagttgtccaataactgcatcacctacctaggggcagaagccctcctgcaggcccttgaaaggaatgacaccatcctggaagtctggctccgagggaacactttctctctagaggaggttgacaagctcggctgcagggacaccagactcttgctttgaagtctccgggaggatgttcgtctcagtttgtttgtgagcaggctgtgagtttgggccccagaggctgggtgacatgtgttggcagcctcttcaaaatgagccctgtcctgcctaaggctgaacttgttttctgggaacaccataggtcacctttattctggcagaggagggagcatcagtgccctccaggatagacttttcccaagcctacttttgccattgacttcttcccaagattcaatcccaggatgtacaaggacagcccctcctccatagtatgggactggcctctgctgatcctcccaggcttccgtgtgggtcagtggggcccatggatgtgcttgttaactgagtgccttttggtggagaggcccggcctctcacaaaagaccccttaccactgctctgatgaagaggagtacacagaacacataattcaggaagcagctttccccatgtctcgactcatccatccaggccattccccgtctctggttcctcccctcctcctggactcctgcacacgctccttcctctgaggctgaaattcagaatattagtgacctcagctttgatatttcacttacagcacccccaaccctggcacccagggtgggaagggctacaccttagcctgccctcctttccggtgtttaagacatttttggaaggggacacgtgacagccgtttgttccccaagacattctaggtttgcaagaaaaatatgaccacactccagctgggatcacatgtggacttttatttccagtgaaatcagttactcttcagttaagcctttggaaacagctcgactttaaaaagctccaaatgcagctttaaaaaattaatctgggccagaatttcaaacggcctcactaggcttctggttgatgcctgtgaactgaactctgacaacagacttctgaaatagacccacaagaggcagttccatttcatttgtgccagaatgctttaggatgtacagttatggattgaaagtttacaggaaaaaaaattaggccgttccttcaaagcaaatgtcttcctggattattcaaaatgatgtatgttgaagcctttgtaaattgtcagatgctgtgcaaatgttattattttaaacattatgatgtgtgaaaactggttaatatttataggtcactttgttttactgtcttaagtttatactcttatagacaacatggccgtgaactttatgctgtaaataatcagaggggaataaactgttgagtcaaaac

SEQ ID NO: 211730 - DNA, 3123 bp, Artificial Sequence
  derived and/or modified sequence
atgggggaggaggggggttcagccagccatgatgaggaagagcgcgcttccgtgttactgggccacagcccaggctgtgagatgtgttcacaggaggcgtttcaggcacaaaggtcacagctcgttgagcttctggtatccggttctctggaagggttcgagagcgtcctggactggctgctctcctgggaggtattgtcatgggaggactacgaaggctttcatctgctgggccaacctttatcccacttagccaggcggctcctggatacagtctggaataaggggacgtgggcatgtcagaaactcatcgctgctgctcaggaagctcaagctgactcacaaagccccaagttacatggctgctgggatccgcactctctgcatccagccagggacctccaaagccaccggccagccatcgtgaggcgcctccatagccacgtggagaatatgttagatctggcctgggagaggggatttgtgtctcaatacgaatgtgacgagatccggctcccgatattcacacccagtcagcgtgcaaggagactactggatctggcaacagtgaaagctaacggcctggctgcatttttattacagcatgtgcaggagctacctgtgcctctggcccttcccctggaagctgctacctgcaagaagtatatggccaagttacgcaccacagtatccgctcagtctagattcctttccacctacgatggcgcagagacactgtgccttgaggacatttacacggagaatgtgctcgaagtgtgggccgacgtgggaatggcagggcctcctcagaagtccccagcaacactcggccttgaagagctgttctccacccccggacacttaaacgatgatgccgatacagtcctcgtcgtaggggaggccggatccggcaagtctacattgcttcaaagacttcacctactttgggcagctggccaggatttccaggaatttctgtttgtcttccccttctcgtgcagacagctgcagtgtatggcgaagcccctctccgtgaggactctcttgtttgagcactgttgttggccagacgtagggcaagaagacatctttcagcttctgctagaccatcctgacagagtgctcctgacctttgacggcttcgatgagttcaaattcaggtttacagaccgtgaacggcattgctctcccaccgaccctactagcgttcagaccctgttgttcaacctgctccagggcaatctgttgaagaatgctagaaaggtggtaacctctcgcccagcagcagtctctgcgtttcttcggaaatatattaggaccgaattcaatttgaaaggattctcagagcagggcattgaactctacttgagaaagcgccaccatgagccaggcgtggccgataggctgattaggctgctgcaagagacgagcgccctgcacgggctgtgccacctgcctgtgttctcctggatggtttccaagtgccaccaggagctactgttacaagagggcggttcaccaaaaaccacgacagatatgtatctgttgattctgcaacacttcctcctgcatgccacccctcccgactccgcctcccagggcctggggccttccctcctgcgcggaaggctgccgactcttctccatctaggcaggctggcactttggggactgggcatgtgctgttacgtgtttagtgcgcagcagctacaggctgcccaggtcagcccggacgacatctcactcgggtttcttgttcgtgctaaaggcgtggtgccaggatccacagcacctttggaattcctacatattactttccaatgtttcttcgccgcattctatttagctctgagcgccgacgtgccccctgcactgctgcgccaccttttcaactgcggtcggccagggaatagccccatggccaggctcctgccaaccatgtgcattcaggcatctgaaggaaaagattccagtgtggctgccctgctccagaaggccgagcctcataatttgcaaatcacagcagcctttcttgctgggctgctttccagggagcactgggggctgctagctgaatgccagaccagcgagaaagccctacttaggcggcaggcttgcgccaggtggtgccttgcaaggagtctccgcaagcactttcactccattcccccagcagccccaggggaggctaagtcagtccatgcgatgcccggatttatctggctaatccgatccctgtacgagatgcaggaagagagactcgcccgaaaggccgcacggggattaaacgtagggcacttaaaactcacattctgctctgtaggcccaaccgaatgcgccgctcttgcgtttgttctgcagcatctacgcaggccagtggctctgcaattggactataactccgtgggcgacatcggggtggaacagctcttaccttgcctgggagtttgcaaggctctgtacttgcgggataataacatctcggatagaggaatctgtaaactcattgaatgtgctctccattgcgagcagctgcagaagttggccttgttcaataacaagctcacagatggctgtgcacacagcatggccaaattgctggcctgtaggcagaattttttggcccttcggctcggaaataattatattaccgcagccggtgcccaagtgctcgcagaagggctgagaggtaacacatctctccagttcctgggattctggggaaatagggtgggcgacgaaggcgctcaagcactggccgaagctctgggcgaccatcaatctctgcgctggctcagtttggtgggtaataatatcggaagtgtgggagctcaggcgctcgcactgatgctggcgaaaaatgttatgctggaagagctgtgtcttgaagagaatcacctgcaggatgaaggggtctgctccctcgctgagggtctcaaaaaaaacagttctctgaagattcttaaactgagtaacaattgcatcacttaccttggcgcagaggctctgttgcaagcgctggaaaggaatgatacaatcctggaggtatggttacgtggcaacaccttctctctagaagaagtggataaactgggatgtcgggacacccggctgctgctttag

SEQ ID NO: 211731 - DNA, 3123 bp, Artificial Sequence
  derived and/or modified sequence
atgggcgaggagggcggcagcgccagccacgacgaggaggagagagccagcgtgctgctgggccacagccccggctgcgagatgtgcagccaggaggccttccaggcccagagaagccagctggtggagctgctggtgagcggcagcctggagggcttcgagagcgtgctggactggctgctgagctgggaggtgctgagctgggaggactacgagggcttccacctgctgggccagcccctgagccacctggccagaagactgctggacaccgtgtggaacaagggcacctgggcctgccagaagctgatcgccgccgcccaggaggcccaggccgacagccagagccccaagctgcacggctgctgggacccccacagcctgcaccccgccagagacctgcagagccacagacccgccatcgtgagaagactgcacagccacgtggagaacatgctggacctggcctgggagagaggcttcgtgagccagtacgagtgcgacgagatcagactgcccatcttcacccccagccagagagccagaagactgctggacctggccaccgtgaaggccaacggcctggccgccttcctgctgcagcacgtgcaggagctgcccgtgcccctggccctgcccctggaggccgccacctgcaagaagtacatggccaagctgagaaccaccgtgagcgcccagagcagattcctgagcacctacgacggcgccgagaccctgtgcctggaggacatctacaccgagaacgtgctggaggtgtgggccgacgtgggcatggccggccccccccagaagagccccgccaccctgggcctggaggagctgttcagcacccccggccacctgaacgacgacgccgacaccgtgctggtggtgggcgaggccggcagcggcaagagcaccctgctgcagagactgcacctgctgtgggccgccggccaggacttccaggagttcctgttcgtgttccccttcagctgcagacagctgcagtgcatggccaagcccctgagcgtgagaaccctgctgttcgagcactgctgctggcccgacgtgggccaggaggacatcttccagctgctgctggaccaccccgacagagtgctgctgaccttcgacggcttcgacgagttcaagttcagattcaccgacagagagagacactgcagccccaccgaccccaccagcgtgcagaccctgctgttcaacctgctgcagggcaacctgctgaagaacgccagaaaggtggtgaccagcagacccgccgccgtgagcgccttcctgagaaagtacatcagaaccgagttcaacctgaagggcttcagcgagcagggcatcgagctgtacctgagaaagagacaccacgagcccggcgtggccgacagactgatcagactgctgcaggagaccagcgccctgcacggcctgtgccacctgcccgtgttcagctggatggtgagcaagtgccaccaggagctgctgctgcaggagggcggcagccccaagaccaccaccgacatgtacctgctgatcctgcagcacttcctgctgcacgccaccccccccgacagcgccagccagggcctgggccccagcctgctgagaggcagactgcccaccctgctgcacctgggcagactggccctgtggggcctgggcatgtgctgctacgtgttcagcgcccagcagctgcaggccgcccaggtgagccccgacgacatcagcctgggcttcctggtgagagccaagggcgtggtgcccggcagcaccgcccccctggagttcctgcacatcaccttccagtgcttcttcgccgccttctacctggccctgagcgccgacgtgccccccgccctgctgagacacctgttcaactgcggcagacccggcaacagccccatggccagactgctgcccaccatgtgcatccaggccagcgagggcaaggacagcagcgtggccgccctgctgcagaaggccgagccccacaacctgcagatcaccgccgccttcctggccggcctgctgagcagagagcactggggcctgctggccgagtgccagaccagcgagaaggccctgctgagaagacaggcctgcgccagatggtgcctggccagaagcctgagaaagcacttccacagcatcccccccgccgcccccggcgaggccaagagcgtgcacgccatgcccggcttcatctggctgatcagaagcctgtacgagatgcaggaggagagactggccagaaaggccgccagaggcctgaacgtgggccacctgaagctgaccttctgcagcgtgggccccaccgagtgcgccgccctggccttcgtgctgcagcacctgagaagacccgtggccctgcagctggactacaacagcgtgggcgacatcggcgtggagcagctgctgccctgcctgggcgtgtgcaaggccctgtacctgagagacaacaacatcagcgacagaggcatctgcaagctgatcgagtgcgccctgcactgcgagcagctgcagaagctggccctgttcaacaacaagctgaccgacggctgcgcccacagcatggccaagctgctggcctgcagacagaacttcctggccctgagactgggcaacaactacatcaccgccgccggcgcccaggtgctggccgagggcctgagaggcaacaccagcctgcagttcctgggcttctggggcaacagagtgggcgacgagggcgcccaggccctggccgaggccctgggcgaccaccagagcctgagatggctgagcctggtgggcaacaacatcggcagcgtgggcgcccaggccctggccctgatgctggccaagaacgtgatgctggaggagctgtgcctggaggagaaccacctgcaggacgagggcgtgtgcagcctggccgagggcctgaagaagaacagcagcctgaagatcctgaagctgagcaacaactgcatcacctacctgggcgccgaggccctgctgcaggccctggagagaaacgacaccatcctggaggtgtggctgagaggcaacaccttcagcctggaggaggtggacaagctgggctgcagagacaccagactgctgctgtag

SEQ ID NO: 211732 - protein, 207 aa, Artificial Sequence
  derived and/or modified sequence
MAALVEPLGLERDVSRAVELLERLQRSGELPPQKLQALQRVLQSRFCSAIREVYEQLYDTLDITGSAEIRAHATAKATVAAFTASEGHAHPRVVELPKTDEGLGFNIMGGKEQNSPIYISRVIPGGVADRHGGLKRGDQLLSVNGVSVEGEQHEKAVELLKAAQGSVKLVVRYTPRVLEEMEARFEKMRSARRRQQHQSYSSLESRG

SEQ ID NO: 211733 - DNA, 624 bp, Artificial Sequence
  derived and/or modified sequence
atggccgccctggtggagcccctgggcctggagagagacgtgagcagagccgtggagctgctggagagactgcagagaagcggcgagctgcccccccagaagctgcaggccctgcagagagtgctgcagagcagattctgcagcgccatcagagaggtgtacgagcagctgtacgacaccctggacatcaccggcagcgccgagatcagagcccacgccaccgccaaggccaccgtggccgccttcaccgccagcgagggccacgcccaccccagagtggtggagctgcccaagaccgacgagggcctgggcttcaacatcatgggcggcaaggagcagaacagccccatctacatcagcagagtgatccccggcggcgtggccgacagacacggcggcctgaagagaggcgaccagctgctgagcgtgaacggcgtgagcgtggagggcgagcagcacgagaaggccgtggagctgctgaaggccgcccagggcagcgtgaagctggtggtgagatacacccccagagtgctggaggagatggaggccagattcgagaagatgagaagcgccagaagaagacagcagcaccagagctacagcagcctggagagcagaggctag

SEQ ID NO: 211734 - DNA, 624 bp, Artificial Sequence
  derived and/or modified sequence
atggccgcccttgttgaacccctgggtcttgaacgggacgtgagccgtgccgtggaacttctggagcgcctgcagaggtctggagagctcccacctcaaaaactccaggctctgcagagggtattacagtcaaggttctgtagtgcaatccgcgaagtgtacgagcagctgtatgatacgcttgacatcacaggctctgctgagatccgggcacacgctaccgctaaagccaccgtggctgcgttcaccgcatctgagggacatgcccatccacgcgtagttgagctacctaagactgacgagggtctcgggttcaatatcatgggaggcaaagaacagaacagtcctatatacataagcagggttatccctggtggcgtggctgatcggcacggcgggctgaaacggggagaccagctgctgtccgtgaacggagtgagcgtagagggcgaacagcacgagaaagcggtagaattactcaaggctgcccaggggagcgtgaaactcgtagtgcgctacacaccaagagttctggaagagatggaagcccgatttgagaagatgcggtcagcacgacggcgacagcagcatcaatcctatagcagcctagaatctcgcgggtag

SEQ ID NO: 211735 - DNA, 624 bp, Artificial Sequence
  derived and/or modified sequence
atggccgccctggtggagcccctgggcctggagagagatgtgtccagagctgtggagctgctggagcggctgcagaggtctggagagctgcccccccagaagctgcaggccctgcagagggtgctgcagagccgcttctgcagcgccatccgggaggtgtatgagcagctgtatgacaccctggacatcaccggcagcgctgagatccgggcccacgccacagccaaggccaccgtggccgccttcaccgccagcgagggccacgcccacccccgggtggtggagctgcccaagacagatgagggcctgggcttcaacatcatgggcggcaaggagcagaacagccccatctacatcagcagggtcatccctgggggcgtggccgacagacatggaggcctgaagagaggagaccagctgctgtctgtgaatggagtgtctgtggagggggagcagcacgagaaggctgtggagctgctgaaggccgcccagggctctgtgaagctggtggtgcgctacaccccccgggtgctggaggagatggaggccaggtttgagaagatgaggtctgcccggcggcggcagcagcaccagagctacagcagcctggagagccggggctag

SEQ ID NO: 211736 - DNA, 624 bp, Artificial Sequence
  derived and/or modified sequence
atggccgccctggtggagcccctgggcctggagcgggacgtgagccgagcagtagagttgttggagagactgcaacggtccggggagctcccgccccaaaagctgcaggccctccaacgggtgctccagtcaagattttgttcagcaattagagaggtgtatgagcagctgtatgacaccctggacattacgggttctgcggagatccgggcacatgcaaccgctaaggcgaccgtagcagccttcaccgcctcagagggccacgcgcaccccagagtagtagagttgccaaaaactgatgagggcctcggttttaacatcatggggggtaaggagcagaactccccaatttacatttccagggtgatccccggaggcgtggcggaccggcatgggggattgaaacgtggcgaccagctcctgtccgtcaacggtgtgtcggtggaaggcgagcagcatgagaaggcagtagagctcctgaaggccgcgcaaggtagcgtcaaactagtagtccgatacacaccacgcgtgctggaggaaatggaagcacgttttgagaaaatgcgcagcgccagacgcaggcagcagcatcaatcatatagcagtctggaaagccgcgggtag

SEQ ID NO: 211737 - DNA, 624 bp, Artificial Sequence
  derived and/or modified sequence
atggctgccctggtggagccgctgggattggagagagacgtgtcccgagccgtggaactcctcgagaggctccagcgctcgggagagttgcctccccagaagctgcaagccctccagagggtcctccagagccgcttttgcagcgctatccgcgaagtctatgaacaattatacgataccttagatataaccggctccgcagagattcgggctcatgcaaccgcaaaagccacagtggccgcattcacagcctcagaggggcacgcacatcctcgggttgtggaattgcccaagacggacgaagggctcggattcaatattatgggagggaaggaacagaactcaccgatttacattagtcgagtcattcccggtggagtcgctgaccggcacggaggactcaagaggggagaccagctgctgtctgtgaacggtgttagtgtggagggggagcagcatgaaaaagcggtagaactgctgaaggcagcacaggggtccgtcaagcttgtcgttcgatatacccccagggtcttggaggagatggaggctcgtttcgagaagatgcgcagcgcaagacgccgacagcagcaccagtcatactccagcctggagagcaggggctag

SEQ ID NO: 211738 - DNA, 755 bp, Artificial Sequence
  derived and/or modified sequence
gccggcgccagggcaggcgggcggctggcagctgtggcgccgacatggctgcgctggtggagccgctggggctggagcgggacgtgtcccgggcggttgagctcctcgagcggctccagcgcagcggggagctgccgccgcagaagctgcaggccctccagcgagttctgcagagccgcttctgctccgctatccgagaggtgtatgagcagctttatgacacgctggacatcaccggcagcgccgagatccgagcccatgccacagccaaggccacagtggctgccttcacagccagcgagggccacgcacatcccagggtagtggagctacccaagacggatgagggcctaggcttcaacatcatgggtggcaaagagcaaaactcgcccatctacatctcccgggtcatcccagggggtgtggctgaccgccatggaggcctcaagcgtggggatcaactgttgtcggtgaacggtgtgagcgttgagggtgagcagcatgagaaggcggtggagctgctgaaggcggcccagggctcggtgaagctggttgtccgttacacaccgcgagtgctggaggagatggaggcccggttcgagaagatgcgctctgcccgccggcgccaacagcatcagagctactcgtccttggagtctcgaggttgaaaccacagatctggacgttcacgtgcactctcttcctgtacagtatttattgttcctggcactttatttaaagatatttgaccctca

SEQ ID NO: 211739 - protein, 959 aa, Artificial Sequence
  derived and/or modified sequence
MVAAPCARRLARRSHSALLAALTVLLLQTLVVWNFSSLDSGAGERRGGAAVGGGEQPPPAPAPRRERRDLPAEPAAARGGGGGGGGGGGGRGPQARARGGGPGEPRGQQPASRGALPARALDPHPSPLITLETQDGYFSHRPKEKVRTDSNNENSVPKDFENVDNSNFAPRTQKQKHQPELAKKPPSRQKELLKRKLEQQEKGKGHTFPGKGPGEVLPPGDRAAANSSHGKDVSRPPHARKTGGSSPETKYDQPPKCDISGKEAISALSRAKSKHCRQEIGETYCRHKLGLLMPEKVTRFCPLEGKANKNVQWDEDSVEYMPANPVRIAFVLVVHGRASRQLQRMFKAIYHKDHFYYIHVDKRSNYLHRQVLQVSRQYSNVRVTPWRMATIWGGASLLSTYLQSMRDLLEMTDWPWDFFINLSAADYPIRTNDQLVAFLSRYRDMNFLKSHGRDNARFIRKQGLDRLFLECDAHMWRLGDRRIPEGIAVDGGSDWFLLNRRFVEYVTFSTDDLVTKMKQFYSYTLLPAESFFHTVLENSPHCDTMVDNNLRITNWNRKLGCKCQYKHIVDWCGCSPNDFKPQDFHRFQQTARPTFFARKFEAVVNQEIIGQLDYYLYGNYPAGTPGLRSYWENVYDEPDGIHSLSDVTLTLYHSFARLGLRRAETSLHTDGENSCRYYPMGHPASVHLYFLADRFQGFLIKHHATNLAVSKLETLETWVMPKKVFKIASPPSDFGRLQFSEVGTDWDAKERLFRNFGGLLGPMDEPVGMQKWGKGPNVTVTVIWVDPVNVIAATYDILIESTAEFTHYKPPLNLPLRPGVWTVKILHHWVPVAETKFLVAPLTFSNRQPIKPEEALKLHNGPLRNAYMEQSFQSLNPVLSLPINPAQVEQARRNAASTGTALEGWLDSLVGGMWTAMDICATGPTACPVMQTCSQTAWSSFSPDPKSELGAVKPDGRLR

SEQ ID NO: 211740 - DNA, 2880 bp, Artificial Sequence
  derived and/or modified sequence
atggtggccgccccctgcgccagaagactggccagaagaagccacagcgccctgctggccgccctgaccgtgctgctgctgcagaccctggtggtgtggaacttcagcagcctggacagcggcgccggcgagagaagaggcggcgccgccgtgggcggcggcgagcagcccccccccgcccccgcccccagaagagagagaagagacctgcccgccgagcccgccgccgccagaggcggcggcggcggcggcggcggcggcggcggcggcagaggcccccaggccagagccagaggcggcggccccggcgagcccagaggccagcagcccgccagcagaggcgccctgcccgccagagccctggacccccaccccagccccctgatcaccctggagacccaggacggctacttcagccacagacccaaggagaaggtgagaaccgacagcaacaacgagaacagcgtgcccaaggacttcgagaacgtggacaacagcaacttcgcccccagaacccagaagcagaagcaccagcccgagctggccaagaagccccccagcagacagaaggagctgctgaagagaaagctggagcagcaggagaagggcaagggccacaccttccccggcaagggccccggcgaggtgctgccccccggcgacagagccgccgccaacagcagccacggcaaggacgtgagcagacccccccacgccagaaagaccggcggcagcagccccgagaccaagtacgaccagccccccaagtgcgacatcagcggcaaggaggccatcagcgccctgagcagagccaagagcaagcactgcagacaggagatcggcgagacctactgcagacacaagctgggcctgctgatgcccgagaaggtgaccagattctgccccctggagggcaaggccaacaagaacgtgcagtgggacgaggacagcgtggagtacatgcccgccaaccccgtgagaatcgccttcgtgctggtggtgcacggcagagccagcagacagctgcagagaatgttcaaggccatctaccacaaggaccacttctactacatccacgtggacaagagaagcaactacctgcacagacaggtgctgcaggtgagcagacagtacagcaacgtgagagtgaccccctggagaatggccaccatctggggcggcgccagcctgctgagcacctacctgcagagcatgagagacctgctggagatgaccgactggccctgggacttcttcatcaacctgagcgccgccgactaccccatcagaaccaacgaccagctggtggccttcctgagcagatacagagacatgaacttcctgaagagccacggcagagacaacgccagattcatcagaaagcagggcctggacagactgttcctggagtgcgacgcccacatgtggagactgggcgacagaagaatccccgagggcatcgccgtggacggcggcagcgactggttcctgctgaacagaagattcgtggagtacgtgaccttcagcaccgacgacctggtgaccaagatgaagcagttctacagctacaccctgctgcccgccgagagcttcttccacaccgtgctggagaacagcccccactgcgacaccatggtggacaacaacctgagaatcaccaactggaacagaaagctgggctgcaagtgccagtacaagcacatcgtggactggtgcggctgcagccccaacgacttcaagccccaggacttccacagattccagcagaccgccagacccaccttcttcgccagaaagttcgaggccgtggtgaaccaggagatcatcggccagctggactactacctgtacggcaactaccccgccggcacccccggcctgagaagctactgggagaacgtgtacgacgagcccgacggcatccacagcctgagcgacgtgaccctgaccctgtaccacagcttcgccagactgggcctgagaagagccgagaccagcctgcacaccgacggcgagaacagctgcagatactaccccatgggccaccccgccagcgtgcacctgtacttcctggccgacagattccagggcttcctgatcaagcaccacgccaccaacctggccgtgagcaagctggagaccctggagacctgggtgatgcccaagaaggtgttcaagatcgccagcccccccagcgacttcggcagactgcagttcagcgaggtgggcaccgactgggacgccaaggagagactgttcagaaacttcggcggcctgctgggccccatggacgagcccgtgggcatgcagaagtggggcaagggccccaacgtgaccgtgaccgtgatctgggtggaccccgtgaacgtgatcgccgccacctacgacatcctgatcgagagcaccgccgagttcacccactacaagccccccctgaacctgcccctgagacccggcgtgtggaccgtgaagatcctgcaccactgggtgcccgtggccgagaccaagttcctggtggcccccctgaccttcagcaacagacagcccatcaagcccgaggaggccctgaagctgcacaacggccccctgagaaacgcctacatggagcagagcttccagagcctgaaccccgtgctgagcctgcccatcaaccccgcccaggtggagcaggccagaagaaacgccgccagcaccggcaccgccctggagggctggctggacagcctggtgggcggcatgtggaccgccatggacatctgcgccaccggccccaccgcctgccccgtgatgcagacctgcagccagaccgcctggagcagcttcagccccgaccccaagagcgagctgggcgccgtgaagcccgacggcagactgagatag

SEQ ID NO: 211741 - DNA, 2880 bp, Artificial Sequence
  derived and/or modified sequence
atggtggccgccccatgcgctcgacgcttggcacgtcgctctcattctgctctgctcgctgcccttaccgtgttgctgcttcaaaccctggttgtctggaatttttcaagcttggattctggcgccggtgagaggcggggcggtgcggccgtgggcggcggcgagcagcctcctcctgctcctgccccaagacgtgagcggagggacctgccggccgaacctgcggctgcgagaggaggggggggaggtggtggcgggggcgggggaggacgtggtccacaggccagggctagaggggggggccctggggagcccaggggccaacagccggcctctcgtggcgcgcttcctgctcgcgcccttgacccccatcccagccctctcattacattagaaacgcaggacggttacttctctcatcgcccaaaggaaaaggtgagaactgactcaaacaacgaaaacagcgtgcccaaagattttgagaacgtagacaattctaattttgctccaaggacccagaaacagaaacatcaacccgaactggctaaaaagccacctagcaggcagaaagagctcttaaaaagaaagctggagcaacaggagaaagggaaggggcacaccttcccgggaaagggtcctggggaggtgctcccaccaggcgaccgggcagccgctaactcgtcccatgggaaggatgtctctcgacccccacatgctagaaaaacaggcgggtcaagcccagagactaaatacgatcagcccccgaagtgcgatatttccgggaaggaggcaataagcgctttatcgcgggctaagagcaagcattgcaggcaagaaatcggtgaaacttactgccgacataagctcggcctactgatgccagaaaaggttacacggttttgcccccttgaggggaaggcaaataaaaacgtgcagtgggatgaagactccgtggagtacatgcctgctaaccccgtgaggatagcctttgtgctcgtggtccacggtcgagcatctcgccagttgcagcggatgtttaaggccatttaccacaaagaccacttttactacatccatgtcgacaaacgcagtaattatctacacagacaggtgcttcaggtctctaggcaatactccaacgtgcgagtgacgccctggcgcatggctactatttggggcggcgccagtcttctcagtacctacttgcaatctatgagagacctgctggagatgactgattggccatgggacttcttcatcaatttgagcgcggcagattaccctatccgcaccaatgaccagctggtggccttcctctctcggtacagggacatgaacttcttaaaatcacacggtagagacaatgcccggttcataaggaagcaagggctggataggttgttcctggagtgcgatgcacatatgtggagactgggcgaccggcgaatacctgagggtatagccgtcgatggcgggtctgactggttccttctgaaccgccgtttcgtagagtatgtgacattttccactgatgacctggtgaccaagatgaaacagttctattcttacaccttactgcctgctgagtctttttttcatacagttttggagaattccccccactgcgacacgatggtcgataataatcttcgaattaccaattggaacagaaaattgggatgcaagtgccaatataagcacatagtagactggtgtggctgtagccctaacgatttcaagccccaggacttccaccggttccagcagactgcacggcccaccttttttgccagaaaatttgaagcagtggtcaatcaagaaattataggccagttagactattacctgtacggaaactaccccgcgggaacccctggactgcgctcttattgggagaatgtctacgacgagcccgatggcatccattccctgtctgacgtcaccctgactctctatcacagcttcgccaggctggggctgaggagagcggagacctctctgcacactgacggagagaattcttgtaggtattatcccatgggacatcctgcatcagtgcatctgtactttctcgcagaccgattccaagggtttctcatcaagcatcatgctacaaatctggcggtttccaagctggaaacactcgaaacttgggtaatgccaaaaaaggtgttcaaaatcgcttcccccccaagtgactttggacgcttgcagttcagtgaagtgggtactgactgggatgccaaggagcgtctttttcgtaactttggcgggcttctagggccaatggatgagccagtggggatgcagaagtggggtaagggccctaacgtgaccgtcacagtcatctgggtggaccctgtcaatgttattgccgccacctacgatatcctgatcgagtccaccgccgaattcacgcactacaagccacccctaaacttgccacttcggcccggcgtctggacagtgaagatactccatcattgggtgcccgttgccgaaactaaatttctggtggctcctctcactttctcgaataggcaaccgattaagcctgaggaagctttgaaactgcacaacgggcctctaagaaacgcctacatggaacagtcttttcagtccctgaatccagtgctgtcactcccgattaatccggcgcaggttgaacaggccagacgcaacgccgcttctactggcaccgctcttgaagggtggcttgattctttggtgggtggtatgtggactgccatggatatttgcgctacggggccaaccgcctgccccgtgatgcagacttgttcacaaacagcctggtcaagcttttcaccagatcccaaaagtgaactgggggctgtaaagccagatggcagactgcgatag

SEQ ID NO: 211742 - DNA, 2880 bp, Artificial Sequence
  derived and/or modified sequence
atggtggccgccccctgtgcccggcggctggcccggcgcagccacagcgccctgctggccgccctgactgtgctgctgctgcagaccctggtggtgtggaacttcagcagcctggacagcggggccggggagaggagaggaggagctgctgtgggcggcggggagcagcccccaccagccccagccccccggcgggagcggcgggacctgcctgctgagcctgctgctgcccggggcggcggcggcggcggcggcggcggcggcggcggccggggcccccaggcccgggcccggggcggcggccctggagagccccggggccagcagcctgccagcagaggagccctgcctgcccgggccctggacccccaccccagccccctcatcaccctggagacccaggacggctacttcagccaccggcccaaggagaaggtgaggacagacagcaacaatgaaaattctgtgcccaaggactttgaaaatgtggacaacagcaactttgcccccaggacccagaagcagaagcaccagcctgagctggccaagaagccacccagccggcagaaggagctgctgaagaggaagctggagcagcaggagaagggcaagggccacaccttccctggaaaaggacctggagaggtgctgcccccaggggacagagctgctgccaacagcagccacggcaaggatgtgtcccggcccccccacgccaggaagacaggaggcagcagccctgagaccaagtatgaccagccccccaagtgtgacatcagcggcaaggaggccatcagcgccctgagccgggccaagagcaagcactgccggcaggagatcggggagacctactgccgccacaagctgggcctgctgatgcctgagaaggtgacccgcttctgccccctggagggcaaggccaacaagaatgtgcagtgggatgaagattctgtggagtacatgcctgccaaccctgtgcgcatcgcctttgtgctggtggtgcacggccgggccagccggcagctgcagaggatgttcaaggccatctaccacaaggaccacttctactacatccacgtggacaagaggagcaactacctgcaccggcaggtgctgcaggtgtcccggcagtacagcaatgtgcgggtgaccccctggaggatggccaccatctggggcggggccagcctgctgagcacctacctgcagagcatgagggacctgctggagatgacagactggccctgggacttcttcatcaacctgtctgctgctgactaccccatccgcaccaatgaccagctggtggccttcctgagccgctacagagacatgaacttcctgaagagccacggccgggacaatgcccgcttcatcaggaagcagggcctggacaggctcttcctggagtgtgatgcccacatgtggaggctgggggaccggcgcatccctgagggcattgctgtggatggcggcagtgactggttcctgctgaacagaagatttgtggagtatgtgaccttcagcacagatgacctggtgaccaagatgaagcagttctacagctacaccctgctgcctgctgagagcttcttccacacagtgctggagaacagcccccactgtgacaccatggtggacaacaacctgcgcatcaccaactggaacaggaagctgggctgcaagtgccagtacaagcacatcgtggactggtgtggctgcagccccaatgacttcaagccccaggacttccaccgcttccagcagacagcccggcccaccttctttgccaggaagtttgaggccgtggtgaaccaggagatcatcggccagctggactactacctgtatggcaactacccagctggcaccccaggcctgcggagctactgggagaatgtgtatgatgagccagatggcatccacagcctgagtgatgtgaccctgaccctgtaccacagctttgcccggctgggcctgcggcgggcagagaccagcctgcacacagatggagagaacagctgccgctactaccccatgggccacccagcctctgtgcacctgtacttcctggccgaccgcttccagggcttcctgatcaagcaccacgccaccaacctggccgtgtccaagctggagaccctggagacctgggtgatgcccaagaaggtgttcaagatcgccagcccccccagcgactttggccgcctgcagttcagcgaggtgggcacagactgggatgccaaggagcggctcttcaggaactttggaggcctgctgggccccatggatgagcctgtgggcatgcagaagtggggcaagggccccaacgtgacagtgaccgtcatctgggtggaccctgtgaatgtgattgctgccacctatgacatcctgattgagagcacagctgagttcacccactacaagccacccctgaacctgcccctgcggcctggggtgtggacagtgaagatcctgcaccactgggtgcctgtggccgagaccaagttcctggtggcccccctgaccttcagcaaccggcagcccatcaagccagaggaggccctgaagctgcacaacggccccctgagaaatgcctacatggagcagagcttccagagcctgaaccctgtgctgagcctgcccatcaacccagcccaggtggagcaggccaggagaaatgctgccagcactggaacagccctggagggctggctggacagcctggtgggcggcatgtggacagccatggacatctgtgccaccggccccacagcctgccctgtgatgcagacctgcagccagacagcctggagcagcttctccccagaccccaagtctgagctgggcgctgtgaagccagatggccgcctgaggtag

SEQ ID NO: 211743 - DNA, 2880 bp, Artificial Sequence
  derived and/or modified sequence
atggtggccgccccctgcgcccggcggctggcccggcggagccactcagctcttttggctgccctgactgtgctgctgctgcaaaccctggtggtgtggaactttagctccctggatagcggagcgggtgaacggaggggcggtgccgcagttggtggaggcgaacaaccccccccagctccagcacctcgacgtgagagaagagatctccccgccgaacctgccgcggcaagaggtggtgggggtggcggcggagggggtgggggcggaaggggccctcaggcccgagcaaggggcgggggaccgggtgagcctcgaggtcagcagccagcctctcgtggcgctttgcccgctagggctctggacccccacccatccccgctgataacccttgaaacacaagatggctatttcagccaccggccgaaggagaaagtgagaacagattccaacaatgagaactccgtgccaaaggactttgagaacgtcgacaactcaaacttcgctccccgcacgcagaagcaaaaacaccagcctgagctagccaaaaagccaccgagccggcaaaaggagctgctgaaaagaaagctggagcaacaagaaaagggcaagggccacactttccccggcaaaggtcctggagaggtccttccaccgggagaccgtgctgccgcaaacagctctcacgggaaagacgtcagccgaccaccccacgcccgtaagaccgggggatcttcgccagagaccaagtacgaccagcctccaaagtgcgatatttcaggcaaggaggccatcagtgccctgtcaagagccaagtccaagcattgccgccaggaaataggagagacatactgtaggcataagctaggcctactgatgccagaaaaggtcacacgcttttgccctctggaggggaaggctaataaaaatgtgcagtgggacgaggacagcgtagaatatatgcccgcaaatccagtgaggatcgcgttcgtgctagttgttcacggacgcgctagcaggcagctgcagagaatgttcaaggctatctaccataaagaccatttttattacatccatgtggacaaacgaagtaattatcttcatcggcaggtgctgcaggtcagtaggcaatattccaatgtgagggtgaccccatggcgcatggcaaccatctggggaggcgcttctttgcttagtacatatcttcagtcaatgagagatttgctagagatgaccgactggccatgggatttttttataaatctctcagccgccgattacccaatcagaaccaacgaccagctagtggcgtttctcagccggtatcgggacatgaattttctgaaatcacatgggagagataatgcaaggtttataaggaaacagggccttgatcggctctttttagaatgcgatgctcatatgtggcggctaggggaccgccgcattccagagggaatagcggtggacggcggctctgactggtttcttctgaaccgtcggtttgtggaatatgtgaccttctccacagacgacctggttactaagatgaagcagttctattcttacaccctactgcctgcggaatccttcttccatactgtgttggagaactccccacactgtgacactatggtggataataacctacgcattacgaactggaataggaagcttggctgtaaatgccaatataaacacattgtcgactggtgtggttgtagcccaaatgactttaagcctcaggattttcacaggttccagcagaccgctaggccgacattctttgccaggaaattcgaagccgttgtgaatcaggagattatcggtcagctcgactattacctgtacggcaactacccagccggcactccaggtctgcggagctactgggaaaatgtctatgacgagcctgatggcatacacagcctgagcgatgttactctcacactatatcattccttcgctagactggggctgagacgggccgagacctcactgcatactgacggtgagaattcctgtcggtactatcctatgggccaccctgccagcgtccatctctattttttggccgacaggtttcagggtttcctcatcaagcaccacgcgacaaatttggccgtgtccaagcttgaaaccctcgagacatgggttatgcctaagaaggtgtttaaaatcgcttcccccccatcagactttgggcgcctacagttttccgaggtgggcacggattgggatgccaaggagagacttttccggaactttgggggattgctaggccccatggacgaaccggtaggaatgcagaaatggggaaaaggccctaatgtaacggtcactgtcatttgggtggacccagttaatgtgatcgccgccacatatgacatcctgattgaaagcaccgcagaatttacacactacaagcctccacttaaccttcccctgaggcctggcgtgtggaccgttaagattcttcaccactgggtgcccgtcgctgagactaagttcctggtcgcaccgctcacattcagtaaccggcagcccattaagcctgaggaagcactgaaactgcataacggcccactgagaaacgcctacatggagcagtccttccagtcactaaatccagtgttatctctcccgatcaatcctgcccaggtcgaacaggcgcgccggaacgccgcatccacaggaaccgctctcgagggctggttagattccctggtagggggcatgtggaccgccatggatatttgtgccactgggcccactgcctgtcccgtcatgcagacctgttctcagaccgcatggagctccttttcccccgatccgaaatcagagctgggcgccgtcaagcccgatggccgtctgaggtag

SEQ ID NO: 211744 - DNA, 2880 bp, Artificial Sequence
  derived and/or modified sequence
atggtcgcagccccttgtgccagacgactggcgcgacgctcacactctgccttactagcggcactcacggtgctcctcctgcagactctagtcgtctggaacttctcatctctcgacagcggcgctggggaaagacgaggcggagcagctgtgggagggggagagcaaccaccgccagccccagcacctcgacgggaaaggcgggacctacctgcagagccggctgccgctcgtggagggggaggaggaggcggaggtggtggaggaggacgcggaccccaggcccgtgctcggggaggaggccctggagaaccaagaggccagcaacctgcctcccggggtgctttgcccgctcgcgctctggatcctcacccgtcaccgctgatcacgctcgaaacccaggacggctatttttcacaccgcccaaaggaaaaagttcgaaccgactccaataatgagaactccgtccctaaggactttgagaacgtcgacaattcaaattttgctccccgtacacagaagcaaaaacaccagcctgaactggctaaaaaaccaccctctcggcagaaagagttactcaagcgtaagctggaacaacaggagaaaggaaaaggccatacattccctggtaaagggccaggtgaggtgctgcccccaggcgacagggctgctgcaaactccagtcacgggaaggacgtctccaggccccctcatgctcgcaagacaggtggaagttctccggagaccaagtacgaccagccgccaaaatgtgacattagcggcaaagaagccatctctgctctgtcaagagctaagagtaagcactgtcggcaggagatcggagagacctattgtaggcacaaactgggactgcttatgcctgaaaaggtcactcgcttttgccctctggagggtaaagctaacaagaatgtccagtgggatgaggactcagttgagtatatgcctgctaatcctgtgcgtatagccttcgttctcgtggtccacggcagggcatcacgccagcttcaaagaatgtttaaagcaatctatcacaaagatcacttttactatatccacgtcgataagcgtagtaattatctgcaccggcaagtgctgcaggtctccaggcagtactccaacgtgcgcgtcaccccttggagaatggcaaccatctggggcggtgcctctctcctctcgacataccttcaatctatgagggacctcttagaaatgaccgactggccctgggacttcttcattaatctcagtgccgcagattaccctatccgcacaaatgatcagctcgttgcctttttgagccggtaccgggacatgaatttccttaagagccacggtcgagacaacgccagattcatcagaaaacaagggctggacagattgtttctggaatgcgacgcccatatgtggcggctgggagaccgcaggattccggaaggaatagcagtggacggcggttctgactggtttctcctcaatagacgctttgtggagtacgtcactttctccaccgacgatctagttaccaaaatgaaacagttttactcctataccctgcttcctgctgagagcttctttcatacagtgctggagaactcacctcattgcgacaccatggtggacaacaatttgcggattaccaattggaaccggaagctgggttgcaagtgccagtataaacacatagttgactggtgtgggtgctccccaaatgacttcaaaccacaggattttcacagatttcagcagacagccagacccacttttttcgcgagaaagttcgaagcggtggtaaaccaagagattattggacaactggattattacctgtacggcaattatccagctggcactccagggctaagatcttattgggagaacgtatatgatgaacctgacggtatccactccctgtccgacgtgaccctaacactgtatcattcttttgccagactcggattgaggagggccgagacatctctccacactgatggggagaacagctgccggtattatccaatggggcacccagccagcgtacatctgtattttctggctgaccgatttcagggctttttgataaaacaccatgccacgaacctggcggtatctaaactcgagacactggaaacatgggttatgccgaaaaaagtgttcaaaatcgcgtctcccccatcagacttcggacgtttgcagtttagcgaagttggaactgattgggacgctaaggaacgattatttcggaattttggtggtctactaggtcccatggatgagcccgtcggaatgcagaaatggggtaaggggcctaacgtgacagttaccgtgatttgggtcgatcctgtaaacgtgattgctgcaacttacgatattctcattgagagcactgctgaattcacccactataagccccctctaaatctccccctgcgaccaggagtatggactgtcaagatcttgcatcactgggtcccagtagccgagaccaagtttctggtggctcctctgaccttttctaaccgccaaccaatcaagcccgaggaagcactgaagctgcacaacggcccacttaggaatgcgtacatggagcagtcgttccagtctttgaatccagtcctttccctgcccatcaaccctgcccaggttgagcaggctagacgtaatgccgcatctactggcactgcgcttgaaggatggctggactcactggttggcggtatgtggaccgctatggacatttgtgccacagggcctactgcctgtccggtaatgcaaacatgctcccagacagcatggagcagtttttctcccgatcccaaatccgaattgggcgcagttaaaccagatgggcgactgcgatag

SEQ ID NO: 211745 - DNA, 4263 bp, Artificial Sequence
  derived and/or modified sequence
gcggccgcgggagctgcggggagcgcgggggcggcccggagcgtgccggggtccccgcgcctcgctcgccggccgcgctccgaagatggtggcggcgccgtgcgcccggaggctggcccggcgctcgcactcggcgctgctcgcggcgctcacggtgctgctgctgcagacgctggtcgtgtggaatttcagcagcctcgactccggggccggggagcgccgcgggggcgcagcggtcggcggcggggagcagccgcccccggccccggccccgcgccgggagcgccgggacctgcccgccgagccggctgcagcccgaggaggaggaggaggcggcggcggaggaggaggaggacgggggccccaggcgcgggcgcggggaggcggccccggagaaccgcggggacagcagccggccagccggggggcactgcccgcccgggctctggatccacacccaagtccgctcatcaccctggagactcaggatggctacttttctcatcggccgaaagagaaagtgcgaacagacagcaacaacgagaactctgtccccaaagactttgagaatgtcgacaacagcaacttcgcacccaggactcaaaagcagaagcaccagcctgagttggcgaagaagccaccgagtagacagaaggagcttttgaaaaggaagctggaacagcaggagaaaggaaaaggacatacattccctgggaaaggccccggtgaggtgctgcctcccggggacagagccgcagccaacagcagccacgggaaggatgtgtccagaccgcctcatgccaggaaaactgggggcagctcccccgagaccaagtatgaccagccccctaagtgtgacatctcaggcaaggaggccatctctgccctgtcccgtgctaagtccaagcactgccgccaggagattggggagacttactgccgccacaagttagggctgctgatgcctgagaaggtgactcggttctgccccctcgagggtaaagccaacaagaacgtgcagtgggacgaggactccgtggagtacatgccagccaacccggtcagaatcgcctttgtcctggtggtccacggccgtgcctctcggcagttgcagcgcatgttcaaggccatctaccacaaagaccacttctactacatccacgtggacaagcgctctaattacctgcatcggcaagtgctccaggtctccaggcagtacagcaatgtccgcgtcaccccctggagaatggccaccatctggggaggagccagcctcctgtccacctacctgcagagcatgcgggacctcctggagatgaccgactggccctgggacttcttcatcaacctgagtgcggccgactaccccatcaggacaaatgaccagttggtggcgtttctctcccgataccgagatatgaatttcttgaagtcacacggccgggacaatgcaaggttcattcggaagcagggcctggatcggctcttcctggagtgcgacgctcacatgtggcgcctgggagatcggcggatcccagagggcattgccgtggatggcggttcggactggttcctgctgaaccggaggtttgtagaatatgtgaccttctccacagacgatctggtgaccaagatgaaacagttctactcctacaccctgcttcctgctgagtccttcttccatacggtcctggagaacagcccccactgcgacaccatggtggacaacaacctgcgcatcaccaactggaatcgcaagctgggctgcaagtgccagtacaagcacatcgtggactggtgcggctgctcccccaatgacttcaagccgcaggacttccaccgcttccagcagacagcccggcctaccttctttgcccgcaagtttgaagccgtggtgaatcaggaaatcattgggcagctggactattacctgtacgggaactaccctgcaggtaccccgggcctgcgctcctactgggagaatgtctacgatgagcctgacggcatccacagcctgagcgacgtgacactcaccttgtaccactcctttgcccgcctgggtcttcgacgggccgagacgtccctgcacacggatggggagaacagctgccgatactacccaatgggccacccagcatctgtgcacctctacttccttgctgaccgcttccagggctttctgatcaagcatcatgctaccaatctggctgtgagcaaactagagactctggagacctgggtgatgccgaaaaaagtcttcaagatcgcaagcccacccagtgactttgggaggcttcagttttccgaggtcggcactgactgggatgccaaggagaggctattccgcaactttgggggtcttctggggcccatggatgagccggtgggtatgcagaagtgggggaagggacctaatgtgaccgtgaccgtcatttgggtggatcccgtcaatgtcatcgcagccacctacgacatcctcattgagtccactgccgaattcacacactacaagccccctttgaacttgcccctgaggcctggggtctggacagtgaaaattctccaccactgggtgccagttgcagagaccaaattcctcgttgcgcctctgaccttctcgaacaggcagcccatcaaacctgaggaggcactgaagctgcacaatgggcccctccgcaatgcctacatggagcagagcttccagagcctaaaccccgtcctcagcctgcccatcaaccccgcccaggtggaacaggcacggaggaacgcagcctccacgggcacagcgctggagggatggctggactcgttggtgggcgggatgtggactgccatggacatctgtgccacgggccccacagcctgcccggtcatgcagacctgcagccagacggcctggagctccttcagccctgaccccaagtcggagctgggggcagtcaaacctgatggccggctcaggtagcactgggcacgaggagtgggccacagcaggatctcaacgggaaagcagccagaggggttgtggggcctgaaccccggcctcccaccctgggggaggccctctgtgaatgggtctctcctggccatagaatgatggaaagggaaggtcagcaggtcaaagcaggatcagccaacaacctgcctttggcaagctgcgggtgggatggctcagtccctgcactgtgactgtctcacctcttctggttgatcctcaagtcctacaggttccttgtcttccccttccagtgacccacccctgaccccagacgtgtgattttcagacttttctttcgagcagcagaacttcgtttacggagcacagtcataagtggaggttcagggtgctgacgaaatccaagctgctctggttgaagctgacaagtgcgaggttccctcccaaagctcagccctctgggcggtccccttgcccagggtatctcctacggtacctcttcagaacccaagggctctgcaaatgccagtttgacaagcactgcccagaccaaccatgggttcaaactccagccctgccctttggttcatttttctgcttctcttggctgggggactctggtgccagccttgaaagtcatggtcgtgggccctttcccatggaggctgcagccttaggagagctctgagcctctcagcagccctccttgggttgaactattctccttagtaactaggtaagtgggaaagccttttgatgtggcatggccaaggtccagccacaagtgcaactgccacctgtccaggggtctgggcctccttccctcaaggctgccacacaaagtagcagaaataggatgatgtttgtgagcaccagactcaagaccatgaccttctttgatccttgaaaatgggaactttgacagccatgaccatgaaactcacaaggcaacgcgatgaaactcacaaagcaatgcttggagcaaaactcctgagctagacagcacagcagcacccatcccctgccagagcccttccgttctgaggtcagacacacaaaaccttcgtcaattgcacaccggtgctgttgggagtgaccaaaccacatgaaccagacttttcccgtccaggaaatagcatttcagatttggtttttaatttcatgcccttcggccacaggctcaacgggacatgcaacataaaaatgggaaggttatttaaacaacaaaaaacagtatgatttaagtgttgagttaccagaaacccaaaaggtttccttgccacgagccccctggagtgtcatccctg

SEQ ID NO: 211746 - protein, 865 aa, Artificial Sequence [sequence omitted]

SEQ ID NO: 211747 - protein, 676 aa, Artificial Sequence
  derived and/or modified sequence
MVASARVQKLVRRYKLAIATALAILLLQGLVVWSFSGLEEDEAGEKGRQRKPRPLDPGEGSKDTDSSAGRRGSTGRRHGRWRGRAESPGVPVAKVVRAVTSRQRASRRVPPAPPPEAPGRQNLSGAAAGEALVGAAGFPPHGDTGSVEGAPQPTDNGFTPKCEIVGKDALSALARASTKQCQQEIANVVCLHQAGSLMPKAVPRHCQLTGKMSPGIQWDESQAQQPMDGPPVRIAYMLVVHGRAIRQLKRLLKAVYHEQHFFYIHVDKRSDYLHREVVELAQGYDNVRVTPWRMVTIWGGASLLRMYLRSMRDLLEVPGWAWDFFINLSATDYPTRTNEELVAFLSKNRDKNFLKSHGRDNSRFIKKQGLDRLFHECDSHMWRLGERQIPAGIVVDGGSDWFVLTRSFVEYVVYTDDPLVAQLRQFYTYTLLPAESFFHTVLENSLACETLVDNNLRVTNWNRKLGCKCQYKHIVDWCGCSPNDFKPQDFLRLQQVSRPTFFARKFESTVNQEVLEILDFHLYGSYPPGTPALKAYWENTYDAADGPSGLSDVMLTAYTAFARLSLHHAATAAPPMGTPLCRFEPRGLPSSVHLYFYDDHFQGYLVTQAVQPSAQGPAETLEMWLMPQGSLKLLGRSDQASRLQSLENRGLSMLPRLVSNSWPQAVLPLQPPKALG

SEQ ID NO: 211748 - DNA, 2598 bp, Artificial Sequence
  derived and/or modified sequence
atggtggccagcgccagagtgcagaagctggtgagaagatacaagctggccatcgccaccgccctggccatcctgctgctgcagggcctggtggtgtggagcttcagcggcctggaggaggacgaggccggcgagaagggcagacagagaaagcccagacccctggaccccggcgagggcagcaaggacaccgacagcagcgccggcagaagaggcagcaccggcagaagacacggcagatggagaggcagagccgagagccccggcgtgcccgtggccaaggtggtgagagccgtgaccagcagacagagagccagcagaagagtgccccccgcccccccccccgaggcccccggcagacagaacctgagcggcgccgccgccggcgaggccctggtgggcgccgccggcttccccccccacggcgacaccggcagcgtggagggcgccccccagcccaccgacaacggcttcacccccaagtgcgagatcgtgggcaaggacgccctgagcgccctggccagagccagcaccaagcagtgccagcaggagatcgccaacgtggtgtgcctgcaccaggccggcagcctgatgcccaaggccgtgcccagacactgccagctgaccggcaagatgagccccggcatccagtgggacgagagccaggcccagcagcccatggacggcccccccgtgagaatcgcctacatgctggtggtgcacggcagagccatcagacagctgaagagactgctgaaggccgtgtaccacgagcagcacttcttctacatccacgtggacaagagaagcgactacctgcacagagaggtggtggagctggcccagggctacgacaacgtgagagtgaccccctggagaatggtgaccatctggggcggcgccagcctgctgagaatgtacctgagaagcatgagagacctgctggaggtgcccggctgggcctgggacttcttcatcaacctgagcgccaccgactaccccaccagaaccaacgaggagctggtggccttcctgagcaagaacagagacaagaacttcctgaagagccacggcagagacaacagcagattcatcaagaagcagggcctggacagactgttccacgagtgcgacagccacatgtggagactgggcgagagacagatccccgccggcatcgtggtggacggcggcagcgactggttcgtgctgaccagaagcttcgtggagtacgtggtgtacaccgacgaccccctggtggcccagctgagacagttctacacctacaccctgctgcccgccgagagcttcttccacaccgtgctggagaacagcctggcctgcgagaccctggtggacaacaacctgagagtgaccaactggaacagaaagctgggctgcaagtgccagtacaagcacatcgtggactggtgcggctgcagccccaacgacttcaagccccaggacttcctgagactgcagcaggtgagcagacccaccttcttcgccagaaagttcgagagcaccgtgaaccaggaggtgctggagatcctggacttccacctgtacggcagctacccccccggcacccccgccctgaaggcctactgggagaacacctacgacgccgccgacggccccagcggcctgagcgacgtgatgctgaccgcctacaccgccttcgccagactgagcctgcaccacgccgccaccgccgccccccccatgggcacccccctgtgcagattcgagcccagaggcctgcccagcagcgtgcacctgtacttctacgacgaccacttccagggctacctggtgacccaggccgtgcagcccagcgcccagggccccgccgagaccctggagatgtggctgatgccccagggcagcctgaagctgctgggcagaagcgaccaggccagcagactgcagagcctggaggtgggcaccgactgggaccccaaggagagactgttcagaaacttcggcggcctgctgggccccctggacgagcccgtggccgtgcagagatgggccagaggccccaacctgaccgccaccgtggtgtggatcgaccccacctacgtggtggccaccagctacgacatcaccgtggacaccgagaccgaggtgacccagtacaagccccccctgagcagacccctgagacccggcccctggaccgtgagactgctgcagttctgggagcccctgggcgagaccagattcctggtgctgcccctgaccttcaacagaaagctgcccctgagaaaggacgacgccagctggctgcacgccggccccccccacaacgagtacatggagcagagcttccagggcctgagcagcatcctgaacctgccccagcccgagctggccgaggaggccgcccagagacacacccagctgaccggccccgccctggaggcctggaccgacagagagctgagcagcttctggagcgtggccggcctgtgcgccatcggccccagcccctgccccagcctggagccctgcagactgaccagctggagcagcctgagccccgaccccaagagcgagctgggccccgtgaaggccgacggcagactgagatag

SEQ ID NO: 211749 - DNA, 2031 bp, Artificial Sequence
  derived and/or modified sequence
atggtggccagcgccagagtgcagaagctggtgagaagatacaagctggccatcgccaccgccctggccatcctgctgctgcagggcctggtggtgtggagcttcagcggcctggaggaggacgaggccggcgagaagggcagacagagaaagcccagacccctggaccccggcgagggcagcaaggacaccgacagcagcgccggcagaagaggcagcaccggcagaagacacggcagatggagaggcagagccgagagccccggcgtgcccgtggccaaggtggtgagagccgtgaccagcagacagagagccagcagaagagtgccccccgcccccccccccgaggcccccggcagacagaacctgagcggcgccgccgccggcgaggccctggtgggcgccgccggcttccccccccacggcgacaccggcagcgtggagggcgccccccagcccaccgacaacggcttcacccccaagtgcgagatcgtgggcaaggacgccctgagcgccctggccagagccagcaccaagcagtgccagcaggagatcgccaacgtggtgtgcctgcaccaggccggcagcctgatgcccaaggccgtgcccagacactgccagctgaccggcaagatgagccccggcatccagtgggacgagagccaggcccagcagcccatggacggcccccccgtgagaatcgcctacatgctggtggtgcacggcagagccatcagacagctgaagagactgctgaaggccgtgtaccacgagcagcacttcttctacatccacgtggacaagagaagcgactacctgcacagagaggtggtggagctggcccagggctacgacaacgtgagagtgaccccctggagaatggtgaccatctggggcggcgccagcctgctgagaatgtacctgagaagcatgagagacctgctggaggtgcccggctgggcctgggacttcttcatcaacctgagcgccaccgactaccccaccagaaccaacgaggagctggtggccttcctgagcaagaacagagacaagaacttcctgaagagccacggcagagacaacagcagattcatcaagaagcagggcctggacagactgttccacgagtgcgacagccacatgtggagactgggcgagagacagatccccgccggcatcgtggtggacggcggcagcgactggttcgtgctgaccagaagcttcgtggagtacgtggtgtacaccgacgaccccctggtggcccagctgagacagttctacacctacaccctgctgcccgccgagagcttcttccacaccgtgctggagaacagcctggcctgcgagaccctggtggacaacaacctgagagtgaccaactggaacagaaagctgggctgcaagtgccagtacaagcacatcgtggactggtgcggctgcagccccaacgacttcaagccccaggacttcctgagactgcagcaggtgagcagacccaccttcttcgccagaaagttcgagagcaccgtgaaccaggaggtgctggagatcctggacttccacctgtacggcagctacccccccggcacccccgccctgaaggcctactgggagaacacctacgacgccgccgacggccccagcggcctgagcgacgtgatgctgaccgcctacaccgccttcgccagactgagcctgcaccacgccgccaccgccgccccccccatgggcacccccctgtgcagattcgagcccagaggcctgcccagcagcgtgcacctgtacttctacgacgaccacttccagggctacctggtgacccaggccgtgcagcccagcgcccagggccccgccgagaccctggagatgtggctgatgccccagggcagcctgaagctgctgggcagaagcgaccaggccagcagactgcagagcctggagaacagaggcctgagcatgctgcccagactggtgagcaacagctggccccaggccgtgctgcccctgcagccccccaaggccctgggctag

SEQ ID NO: 211750 - DNA, 2598 bp, Artificial Sequence
  derived and/or modified sequence
atggtggcctccgcacgggtgcagaagttggtccgccgttataaactggctatcgccaccgctctggccattctgctgctgcaaggcctcgttgtgtggagcttctccggccttgaggaggatgaagctggggagaaagggagacagcgtaagccccgccccttggaccctggtgagggcagtaaagatactgatagttctgccggacgccgagggtccacgggcaggagacatggtcggtggcggggccgggccgagagtcccggagtacccgtagctaaagtagtacgggctgtcacaagcaggcaaagagcaagccgacgcgttccccctgctccaccccctgaggccccagggagacagaatttgtctggcgcagccgccggggaagccctggtcggggccgcaggttttccaccacacggagacactggttcagttgaaggtgcaccacagccaaccgataatggtttcacacctaaatgtgagatcgtaggaaaggacgcactctcggccctggctcgagccagtacgaagcagtgtcagcaagagattgccaatgtcgtttgcctgcaccaggccgggtccttgatgcccaaggccgttccacgccactgtcagttgaccgggaaaatgtctccaggcatacagtgggacgagtctcaagcacagcagccaatggacggacctccagtgcgaatagcctatatgcttgtggtgcatgggagggctattcggcagctcaaacgactgctcaaagcagtgtatcacgaacagcacttcttctatattcatgtggacaagagaagcgactatttgcatagagaagttgttgaactcgcccaaggctacgataacgttcgtgtgacaccatggaggatggtcacaatctggggcggggcaagccttctgcggatgtatttgagatcaatgagggacctgctggaagtcccaggctgggcatgggatttcttcattaacctgtctgccacagactacccgactcgtacaaatgaagaactggtcgcctttctatctaaaaacagggataaaaactttctgaaaagtcatggcagagacaactctaggttcatcaagaaacaaggcctggataggctgtttcatgaatgcgatagccacatgtggcgactgggagagaggcagatacccgctggtattgttgttgacggcggctccgattggtttgtgttaacaaggtcattcgtagagtatgtagtgtacacggacgaccccctcgtcgctcagttaagacaattttacacctacacactcctgccagccgagagcttctttcatacggtgttagaaaactcactggcttgcgaaactcttgtggacaacaacctcagagtgacaaattggaaccgaaaactcggctgcaagtgtcagtataagcatatcgtcgactggtgtggctgctccccaaatgacttcaaaccacaagatttcttacgtctgcagcaggtgagccgccccaccttctttgcacgcaagtttgagagtaccgtcaaccaggaagtgctggaaatactcgattttcacctttatggctcatacccgcccggcacccctgccctcaaagcctactgggagaatacttacgacgccgcagacggaccatccggcttatctgatgtaatgcttacagcttacactgcttttgcacgtctgtccttgcatcacgccgcaaccgcagccccgcctatgggcacccctctgtgcagatttgaacctcgggggctgccatcctctgttcacctctatttctatgatgatcatttccaggggtatctggtgacccaggctgtccagcctagcgctcagggccccgctgagacattagagatgtggttaatgccacagggtagtctcaagctcctgggtcgtagcgatcaggcatcccggctgcagagcctggaggtcggcaccgattgggatccaaaggagagactttttcgtaacttcggcggactcctgggacccttggatgaacctgtcgcggttcagcggtgggcgaggggaccaaaccttactgctaccgtcgtttggatcgaccccacttacgtggtggccaccagttacgacatcacagtggatactgagactgaagttacacagtataagccccctcttagccggccgcttcgtccgggcccatggaccgtgcggctccttcagttctgggagcctttgggggaaacaagatttcttgttctcccactgacttttaatcgaaagctgcctctgcggaaggatgacgcaagttggttgcacgccggcccgccacataatgaatacatggagcagagcttccagggattgagctctatactcaatctcccccagcccgaattagctgaagaagctgcccaacgacatacacagctgactggaccggctttagaggcttggactgatcgcgagcttagctcattttggtccgtggccggactctgcgccatcggtccctctccatgcccgagcttagagccatgccggctgacttcgtggtcctccttatcaccggatcccaaatcagagttggggcctgttaaagcagatggccgcttacggtag

SEQ ID NO: 211751 - DNA, 2031 bp, Artificial Sequence
  derived and/or modified sequence
atggtcgcatcagcacgagttcaaaagctagttcgtcggtataaacttgcaatcgccacggctcttgctatattgctcctccagggacttgtggtgtggagtttttccgggctggaggaggacgaggcaggggaaaagggcaggcagagaaagccccggcccctcgaccccggcgagggtagtaaggacacagatagtagtgcaggcaggaggggctctaccggtaggcgacacggacggtggcggggtagggctgagagccctggtgtacccgttgccaaggtggtgcgcgccgtgacctctcgtcagcgtgcctcacgcagggtgccccccgcacctccacctgaagcgcctggaagacagaacctgtccggcgctgcagccggtgaagcccttgtgggggccgcgggattcccgccgcacggcgatacaggctcagtggagggggcaccccagccaactgacaacggatttactccgaaatgtgagattgttggcaaggatgccctcagtgccctcgcccgcgcctctacaaaacagtgtcagcaggagatagccaatgttgtgtgtctgcatcaggccggaagcctgatgccgaaagccgtccctcgccattgccagttgaccggaaaaatgagccctggaattcagtgggacgagtcccaagcccagcagccaatggacggccccccggttcgtatcgcctacatgttagtggttcacgggcgagccattcggcaattgaagcggctgctcaaggctgtctaccatgaacagcacttcttctacattcatgttgataaacggagtgattacctgcatcgcgaagtagtggaactggcccagggatatgataacgttagagttaccccatggcgaatggtgaccatctgggggggagcctcactccttagaatgtacttgcggtcgatgagagatctcttagaggtgcctggttgggcctgggatttcttcattaatctgtctgctaccgactacccaactcgcacaaatgaagagcttgtggcattcttaagtaagaaccgagataagaacttcctgaaatcccatggccgcgataattcgcgatttatcaaaaagcagggcctggaccgccttttccatgaatgtgacagtcacatgtggcggctgggtgagagacagattcctgcagggattgtagtcgatggtggatcagattggtttgtcttaactaggagttttgttgagtatgttgtctacacagatgacccgctggtggcccagttgaggcaattttacacctacacactgctccccgccgaatcattcttccacaccgtcttggagaactcactggcctgcgagacactggtcgacaacaacttacgggtgaccaactggaatcgaaagctggggtgtaaatgccagtacaagcatatcgttgactggtgcgggtgctctcctaacgacttcaagccccaggatttcctgcgcctacagcaggtgtcgcgccccacattcttcgcccggaagttcgagtcaactgttaatcaggaggtactggagatactggattttcatctatatggctcttatcctcctggcactcccgctctcaaggcatattgggaaaatacttatgatgccgccgacggcccttcagggttgtccgatgtcatgctgactgcatataccgccttcgcgagacttagcttacaccacgctgcaacagcagccccaccaatgggaaccccgctatgtagatttgagcccagggggctgccaagtagtgtgcacctgtacttctacgacgaccacttccagggatatctcgtgactcaggccgtgcaacctagcgcgcagggccctgctgaaacacttgaaatgtggctgatgccacaaggttctctgaaactcttgggcaggtctgatcaagcatcacgacttcagtctttggaaaatcgtggactgtccatgttgcctcgcctcgtatcaaattcttggccccaggcggttcttccactgcagccccctaaagccttgggctag

SEQ ID NO: 211752 - DNA, 2598 bp, Artificial Sequence
  derived and/or modified sequence
atggtggccagcgcccgggtgcagaagctggtgcggcgctacaagctggccatcgccacagccctggccatcctgctgctgcagggcctggtggtgtggagcttcagcggcctggaggaggatgaagctggggagaagggccggcagaggaagccccggcccctggaccctggagagggcagcaaggacacagacagcagcgctggccggcggggcagcacaggccgccgccacggccgctggaggggccgggcagagagccctggggtgcctgtggccaaggtggtgcgggctgtgaccagccggcagagggccagcagaagagtgcccccagcccctcctcctgaggcccctggccggcagaacctgagcggggctgctgctggggaggccctggtgggcgccgccggcttcccccctcatggagacaccggctctgtggagggcgccccccagcccacagacaatggcttcacccccaagtgtgagatcgtgggcaaggatgccctgagcgccctggcccgggccagcaccaagcagtgccagcaggagatcgccaacgtggtgtgcctgcaccaggccggcagcctgatgcccaaggctgtgcccaggcactgccagctgaccgggaagatgagccctggcatccagtgggatgagagccaggcccagcagcccatggatggcccccctgtgcgcatcgcctacatgctggtggtgcacggccgggccatccggcagctgaagaggctgctgaaggctgtgtaccacgagcagcacttcttctacatccacgtggacaagagaagtgactacctgcaccgggaggtggtggagctggcccagggctatgacaacgtgcgggtgaccccctggaggatggtgaccatctggggcggggccagcctgctgaggatgtacctgcgctccatgagggacctgctggaggtgcccggctgggcctgggacttcttcatcaacctgagcgccacagactaccccaccaggaccaatgaggagctggtggccttcctgagcaagaacagagacaagaacttcctgaagagccacggccgggacaacagccgcttcatcaagaagcagggcctggacaggctcttccatgaatgtgacagccacatgtggaggctgggggagcggcagatcccagctggcatcgtggtggatggcggcagtgactggtttgtgctgaccaggagctttgtggagtatgtggtgtacacagatgaccccctggtggcccagctgcggcagttctacacctacaccctgctgcctgctgagagcttcttccacacagtgctggagaacagcctggcctgtgagaccctggtggacaacaacctgcgggtgaccaactggaacaggaagctgggctgcaagtgccagtacaagcacatcgtggactggtgtggctgcagccccaatgacttcaagccccaggacttcctgcggctgcagcaggtgtcccggcccaccttctttgccaggaagtttgagagcacagtgaaccaggaggtgctggagatcctggacttccacctgtatggcagctacccacctggcaccccagccctgaaggcctactgggagaacacctatgatgctgctgatggccccagcggcctgagtgatgtgatgctgacagcctacacagcctttgcccggctgagcctgcaccacgccgccacagctgccccacccatgggcacccccctgtgccgctttgagccccggggcctgcccagctctgtgcacctgtacttctatgatgaccacttccagggctacctggtgacccaggccgtgcagcccagcgcccagggccctgctgagaccctggagatgtggctgatgccccagggcagcctgaagctgctgggccgcagtgaccaggccagccggctgcagagcctggaggtgggcacagactgggaccccaaggagcggctcttcaggaactttggaggcctgctgggccccctggatgagcctgtggccgtgcagcgctgggcccggggccccaacctgacagccaccgtggtgtggattgaccccacctacgtggtggccaccagctatgacatcaccgtggacacagaaacagaggtgacccagtacaagccacccctgagccggcccctgcggcccggcccctggacagtgcggctgctgcagttctgggagcccctgggggagacccgcttcctggtgctgcccctgaccttcaacaggaagctgcccctgaggaaggatgatgcctcctggctgcacgccggccccccccacaatgagtacatggagcagagcttccagggcctgagcagcatcctgaacctgccccagcctgagctggccgaggaggccgcccagaggcacacccagctgaccggccctgccctggaggcctggacagaccgggagctgagcagcttctggagcgtggccggcctgtgtgccatcggccccagcccctgccccagcctggagccctgccgcctgacctcctggagcagcctgagcccagaccccaagtctgagctgggccctgtgaaggcagatggccgcctgaggtag

SEQ ID NO: 211753 - DNA, 2031 bp, Artificial Sequence
  derived and/or modified sequence
atggtggccagcgcccgggtgcagaagctggtgcggcgctacaagctggccatcgccacagccctggccatcctgctgctgcagggcctggtggtgtggagcttcagcggcctggaggaggatgaagctggggagaagggccggcagaggaagccccggcccctggaccctggagagggcagcaaggacacagacagcagcgctggccggcggggcagcacaggccgccgccacggccgctggaggggccgggcagagagccctggggtgcctgtggccaaggtggtgcgggctgtgaccagccggcagagggccagcagaagagtgcccccagcccctcctcctgaggcccctggccggcagaacctgagcggggctgctgctggggaggccctggtgggcgccgccggcttcccccctcatggagacaccggctctgtggagggcgccccccagcccacagacaatggcttcacccccaagtgtgagatcgtgggcaaggatgccctgagcgccctggcccgggccagcaccaagcagtgccagcaggagatcgccaacgtggtgtgcctgcaccaggccggcagcctgatgcccaaggctgtgcccaggcactgccagctgaccgggaagatgagccctggcatccagtgggatgagagccaggcccagcagcccatggatggcccccctgtgcgcatcgcctacatgctggtggtgcacggccgggccatccggcagctgaagaggctgctgaaggctgtgtaccacgagcagcacttcttctacatccacgtggacaagagaagtgactacctgcaccgggaggtggtggagctggcccagggctatgacaacgtgcgggtgaccccctggaggatggtgaccatctggggcggggccagcctgctgaggatgtacctgcgctccatgagggacctgctggaggtgcccggctgggcctgggacttcttcatcaacctgagcgccacagactaccccaccaggaccaatgaggagctggtggccttcctgagcaagaacagagacaagaacttcctgaagagccacggccgggacaacagccgcttcatcaagaagcagggcctggacaggctcttccatgaatgtgacagccacatgtggaggctgggggagcggcagatcccagctggcatcgtggtggatggcggcagtgactggtttgtgctgaccaggagctttgtggagtatgtggtgtacacagatgaccccctggtggcccagctgcggcagttctacacctacaccctgctgcctgctgagagcttcttccacacagtgctggagaacagcctggcctgtgagaccctggtggacaacaacctgcgggtgaccaactggaacaggaagctgggctgcaagtgccagtacaagcacatcgtggactggtgtggctgcagccccaatgacttcaagccccaggacttcctgcggctgcagcaggtgtcccggcccaccttctttgccaggaagtttgagagcacagtgaaccaggaggtgctggagatcctggacttccacctgtatggcagctacccacctggcaccccagccctgaaggcctactgggagaacacctatgatgctgctgatggccccagcggcctgagtgatgtgatgctgacagcctacacagcctttgcccggctgagcctgcaccacgccgccacagctgccccacccatgggcacccccctgtgccgctttgagccccggggcctgcccagctctgtgcacctgtacttctatgatgaccacttccagggctacctggtgacccaggccgtgcagcccagcgcccagggccctgctgagaccctggagatgtggctgatgccccagggcagcctgaagctgctgggccgcagtgaccaggccagccggctgcagagcctggagaacagaggcctgtccatgctgccccggctggtgagcaacagctggccccaggccgtgctgcccctgcagccccccaaggccctgggctag

SEQ ID NO: 211754 - DNA, 2598 bp, Artificial Sequence
  derived and/or modified sequence
atggtggccagcgcccgggtgcagaagctggtgcggcggtacaagctagccatcgctacagccttagcgatcctgctattgcaaggtctggtggtctggtctttttccgggctggaggaagatgaggcaggcgagaaggggcgacagcggaaacccagacccctggatccgggagagggctcaaaagataccgactcatccgcggggcgcaggggctccacagggcgtcgacatgggagatggcgcggtcgggctgaaagccccggcgtgcctgtcgccaaagtggtgcgggctgtgaccagcaggcagagggcgtctaggcgggtgccgcccgccccacccccagaggcccctggacggcagaacctctccggggctgccgctggcgaggcacttgtgggcgccgcagggtttccccctcacggggacacaggtagcgtcgaaggagccccccagcccaccgataacgggtttactccaaagtgtgaaattgtgggaaaggatgccctgagcgctctggcccgagcaagtacaaaacagtgccagcaagaaatagccaacgtcgtctgcctgcatcaagcaggatctctcatgcctaaagctgttccaagacactgtcagcttacagggaagatgagtcctggcatccagtgggacgagtcacaggcccagcagcccatggatggcccacccgtacggattgcctatatgctggttgttcacggaagagctatacggcagttgaagagactcttgaaagccgtttaccacgaacagcattttttttatattcacgtggacaagcggagtgattacctccatcgcgaggtcgtggaactggcccaaggctacgataacgttcgagtgaccccatggcgaatggtgacgatctggggcggcgcatctttgctccggatgtacttacgctccatgagggatctgttagaggtgcctggatgggcatgggacttttttattaatctgtcagccacagattacccgacgcgcaccaatgaggagttagttgcgttcctttcaaagaatagagacaaaaactttctgaaatctcatggcagggacaacagccgattcatcaaaaaacagggactcgacaggttgtttcacgaatgtgactcccatatgtggcggctgggtgaaaggcaaattccagccgggattgtggttgatgggggctccgattggtttgtactgacacggagtttcgttgagtacgtggtctacaccgatgaccctttggtggctcagctgcgccagttctatacgtataccctcctgcctgctgagtccttttttcatactgtgttagaaaactcgctggcatgcgaaacgctggtcgataacaacctgcgggtcacaaactggaataggaagttagggtgcaagtgccaatacaaacacatagtagactggtgcggttgtagcccgaatgactttaaaccacaggactttttacggctgcagcaggtgtcaagacctacttttttcgcaagaaaattcgagtccactgtgaaccaggaagtactagaaattctggatttccacttgtacggatcatacccgccagggacgccagccctgaaggcgtattgggaaaacacctatgacgccgctgatggaccatccggactcagcgatgtgatgctgacagcttatacagctttcgctcgcctttcactgcatcacgcagcgacggcagccccccctatgggaacccctctttgccggttcgaaccacgaggcctgccaagtagcgtccacctgtatttttacgacgaccacttccagggatacctcgttacccaggccgtgcaaccatctgctcaaggccctgctgagactctcgaaatgtggctcatgccgcaaggttcccttaagttattgggtagatctgaccaagcttctcgcctgcagtcactggaggttggaactgactgggacccaaaggaacgcctgttccggaattttggcgggctgctcggtcccttggatgaacccgtggcggtgcagagatgggcacgcgggcccaacttgacagcgaccgtggtgtggatcgaccctacctacgtcgttgccacctcttacgacattaccgtggacacggagactgaggtgacacagtataaacctccactaagccgacccctgcggcccggaccttggactgtaaggttactacaattctgggaacctcttggtgagactaggtttcttgtgctcccccttaccttcaatcggaagttgcccttgcgaaaagacgacgcctcttggctgcatgctggcccaccccacaatgaatacatggagcagagctttcagggacttagctcaatcttgaatctccctcagcccgagctagccgaagaggccgcccagagacacacccagcttacagggcccgccttggaggcatggacagaccgcgagctatcgtccttttggtccgtggctggactgtgcgcaatcggccctagcccctgtccaagcctggaaccctgcagacttacttcttggtcttcgctgtctccagaccccaaatcagaactcggtccagttaaagctgatggtcggctgcggtag

SEQ ID NO: 211755 - DNA, 2031 bp, Artificial Sequence
  derived and/or modified sequence
atggtggccagcgcccgggtgcagaagctggtgcggcggtacaagcttgcaattgcaaccgccctcgctatcctgctgctgcaagggctggtcgtctggagcttctccggcctagaggaggatgaggcaggcgaaaaaggccgacagcgaaagcccagacctctggacccgggcgaagggtctaaggacactgacagtagtgcaggccggaggggttctactggccgcagacacgggcggtggaggggccgagccgagtcgccaggcgtgccagttgcaaaagtggtgcgcgctgtgacatcccggcagcgtgcgagccgacgcgtgcccccagcccctccaccagaggctcccggtcgccagaacctctccggtgctgccgcaggtgaggccctggtgggagccgcaggctttcctcctcacggcgacactggaagtgtggagggcgcaccacagcccacagacaatggcttcaccccgaagtgcgagattgtaggcaaagacgctctctcagccctggcaagggccagcaccaagcaatgccagcaggaaattgcgaatgtggtgtgcctgcatcaagctgggagcttgatgccaaaggctgttcccaggcattgtcagcttacgggaaagatgtcacccgggattcagtgggatgagagtcaggctcagcaaccaatggacggacccccagtcagaatcgcttacatgcttgtggtgcacggcagggccatccgacagctgaagagactcttgaaggctgtatatcacgaacagcactttttctacattcacgtcgacaagcgctcggattatctacatcgagaggtagtcgaactcgctcagggctatgataacgtgcgcgtgaccccctggagaatggtgacaatttggggcggcgctagtttgttaagaatgtacctgcgcagtatgcgggacctgctggaagtgcctggctgggcatgggactttttcattaatttatccgctacagactaccccacacgaactaatgaggagttggtcgcctttctgagcaaaaaccgcgacaaaaatttcctgaagtcgcacggacgggacaacagtcgattcataaagaaacaggggctagatcggttgttccatgagtgtgactcgcatatgtggaggctcggcgagaggcagattccggcagggatcgtcgtggacggtgggtcagactggtttgtcctcacaagatccttcgtggaatacgtggtctacaccgatgatcccttagtggcacagctgcgccagttctatacttacacacttctgccggctgagtcttttttccacacagtgctcgagaattctctagcctgtgaaaccctcgttgacaacaatttacgcgtgacgaattggaatagaaaacttgggtgcaaatgtcagtacaaacatatcgtcgactggtgtggctgctctcctaatgatttcaagcctcaagactttctcagactgcaacaggtgagtcgcccgacatttttcgccaggaagtttgagtccaccgtaaatcaagaggtcctggagatcctggactttcacctctatggttcatacccacctggaactcccgcgttaaaggcttattgggagaatacgtatgatgctgccgacggtccatcaggtctttccgacgtgatgttaaccgcttatacagcattcgctagattatccttgcaccacgccgccacagcggcgccccctatgggaactccattgtgcaggtttgaaccacgaggacttccttctagcgtgcacctgtatttttatgatgatcacttccaggggtatcttgtgacacaggccgtgcagccttccgcacagggcccagccgaaaccctcgaaatgtggctgatgccgcaggggagcttgaaacttctgggccgcagcgatcaggcaagccgtttgcagagcctggagaacaggggactgagtatgctgccacgcttagtgagcaacagttggccacaggccgtgctgcctttgcagccacccaaagcactcggctag

SEQ ID NO: 211756 - DNA, 2598 bp, Artificial Sequence
  derived and/or modified sequence
atggtggctagcgcaagagtccaaaagctggtgcgccgttacaaactggctatagccaccgcacttgccattctgctactgcagggcctggtcgtctggtccttctcaggcctggaggaggatgaagctggcgagaaagggagacagaggaagccccgaccccttgaccccggtgagggctccaaggatacggacagtagcgcgggacgaaggggtagcacaggccgtcgccacggccgatggagaggcagggccgaaagccctggcgtccctgttgcgaaggtagttcgcgcagtgacctccaggcaacgtgctagcagaagggtccccccagcacctcctcctgaagcccctggacgccagaacctctctggcgcagcagccggagaggcactcgtaggtgcagcgggattcccaccacacggcgacaccgggtctgtggagggcgctccccagcccacagataacgggtttactcccaagtgcgaaatcgttgggaaggatgctctctcagccctggcacgtgcatcaacaaagcagtgtcagcaggagatcgcaaacgttgtgtgtctccaccaagccggaagcttaatgcctaaagccgtgcctcgacactgtcagttgacgggaaagatgtctcctggcatccagtgggacgagtcccaggcacaacagcctatggacggccctcccgtacgaattgcctatatgctcgtggtacatggaagggcgatcagacagctgaaacggctgttgaaagcggtctaccatgagcaacatttcttctacatacacgtggacaagaggtctgactacttgcaccgagaagtggtggagttggctcaaggctacgacaacgtgcgggtgaccccttggagaatggtcaccatctggggaggggcaagcctactgcgcatgtatctccgtagcatgcgagatttacttgaggtgcccggatgggcttgggattttttcataaatctgtcagccaccgactatccgacacggacaaatgaagagctggtcgccttcctatcaaaaaaccgggacaaaaactttctgaagagtcacggacgggataactctcggttcatcaaaaagcagggcttggaccggttatttcacgagtgcgatagtcatatgtggcggctcggcgagagacaaattcctgccggaatcgtcgtggatgggggaagcgattggttcgtactgacccgctccttcgtggagtatgtagtctataccgacgatccattagtggcacagctaagacaattctatacgtatacacttcttccagcggaatctttctttcatactgtcctggaaaatagtctggcctgtgaaacactggttgataataacttgagagttactaattggaatcgaaagttgggctgcaaatgtcagtataagcatatcgtcgactggtgtggatgcagtcccaacgatttcaagccacaggactttcttcgtctgcaacaggtatctcgtcctacattcttcgctaggaaattcgaatctaccgtgaaccaggaggttcttgagatcctggactttcacttatacggtagttaccctcctggaacaccagccctaaaggcctactgggagaatacttatgacgcggctgacggacccagtgggttgtcagatgtgatgctgacagcttacaccgccttcgcgagactcagtctgcatcacgctgccacggccgcaccccctatggggacacccttgtgccggtttgaaccgcgtggactgccgagtagcgtgcatctctatttctacgacgaccacttccagggatacttggttactcaggctgtgcaaccctctgcccaaggacccgctgagactcttgagatgtggctgatgccccaaggcagccttaagcttctgggtcgcagtgatcaagccagccgactgcagtccctcgaggtcggcactgactgggaccccaaggaacgcttgtttcggaactttggagggcttttgggtcctctggacgagccagtggctgtgcaacgttgggccaggggacctaatcttactgccaccgtcgtgtggatagaccccacttacgtggtggccacctcctacgacatcactgtcgacaccgagacggaggtgacccaatataagcctccgctgagtaggccgctgcgccctggcccatggaccgtgagactgctgcagttctgggagcccctcggggagaccaggtttttggtgctacccctgacattcaaccggaaactgccgctgcggaaggacgacgcgagctggcttcacgcagggcctccccataacgaatacatggagcagtcgtttcagggactgtcaagtatactgaatctcccacaaccagaactagcggaggaggctgcacagaggcatactcagctgaccgggcctgccctggaggcctggacagatagagagttgtcttcgttctggtccgttgctggactctgcgccatcgggcctagcccctgtcctagcctcgagccttgtcggctcacaagctggagctcattaagcccagaccccaagtctgagttagggcctgttaaggctgatggcagattaagatag

SEQ ID NO: 211757 - DNA, 2031 bp, Artificial Sequence
  derived and/or modified sequence
atggttgccagcgctagagtccagaaactggtcaggcgatataagttggcaatcgcaacagccctcgcaattttactactgcagggactcgtcgtttggtcgttcagtgggttggaagaggatgaggctggagaaaaggggaggcagcggaaacctaggcctctggatcctggagaaggcagcaaggatacagatagctcagcgggacggcgtgggagcactgggagacggcacggaagatggcggggtagagcagaaagtcccggagttcccgtcgccaaggtggtgagagccgtcaccagtaggcagagggcatcacgcagagttccgccagctccaccccctgaggcccctggtcggcaaaatctgtcaggcgcagccgctggggaagctctcgtgggcgctgcagggtttccccctcacggggataccgggtccgttgaaggggctccacagccaacagacaacggcttcacacccaaatgcgaaatcgtaggcaaagatgccctctccgcactcgcacgggcatcaactaagcagtgtcagcaagaaatcgccaatgtggtgtgcctgcatcaggcagggagccttatgcccaaagctgtccccaggcactgccagctgactggcaaaatgagccccggaatccagtgggacgaatcccaggctcagcagccgatggatggaccgcctgtgaggatcgcctatatgcttgtggtccacggacgtgctattcgtcaattgaagcgactgttaaaggccgtgtaccatgagcagcactttttttacatccatgttgataaacgcagtgactatcttcatagggaagtcgtggagttggcgcaggggtacgacaatgttcgggtcaccccttggaggatggttaccatctggggaggcgcttccttactgaggatgtatctgcgcagcatgagagacctgttagaggttccgggatgggcatgggatttttttatcaacttgagtgccacggactaccccactcgcaccaacgaagagttagtggccttcctttcaaagaacagagataagaactttctgaagtcccacggtagggacaactcgagatttatcaagaagcagggtctagaccgcctctttcacgagtgcgattctcacatgtggagattaggcgaacggcagatccctgccggaattgtagtggacggaggatccgactggttcgttctcaccaggtcatttgtcgagtacgtagtttacacggacgatcccctcgtcgcccaactgcgccagttctatacctacactttgctgccagccgaaagtttcttccacactgtgttggagaactccctggcgtgcgagacgttggtcgacaataacctccgggtgacaaattggaatcgtaagcttggttgtaaatgccagtacaagcacattgttgactggtgtggctgctccccgaacgatttcaagcctcaggactttctgcgactccagcaagtcagcaggcccacttttttcgctcgcaagtttgaaagtacagtcaaccaggaggtgttggagatacttgactttcatctttatggatcatacccgccaggtacccctgccctgaaggcttactgggagaatacctatgatgctgcagatggcccatccggcctcagtgatgtcatgctaaccgcttacactgcatttgctcgactgtctcttcaccacgctgccaccgcggctcctccaatggggacacccctttgtcgcttcgagccacggggtctgccgagtagcgtgcacctttatttctacgacgatcactttcaggggtaccttgtcactcaggccgtccaacccagcgcacagggcccagctgagactctggaaatgtggctcatgccacaaggaagtctaaagttgctaggcaggagcgatcaggcctcacgcttgcagagcctggagaaccgtgggctctcaatgctaccgaggctcgtctctaacagttggccacaggccgtcctcccgctccagcccccaaaggctctgggctag

SEQ ID NO: 211758 - DNA, 2598 bp, Artificial Sequence
  derived and/or modified sequence
atggtagcatccgccagagtgcagaaactggtgagacgctacaagttggctattgctacagcactggctattctgctcttacagggcctggtggtttggtctttcagtggactagaggaggacgaagcaggggagaagggacggcagaggaagccgagacctctggatccaggggaagggtcgaaggacactgacagtagtgctggaaggaggggatcaactggacgccggcacggaaggtggaggggccgcgcagagtcccccggggtgcctgtcgctaaggtcgtgcgtgccgtaacatcccgtcaaagggcttctagaagggtgcctccagcccctcctcccgaggctcccggaagacagaatctgagtggcgctgcggcaggtgaggctctcgtgggggcagcagggtttcctccacacggagacaccggcagtgtagaaggcgctccccaacccaccgataatggtttcacacctaagtgcgagatcgtaggcaaggatgccctctcagcattagcgcgcgcctctaccaaacagtgtcaacaggaaatcgcaaacgtcgtatgtctccaccaggccgggagcctgatgccgaaggctgttccgcgccactgccagctcacgggtaaaatgtctccgggtattcagtgggacgagagccaggcgcaacaaccaatggacggtcctccagtacgtattgcgtacatgttggtggtccatggcagggctatccgacagttaaagcggctgctaaaagcagtctatcatgagcagcacttcttctatattcacgtcgacaagagatccgattacctccacagggaggttgtggagctagcgcagggttacgacaatgttcgtgtgacaccctggagaatggtcactatttggggcggcgctagtctgctgcgcatgtacctccgttcaatgcgtgatcttctagaagtgccaggttgggcctgggattttttcataaatctgagcgctacagactatccaacaagaacgaacgaagagctcgtggccttcctgagtaagaacagagataaaaactttttgaagagccacggacgagacaacagccggtttattaagaagcaaggccttgatagacttttccatgaatgcgattcacacatgtggcgccttggagagcgccaaataccagccggaatcgtcgtggacggcgggtcagattggtttgtcctgactagaagtttcgtcgagtacgtcgtgtacaccgacgatccgttagttgcccagctgaggcagttctatacttacacacttctccctgccgaaagcttctttcatacagtgctggagaattccttagcctgtgagactctagtggataataatctgcgtgttacaaactggaatcggaagttgggatgtaagtgtcagtataaacacatcgtggactggtgtgggtgcagccccaatgacttcaagccgcaggattttcttagattgcagcaggtatctaggccaacattctttgcaaggaaattcgaatcaactgtgaatcaagaggtgcttgagatcctcgacttccacctgtatggtagctatccccccggcactcccgcactgaaagcctattgggaaaatacatacgatgccgctgatggccctagcggactgagcgatgtcatgttaactgcatatacagcctttgcaaggctgtccttacaccacgctgcaaccgccgctcctccgatgggtactcccctttgtcggttcgaacctcgcgggctgccctcctcggtgcacctgtacttctatgacgaccactttcaggggtacttggtcacgcaggctgtccaaccaagtgctcaagggcccgccgaaaccctggagatgtggctcatgccccagggatctcttaagctccttggacggtccgaccaagcaagcagactccaatctttggaggtcggcacagactgggaccctaaagagaggctttttcggaacttcggcggtttgctggggccactggatgagcctgtcgcagtgcagcgctgggcgaggggccccaacctgacagcgacggtggtgtggattgatcccacatatgtggtggcgacatcatacgatatcacagtcgacactgagaccgaagtcactcagtataaacctcctttgtcaagacctttaagacctggcccttggaccgtacgactactgcagttttgggagcctttgggcgagactcggtttttggtcttgccacttacatttaacagaaagcttccccttagaaaagacgacgcaagctggctgcatgcaggacccccacacaacgaatatatggagcaaagtttccagggattgtccagcattttaaatcttccgcagcctgagctagccgaggaggctgcccagaggcatacacaactaaccggccctgctctcgaggcttggaccgatcgggagctcagcagcttctggtctgttgccggattgtgcgcaattgggcccagtccatgcccctctcttgagccatgcaggttaacctcttggtcgagcctttctccagatcctaagagtgagctcggacctgtgaaggccgacggacgactgaggtag

SEQ ID NO: 211759 - DNA, 2598 bp, Artificial Sequence
  derived and/or modified sequence
atggttgcaagcgctagagtgcagaaactagtgagaaggtacaaactagctatcgccacggctttagccatcttactgctgcaaggactcgtggtttggtcattctcagggctggaagaggatgaagcaggggaaaaaggccggcaaagaaagccgagacccctggaccccggagaagggagtaaagatacggactcctctgcagggaggaggggctcaactggcaggaggcacggacgctggagaggcagggccgagagcccaggcgtgccagttgccaaagtagtccgagccgtaaccagccgacagagggcaagtcgacgcgtgcctcccgcccccccacccgaggccccagggaggcagaatttgtctggcgcagcagccggagaggctttagtcggcgccgccggatttccacctcacggtgatacaggctccgttgagggtgcgcctcaaccgacagacaacggctttacacccaagtgcgagatagtcggaaaagatgcactctccgccctcgcaagggccagcaccaagcagtgccaacaggaaatcgccaatgttgtgtgccttcatcaagcaggtagcctgatgcctaaagcagtcccacgacactgtcagttgaccggtaagatgagccccggtatccagtgggatgagtctcaagcacagcaaccaatggatggaccccccgtgagaatcgcttacatgctcgtcgttcacgggagagccattcgacagctcaaacggctgctgaaagccgtctaccacgagcagcacttcttctatattcacgtcgacaagcgctccgattacttacaccgcgaggtcgtagaacttgcccagggttatgacaatgtcagagtgacaccctggcgcatggttactatttggggaggcgcttccttactgcgcatgtatctgaggagtatgcgggacctccttgaagtgccaggatgggcgtgggacttcttcattaacttaagcgccactgactaccctacaaggacaaatgaagagctggtcgcctttctgtccaagaaccgagacaaaaactttcttaagtcccacggacgcgacaattcaagatttatcaaaaaacagggcctagacaggttatttcacgaatgcgactctcacatgtggcgactgggagagaggcaaattccggctggaattgtggtggatgggggtagtgattggttcgtccttaccaggtcatttgtggaatacgtggtctacactgacgacccactggtggcccaattacggcagttttatacctataccctcctcccggctgagagtttctttcataccgtgctcgagaacagcctggcctgtgagacccttgttgataataatttacgggtcacaaattggaacaggaaattaggatgtaaatgtcaatacaagcatattgtggattggtgtggctgctccccaaacgactttaaaccccaagactttctccgactgcaacaagttagccgccccacgttctttgccagaaaattcgagtcgactgtcaatcaggaggtcttagaaatccttgatttccacctgtacggatcttacccccctggcacccccgcactaaaagcatattgggaaaacacctacgatgcagcagacgggcccagcggtctatcagacgttatgttaaccgcctatactgcattcgcccgactttcactgcaccatgccgcaacagctgctccacccatgggaacccctctttgcaggttcgagcctagggggctcccctcaagtgtgcatctgtacttctatgatgaccacttccaagggtacctggttacacaggccgtccagccttctgctcagggtcccgctgaaacccttgagatgtggttaatgccccagggaagtcttaaactgctcggccgatcagaccaagcctcgcgtcttcagtcgttggaggtgggaacagattgggaccccaaggagagactatttaggaacttcggaggcctgcttggtcctctagacgaacccgtggccgttcagagatgggcaaggggacccaacctaactgcgaccgttgtgtggatagatcctacttacgtggtcgctacttcttacgacatcaccgttgacacagaaacagaggtcactcagtacaagcccccactttctaggccactgcggccagggccttggaccgtgcgccttttacagttctgggaaccactaggtgagactcggttcctcgtgctccccctgacctttaaccgaaaacttccccttagaaaggacgacgcatcctggttacacgccggccctccccacaacgaatatatggaacagagttttcaggggttatcgagcattctgaatctccctcagcccgaactggctgaagaagccgctcagagacacactcaattaactggccctgcgttggaagcttggacggaccgggagctgagttccttttggtctgttgccggcctgtgtgctattggcccttctccttgtccttctctagaaccctgtcgccttacatcctggagtagcctgagtccggacccaaaaagcgagcttggccctgtgaaagccgatggaaggcttcgctag

SEQ ID NO: 211760 - DNA, 3507 bp, Artificial Sequence
  derived and/or modified sequence
gcggccgggttgcagggctgggcgcgcgccccgcgtcccgggcaggaagatggtggcgagcgcgcgagtgcagaagctggtgcggcgctacaagctggcgattgccacggcgctggccatcctgctgctgcagggcctggtagtgtggagcttcagcggcctggaggaggacgaggcgggcgagaaaggaaggcagaggaagccacggccactggaccctggcgagggttccaaggacacagacagttcagcagggcgacggggcagcacaggcagaaggcatgggcgctggcggggccgtgctgagagcccaggagtgcccgtggccaaggtggtacgggcagtaaccagccggcagagagccagccggcgggtcccacctgccccacccccggaagccccaggccgccagaacctgagtggggcagcagctggggaggcgctggtaggggcagctggcttcccaccacacggagatacagggagcgtggagggcgccccccagcccacggacaatggcttcacccccaagtgcgagatcgtgggcaaggacgcactgtctgcactggcccgggccagcaccaagcagtgccagcaggagatcgccaatgtggtgtgcctgcaccaggctgggagcctcatgcccaaggctgtgccccggcactgtcagctgactgggaagatgagccccggcatccagtgggatgagagccaagcccagcagcccatggatggccccccggtgcgaatcgcctacatgctggtggttcacggccgcgccatccgccagctgaagcgtctcctcaaggccgtttatcacgagcagcacttcttttacatccatgtggacaagcgttccgactacctgcaccgggaggtggtggagctggcccagggctatgataacgtgcgggtgacgccctggcgcatggttaccatctggggcggggccagcctcctgaggatgtacctgcggagcatgcgggacctgctagaggtgcctggctgggcctgggacttcttcatcaacctcagtgccactgactatccaaccaggaccaatgaggagctggtggcattcctatccaagaaccgggacaagaatttcctcaagtcacatggccgggacaactccaggttcatcaagaaacagggcctggaccggctcttccatgagtgcgactcacacatgtggcgcctgggcgagcggcagatcccagcaggcattgtggtggatggcggttctgactggttcgtgctgacacgcagctttgtggagtatgtggtgtacacagatgacccgcttgtggcccagctgcgccagttctacacatacacactgctcccagccgagtccttcttccacacggtgctggagaacagcctggcctgtgagaccctcgtggacaacaacctgcgggtcaccaactggaaccgcaagctgggctgcaagtgccagtacaagcacattgtggactggtgtggctgctcccccaacgacttcaagccacaggacttcctccggctgcagcaagtctccagacccaccttcttcgcccggaagttcgagtcgactgtgaaccaggaggtgctggaaatcctggacttccacctgtatggcagctacccccccggcacgccagccctcaaggcctactgggagaacacctacgacgcggctgatggccccagtgggctcagtgatgtcatgctcactgcttacacagccttcgcccgcctcagcctgcaccatgccgccactgctgcacccccaatgggcaccccactctgcaggtttgagcccaggggcttgccgtccagcgtgcacctgtatttctatgacgaccatttccagggctacctggtgacgcaggcggtgcagccctcagcccaggggccggcagagacgcttgagatgtggctgatgccccaagggtcgctgaagctgttggggcgcagtgaccaggccagccggctccagagtctggaggttggcactgattgggaccccaaagagcgtcttttccggaactttggggggttactggggccgctggacgagcctgtggccgtgcagcgctgggcccggggccccaacctcacagccacagtggtctggatcgacccaacctatgtggtggccacatcttatgacatcacagtagatacggagactgaggtcacgcaatacaagcccccactgagccggcccctgcggccagggccctggactgttcgactccttcagttctgggaaccgctgggtgagacccgcttccttgtgctgcccttgaccttcaaccgcaaactacctctcaggaaagatgatgccagctggctgcacgcagggccaccccacaacgagtacatggagcagagtttccagggcctgagtagcatcctgaacctgcctcagccggagctcgcggaggaggctgcccagcggcacacacagctcacaggccctgcgctcgaggcctggacagacagggaactgagcagcttctggtccgtggctggactgtgtgccataggcccctctccctgcccctccctggagccctgcagactgaccagctggagctctctgtcccccgaccccaaatcagagctggggcctgtcaaagcagacgggcgactcaggtagcagggccccagccagtacccgtggaggacccgggaaattgcaccttacagacagtggaggggtgtcccctcccacaggcaagaaccagaggcccaggctgcacacccatttcagccatcaagaacccacacagacggcagggaaggtggacacagtatgaactactgctgatgtctctgttggggatcagagggctggcgggaacgcgagaagggcaccagcagcattccacacccagctcttcctcaccttcctgtctagtttgaatttcttttttttctttttttttttttttttttaatttaaaaaggaaaatgggtggttgggagagaaactagaacagaagatgtgcaatagggctcagagcagccccaggaagtgggccatgtctgtggggagcaggggcttgctgagcccacctgctattgttctgcacgaggctgggcctgcctcactctccagggcctcatgccccattctgggcctgtggtgctcgtggctgaggctccacagggctgcaagtgccctgccaggctctaaggcccgaagaacaggtgatatcgggggcgctgcagagctgggctctagcaggacagttcttttgtagccaggggaccctagaagtggggtggggcggctccagggctttccagcataccctgcccctggatgggaaaggcagggtcagggcccactgagacccatgcagagtttccaggtgtgcactggaagtgaggtcacatgagcagcgtgggaagaagactctgtcaagactctcagaagaacctggagtaattgtgcctgaagctcagcgtgaagtctgaaatatgcaacagaagaaatatatctctatctctcta

SEQ ID NO: 211761 - DNA, 2107 bp, Artificial Sequence
  derived and/or modified sequence
aggaagatggtggcgagcgcgcgagtgcagaagctggtgcggcgctacaagctggcgattgccacggcgctggccatcctgctgctgcagggcctggtagtgtggagcttcagcggcctggaggaggacgaggcgggcgagaaaggaaggcagaggaagccacggccactggaccctggcgagggttccaaggacacagacagttcagcagggcgacggggcagcacaggcagaaggcatgggcgctggcggggccgtgctgagagcccaggagtgcccgtggccaaggtggtacgggcagtaaccagccggcagagagccagccggcgggtcccacctgccccacccccggaagccccaggccgccagaacctgagtggggcagcagctggggaggcgctggtaggggcagctggcttcccaccacacggagatacagggagcgtggagggcgccccccagcccacggacaatggcttcacccccaagtgcgagatcgtgggcaaggacgcactgtctgcactggcccgggccagcaccaagcagtgccagcaggagatcgccaatgtggtgtgcctgcaccaggctgggagcctcatgcccaaggctgtgccccggcactgtcagctgactgggaagatgagccccggcatccagtgggatgagagccaagcccagcagcccatggatggccccccggtgcgaatcgcctacatgctggtggttcacggccgcgccatccgccagctgaagcgtctcctcaaggccgtttatcacgagcagcacttcttttacatccatgtggacaagcgttccgactacctgcaccgggaggtggtggagctggcccagggctatgataacgtgcgggtgacgccctggcgcatggttaccatctggggcggggccagcctcctgaggatgtacctgcggagcatgcgggacctgctagaggtgcctggctgggcctgggacttcttcatcaacctcagtgccactgactatccaaccaggaccaatgaggagctggtggcattcctatccaagaaccgggacaagaatttcctcaagtcacatggccgggacaactccaggttcatcaagaaacagggcctggaccggctcttccatgagtgcgactcacacatgtggcgcctgggcgagcggcagatcccagcaggcattgtggtggatggcggttctgactggttcgtgctgacacgcagctttgtggagtatgtggtgtacacagatgacccgcttgtggcccagctgcgccagttctacacatacacactgctcccagccgagtccttcttccacacggtgctggagaacagcctggcctgtgagaccctcgtggacaacaacctgcgggtcaccaactggaaccgcaagctgggctgcaagtgccagtacaagcacattgtggactggtgtggctgctcccccaacgacttcaagccacaggacttcctccggctgcagcaagtctccagacccaccttcttcgcccggaagttcgagtcgactgtgaaccaggaggtgctggaaatcctggacttccacctgtatggcagctacccccccggcacgccagccctcaaggcctactgggagaacacctacgacgcggctgatggccccagtgggctcagtgatgtcatgctcactgcttacacagccttcgcccgcctcagcctgcaccatgccgccactgctgcacccccaatgggcaccccactctgcaggtttgagcccaggggcttgccgtccagcgtgcacctgtatttctatgacgaccatttccagggctacctggtgacgcaggcggtgcagccctcagcccaggggccggcagagacgcttgagatgtggctgatgccccaagggtcgctgaagctgttggggcgcagtgaccaggccagccggctccagagtctggagaacaggggtctctccatgttgcccaggctggtctcaaactcctggcctcaagcagtcctcccgctccaacctcccaaagcgttgggatgacaggcatcagccactactcctggcctcaaagtaccattaaaaaaaaaaaaaaatcttaggtaacacatgc

SEQ ID NO: 211762 - DNA, 93 bp, Artificial Sequence
  derived and/or modified sequence
gctgccttctgcggggcttgccttctggccatgcccttcttctctcccttgcacctgtacctcttggtctttgaataaagcctgagtaggaag

SEQ ID NO: 211763 - DNA, 102 bp, Artificial Sequence
  derived and/or modified sequence
tgataataggctgccttctgcggggcttgccttctggccatgcccttcttctctcccttgcacctgtacctcttggtctttgaataaagcctgagtaggaag

SEQ ID NO: 211764 - protein, 1025 aa, Artificial Sequence
  derived and/or modified sequence
MSNGYSTDENFRYLISCFRARVKMYIQVEPVLDYLTFLPAEVKEQIQRTVATSGNMQAVELLLSTLEKGVWHLGWTREFVEALRRTGSPLAARYMNPELTDLPSPSFENAHDEYLQLLNLLQPTLVDKLLVRDVLDKCMEEELLTIEDRNRIAAAENNGNESGVRELLKRIVQKENWFSAFLNVLRQTGNNELVQELTGSDCSESNAEIENLSQVDGPQVEEQLLSTTVQPNLEKEVWGMENNSSESSFADSSVVSESDTSLAEGSVSCLDESLGHNSNMGSDSGTMGSDSDEENVAARASPEPELQLRPYQMEVAQPALEGKNIIICLPTGSGKTRVAVYIAKDHLDKKKKASEPGKVIVLVNKVLLVEQLFRKEFQPFLKKWYRVIGLSGDTQLKISFPEVVKSCDIIISTAQILENSLLNLENGEDAGVQLSDFSLIIIDECHHTNKEAVYNNIMRHYLMQKLKNNRLKKENKPVIPLPQILGLTASPGVGGATKQAKAEEHILKLCANLDAFTIKTVKENLDQLKNQIQEPCKKFAIADATREDPFKEKLLEIMTRIQTYCQMSPMSDFGTQPYEQWAIQMEKKAAKEGNRKERVCAEHLRKYNEALQINDTIRMIDAYTHLETFYNEEKDKKFAVIEDDSDEGGDDEYCDGDEDEDDLKKPLKLDETDRFLMTLFFENNKMLKRLAENPEYENEKLTKLRNTIMEQYTRTEESARGIIFTKTRQSAYALSQWITENEKFAEVGVKAHHLIGAGHSSEFKPMTQNEQKEVISKFRTGKINLLIATTVAEEGLDIKECNIVIRYGLVTNEIAMVQARGRARADESTYVLVAHSGSGVIEHETVNDFREKMMYKAIHCVQNMKPEEYAHKILELQMQSIMEKKMKTKRNIAKHYKNNPSLITFLCKNCSVLACSGEDIHVIEKMHHVNMTPEFKELYIVRENKALQKKCADYQINGEIICKCGQAWGTMMVHKGLDLPCLKIRNFVVVFKNNSTKKQYKKWVELPITFPNLDYSECCLFSDED

SEQ ID NO: 211765 - protein, 221 aa, Artificial Sequence
  derived and/or modified sequence
MSNGYSTDENFRYLISCFRARVKMYIQVEPVLDYLTFLPAEVKEQIQRTVATSGNMQAVELLLSTLEKGVWHLGWTREFVEALRRTGSPLAARYMNPELTDLPSPSFENAHDEYLQLLNLLQPTLVDKLLVRDVLDKCMEEELLTIEDRNRIAAAENNGNESGVRELLKRIVQKENWFSAFLNVLRQTGNNELVQELTGSDCSESNAGICNFTEEDSSNSA

SEQ ID NO: 211766 - DNA, 3078 bp, Artificial Sequence
  derived and/or modified sequence
atgtcaaatggatactctaccgacgagaattttcgctatctcataagctgctttagagcccgcgtgaagatgtacattcaagttgagcctgtcctggactatctcacctttctgcccgctgaagtcaaggagcagatccagagaaccgtggctactagtgggaacatgcaggcagttgagctcctgttatctacactcgagaaaggggtgtggcatctgggttggacacgggaattcgtggaggccctgaggcggacgggatctcccttggctgcacggtatatgaatccagagctgacagacctgccaagtccgtcgtttgagaatgcacacgatgaatatctgcagcttctgaacttgctacagcccacactggtggataagctgctggtgagagacgtgctggataaatgtatggaggaagagttgctgaccatcgaagatcggaatcgcatcgccgcagccgaaaataatggaaacgagtcgggcgttcgcgagttgctgaagcgtatagtacagaaggaaaattggtttagtgccttcctgaacgttctgcgccaaacgggaaacaatgaactggttcaagagcttacggggtccgattgtagcgagagtaatgctgagatagagaatctgtcccaagtcgacggtccccaggtcgaggagcagcttctgtctaccacggtgcagccaaaccttgagaaagaagtatggggcatggaaaataatagctctgagtcttcattcgcagatagtagcgtcgtttccgagtcggataccagccttgccgagggttcagtatcttgtcttgatgagtccttaggccataactcaaatatggggagtgacagcggcaccatgggaagcgactctgacgaggagaatgtggctgctagagcctctccagagccagagctgcagctcagaccttaccagatggaagtggcacagcccgccctagagggcaagaacatcattatctgcttgccaacaggctccggcaagacgagagtggccgtttacatagctaaggatcacctggataaaaaaaaaaaggcatctgaacctggcaaagtgattgtccttgtcaacaaggtactcctggtggaacagttattccggaaggaattccagcccttccttaaaaaatggtatcgggtcattgggttaagtggcgacactcagctcaaaatcagcttccctgaagtggtgaagagctgtgatatcattattagcaccgcacagattctggaaaattctctgttgaacctagagaacggagaagacgccggcgtgcagctgtccgatttcagcctcattatcattgacgagtgtcaccacaccaacaaggaagccgtctataataacattatgagacactatctgatgcaaaagctgaaaaacaatcgcctcaaaaaggagaacaagccagtgatacctctgccgcagatcctcggtctcaccgctagccccggcgtagggggagcgaccaaacaggctaaggcagaggagcatatcttaaaactgtgcgcaaatctggacgcctttacgatcaaaactgtgaaggagaatctggatcagttgaagaaccagatccaggaaccctgcaagaagttcgctatcgccgatgccacgcgggaagacccttttaaggaaaaactgttagagattatgaccaggatccagacctattgtcagatgagccccatgagcgactttgggacccagccatacgagcaatgggccatccagatggaaaagaaggcagctaaggagggcaaccgaaaggagcgggtgtgcgcagagcacctgcgtaagtataatgaagccctccagatcaatgatacgatccgcatgatcgatgcatacactcacctcgagacgttttataacgaagagaaggacaaaaagtttgccgtgatagaagatgattcagacgagggcggagacgacgagtattgcgacggagacgaggacgaggatgatctgaagaagcctttgaagttagacgaaacagacaggtttcttatgactctgttttttgagaataacaagatgctcaagcggctcgccgagaatcctgagtacgaaaacgaaaagcttacaaagctgcggaacactataatggagcaatacactaggaccgaggagagcgctcggggaattatttttaccaagacccgtcagtctgcctatgcactctcccagtggattactgagaatgagaaattcgccgaggtgggagtgaaagcccatcatctaattggagccggtcattcctccgaatttaagccaatgacacagaacgaacaaaaggaggtcatttcgaaattcaggactggtaaaattaacttactgatcgcaaccactgtggcagaagagggcctcgatattaaggaatgtaatatcgtgatccgttacggactcgttactaatgaaatagcaatggtgcaggctaggggccgggcaagagctgacgagagcacgtacgttctcgttgcacacagtggaagcggagtaattgaacacgagacggtcaatgacttccgggaaaaaatgatgtataaggccatccactgcgttcagaacatgaaaccagaagagtatgcgcacaagatattggaacttcagatgcagagcattatggaaaagaaaatgaagactaaacggaatatcgcaaaacattacaaaaataacccgagcctgattaccttcctgtgcaagaattgcagcgtgttggcctgctctggcgaagatatacatgtgatcgagaaaatgcatcatgttaatatgacaccagagtttaaagagttgtatatcgtgagggagaacaaggccttacagaagaagtgcgcggactaccagattaacggagaaattatttgcaaatgcgggcaggcctggggaacgatgatggtgcacaaggggctggatctgccatgcctgaagatcagaaattttgttgtggtgtttaaaaacaacagcacaaagaagcagtataagaagtgggtggagctaccgatcacatttcccaatttggactactccgaatgctgtctcttcagcgacgaggattag

SEQ ID NO: 211767 - DNA, 3078 bp, Artificial Sequence
  derived and/or modified sequence
atgtcaaatggatactccacggatgaaaacttccgatatctgatctcttgtttccgcgcacgagtgaaaatgtacattcaggtggaacctgtactggattatctgaccttcctcccagctgaggtaaaagagcagattcagaggactgttgcaacttccgggaatatgcaggctgtagagctgctgttgtctacactggagaaaggtgtctggcatttaggctggacacgagaattcgtggaagcgttgcgcagaaccggctctccactcgcggctcgctacatgaatcctgagctaactgacctcccctcgccctccttcgaaaacgcccacgatgagtacctccaactattaaacctcttgcagcccacgctcgtggacaagctcttagtccgcgacgtgctagataaatgcatggaggaagagctgctcaccatcgaggaccgtaaccggatcgcagctgcagagaacaatggcaacgaaagcggcgtacgggagttgctgaaacgcattgttcagaaagagaattggttcagtgcttttctcaacgtactgcgtcaaaccggtaataatgagttggtgcaggagctgaccgggtctgactgttctgaatctaacgccgagattgaaaacctgtcacaggttgacggtccacaggtcgaagagcaactcctcagcaccacagttcaaccaaatctggaaaaggaagtgtggggcatggaaaacaacagttccgagagcagcttcgccgactcaagtgttgtcagtgagtctgacacttcccttgcggaaggatcggtttcttgcttagatgaaagtctcggccacaatagtaatatgggctcagattccgggaccatggggagcgacagcgacgaagagaacgttgccgcaagagccagccctgagcccgagcttcagttgcgcccttatcagatggaggtcgcgcagccagcccttgagggaaagaatatcataatctgtctgccaaccggctcagggaagacgcgcgtcgcagtgtacatcgccaaggaccacctggacaaaaaaaaaaaggccagcgaacccggaaaagtgatcgtgcttgtaaacaaagtcctgctagttgagcaactgtttcgtaaagaatttcaaccgtttttgaagaagtggtatcgcgtgattggcttgtctggggacacacaactgaagatttccttccctgaggtcgtcaaaagctgcgatatcatcatatcgaccgctcagatacttgaaaactctctgctgaatcttgagaacggggaggatgcgggcgtccagctcagtgacttctccctgatcatcatcgatgagtgtcaccatacaaataaggaggccgtctacaacaatattatgcggcattacttgatgcagaagcttaaaaacaatcgactaaaaaaggagaataaacccgtgatcccactaccacaaatcctcggtttgacagcttcccctggagtggggggcgcgactaagcaagctaaggccgaggagcacatcctgaaactgtgcgcaaacctggatgctttcacaatcaagactgttaaagagaacctcgaccagctgaaaaaccagatccaagagccatgcaagaaatttgctattgcagacgctactagggaagaccccttcaaggaaaagttactggaaattatgacccgaatacaaacgtactgtcagatgagccccatgtctgattttgggacgcagccttacgaacagtgggctattcaaatggaaaaaaaagcggccaaggaaggcaatcggaaagaaagggtgtgcgccgagcacctgagaaagtacaatgaagccctgcagatcaatgacacaatccgaatgattgacgcatatacccaccttgagaccttctataacgaggaaaaggataaaaagtttgccgttatcgaagacgacagcgacgaagggggagatgacgaatactgcgacggtgacgaggacgaagatgacctgaaaaagcccctcaagcttgatgagaccgatcgatttttgatgaccctatttttcgaaaacaacaaaatgttaaagcgcctagcagagaatcctgagtatgaaaacgaaaaactgaccaagctccgcaataccattatggaacagtacacccgaactgaggaatccgctcgcggaattatttttactaaaacgaggcagtctgcatatgcactgtcccaatggatcactgaaaatgaaaagttcgctgaagtgggcgtgaaggcccatcacctaatcggcgcagggcatagctctgaattcaaacccatgacccagaatgagcagaaggaggtaatctcaaaattcagaacaggtaagatcaaccttctcatcgccactaccgtggccgaggaaggcctggacattaaggagtgcaacatcgtcatcagatacggactggttaccaatgagatcgcaatggtccaggcgaggggacgcgccagagcagatgagtccacatatgtgctggtggcacactccgggagcggcgtcatcgaacacgagactgtgaatgactttagagagaagatgatgtacaaggccatacactgcgtccagaacatgaagcccgaggaatatgcacacaagattctggaactgcagatgcaatctatcatggagaaaaagatgaaaactaaacgaaatatagctaaacactacaagaataacccatcgttaattacctttctgtgcaaaaattgttccgttctcgcgtgctcgggagaggacattcatgttattgagaaaatgcatcatgtaaacatgaccccagagttcaaggaactctatattgttcgggagaataaggcgcttcagaaaaagtgcgcagactatcagataaacggtgaaattatatgtaagtgtggccaggcttgggggaccatgatggtgcataaaggcctcgatctcccttgtctgaagattcggaactttgttgtggtctttaaaaacaattccaccaaaaagcaatacaaaaagtgggtggagttgcccattacatttccaaatttagattactctgagtgttgtctgtttagtgacgaggactag

SEQ ID NO: 211768 - DNA, 3595 bp, Artificial Sequence
  derived and/or modified sequence
aacagaaaccaaagtcaggcaaactctgtaagaactgcctgacagaaagctggactcaaagctcctacccgagtgtgcagcaggatcgccccggtccgggaccccaggcgcacaccgcagagtccaaagtgccgcgcctgccggccgcacctgcctgccgcggccccgcgcgccgccccgctgcccacctgcccgcctgcccacctgcccaggtgcgagtgcagccccgcgcgccggcctgagagccctgtggacaacctcgtcattgtcaggcacagagcggtagaccctgcttctctaagtgggcagcggacagcggcacgcacatttcacctgtcccgcagacaacagcaccatctgcttgggagaaccctctcccttctctgagaaagaaagatgtcgaatgggtattccacagacgagaatttccgctatctcatctcgtgcttcagggccagggtgaaaatgtacatccaggtggagcctgtgctggactacctgacctttctgcctgcagaggtgaaggagcagattcagaggacagtcgccacctccgggaacatgcaggcagttgaactgctgctgagcaccttggagaagggagtctggcaccttggttggactcgggaattcgtggaggccctccggagaaccggcagccctctggccgcccgctacatgaaccctgagctcacggacttgccctctccatcgtttgagaacgctcatgatgaatatctccaactgctgaacctccttcagcccactctggtggacaagcttctagttagagacgtcttggataagtgcatggaggaggaactgttgacaattgaagacagaaaccggattgctgctgcagaaaacaatggaaatgaatcaggtgtaagagagctactaaaaaggattgtgcagaaagaaaactggttctctgcatttctgaatgttcttcgtcaaacaggaaacaatgaacttgtccaagagttaacaggctctgattgctcagaaagcaatgcagagattgagaatttatcacaagttgatggtcctcaagtggaagagcaacttctttcaaccacagttcagccaaatctggagaaggaggtctggggcatggagaataactcatcagaatcatcttttgcagattcttctgtagtttcagaatcagacacaagtttggcagaaggaagtgtcagctgcttagatgaaagtcttggacataacagcaacatgggcagtgattcaggcaccatgggaagtgattcagatgaagagaatgtggcagcaagagcatccccggagccagaactccagctcaggccttaccaaatggaagttgcccagccagccttggaagggaagaatatcatcatctgcctccctacagggagtggaaaaaccagagtggctgtttacattgccaaggatcacttagacaagaagaaaaaagcatctgagcctggaaaagttatagttcttgtcaataaggtactgctagttgaacagctcttccgcaaggagttccaaccatttttgaagaaatggtatcgtgttattggattaagtggtgatacccaactgaaaatatcatttccagaagttgtcaagtcctgtgatattattatcagtacagctcaaatccttgaaaactccctcttaaacttggaaaatggagaagatgctggtgttcaattgtcagacttttccctcattatcattgatgaatgtcatcacaccaacaaagaagcagtgtataataacatcatgaggcattatttgatgcagaagttgaaaaacaatagactcaagaaagaaaacaaaccagtgattccccttcctcagatactgggactaacagcttcacctggtgttggaggggccacgaagcaagccaaagctgaagaacacattttaaaactatgtgccaatcttgatgcatttactattaaaactgttaaagaaaaccttgatcaactgaaaaaccaaatacaggagccatgcaagaagtttgccattgcagatgcaaccagagaagatccatttaaagagaaacttctagaaataatgacaaggattcaaacttattgtcaaatgagtccaatgtcagattttggaactcaaccctatgaacaatgggccattcaaatggaaaaaaaagctgcaaaagaaggaaatcgcaaagaacgtgtttgtgcagaacatttgaggaagtacaatgaggccctacaaattaatgacacaattcgaatgatagatgcgtatactcatcttgaaactttctataatgaagagaaagataagaagtttgcagtcatagaagatgatagtgatgagggtggtgatgatgagtattgtgatggtgatgaagatgaggatgatttaaagaaacctttgaaactggatgaaacagatagatttctcatgactttattttttgaaaacaataaaatgttgaaaaggctggctgaaaacccagaatatgaaaatgaaaagctgaccaaattaagaaataccataatggagcaatatactaggactgaggaatcagcacgaggaataatctttacaaaaacacgacagagtgcatatgcgctttcccagtggattactgaaaatgaaaaatttgctgaagtaggagtcaaagcccaccatctgattggagctggacacagcagtgagttcaaacccatgacacagaatgaacaaaaagaagtcattagtaaatttcgcactggaaaaataaatctgcttatcgctaccacagtggcagaagaaggtctggatattaaagaatgtaacattgttatccgttatggtctcgtcaccaatgaaatagccatggtccaggcccgtggtcgagccagagctgatgagagcacctacgtcctggttgctcacagtggttcaggagttatcgaacatgagacagttaatgatttccgagagaagatgatgtataaagctatacattgtgttcaaaatatgaaaccagaggagtatgctcataagattttggaattacagatgcaaagtataatggaaaagaaaatgaaaaccaagagaaatattgccaagcattacaagaataacccatcactaataactttcctttgcaaaaactgcagtgtgctagcctgttctggggaagatatccatgtaattgagaaaatgcatcacgtcaatatgaccccagaattcaaggaactttacattgtaagagaaaacaaagcactgcaaaagaagtgtgccgactatcaaataaatggtgaaatcatctgcaaatgtggccaggcttggggaacaatgatggtgcacaaaggcttagatttgccttgtctcaaaataaggaattttgtagtggttttcaaaaataattcaacaaagaaacaatacaaaaagtgggtagaattacctatcacatttcccaatcttgactattcagaatgctgtttatttagtgatgaggattagcacttgattgaagattcttttaaaatactatcagttaaacatttaatatgattatgattaatgtattcattatgctacagaactgacataagaatcaataaaatgattgttttactctgca

SEQ ID NO: 211769 - DNA, 3452 bp, Artificial Sequence
  derived and/or modified sequence
acagaaaccaaagtcaggcaaactctgtaagaactgcctgacagaaagctggactcaaagctcctacccgagtgtgcagcaggatcgccccggtccgggaccccaggcgcacaccgcagagtccaaagtgccgcgcctgccggccgcacctgcctgcctgagagccctgtggacaacctcgtcattgtcaggcacagagcggtagaccctgcttctctaagtgggcagcggacagcggcacgcacatttcacctgtcccgcagacaacagcaccatctgcttgggagaaccctctcccttctctgagaaagaaagatgtcgaatgggtattccacagacgagaatttccgctatctcatctcgtgcttcagggccagggtgaaaatgtacatccaggtggagcctgtgctggactacctgacctttctgcctgcagaggtgaaggagcagattcagaggacagtcgccacctccgggaacatgcaggcagttgaactgctgctgagcaccttggagaagggagtctggcaccttggttggactcgggaattcgtggaggccctccggagaaccggcagccctctggccgcccgctacatgaaccctgagctcacggacttgccctctccatcgtttgagaacgctcatgatgaatatctccaactgctgaacctccttcagcccactctggtggacaagcttctagttagagacgtcttggataagtgcatggaggaggaactgttgacaattgaagacagaaaccggattgctgctgcagaaaacaatggaaatgaatcaggtgtaagagagctactaaaaaggattgtgcagaaagaaaactggttctctgcatttctgaatgttcttcgtcaaacaggaaacaatgaacttgtccaagagttaacaggctctgattgctcagaaagcaatgcagagattgagaatttatcacaagttgatggtcctcaagtggaagagcaacttctttcaaccacagttcagccaaatctggagaaggaggtctggggcatggagaataactcatcagaatcatcttttgcagattcttctgtagtttcagaatcagacacaagtttggcagaaggaagtgtcagctgcttagatgaaagtcttggacataacagcaacatgggcagtgattcaggcaccatgggaagtgattcagatgaagagaatgtggcagcaagagcatccccggagccagaactccagctcaggccttaccaaatggaagttgcccagccagccttggaagggaagaatatcatcatctgcctccctacagggagtggaaaaaccagagtggctgtttacattgccaaggatcacttagacaagaagaaaaaagcatctgagcctggaaaagttatagttcttgtcaataaggtactgctagttgaacagctcttccgcaaggagttccaaccatttttgaagaaatggtatcgtgttattggattaagtggtgatacccaactgaaaatatcatttccagaagttgtcaagtcctgtgatattattatcagtacagctcaaatccttgaaaactccctcttaaacttggaaaatggagaagatgctggtgttcaattgtcagacttttccctcattatcattgatgaatgtcatcacaccaacaaagaagcagtgtataataacatcatgaggcattatttgatgcagaagttgaaaaacaatagactcaagaaagaaaacaaaccagtgattccccttcctcagatactgggactaacagcttcacctggtgttggaggggccacgaagcaagccaaagctgaagaacacattttaaaactatgtgccaatcttgatgcatttactattaaaactgttaaagaaaaccttgatcaactgaaaaaccaaatacaggagccatgcaagaagtttgccattgcagatgcaaccagagaagatccatttaaagagaaacttctagaaataatgacaaggattcaaacttattgtcaaatgagtccaatgtcagattttggaactcaaccctatgaacaatgggccattcaaatggaaaaaaaagctgcaaaagaaggaaatcgcaaagaacgtgtttgtgcagaacatttgaggaagtacaatgaggccctacaaattaatgacacaattcgaatgatagatgcgtatactcatcttgaaactttctataatgaagagaaagataagaagtttgcagtcatagaagatgatagtgatgagggtggtgatgatgagtattgtgatggtgatgaagatgaggatgatttaaagaaacctttgaaactggatgaaacagatagatttctcatgactttattttttgaaaacaataaaatgttgaaaaggctggctgaaaacccagaatatgaaaatgaaaagctgaccaaattaagaaataccataatggagcaatatactaggactgaggaatcagcacgaggaataatctttacaaaaacacgacagagtgcatatgcgctttcccagtggattactgaaaatgaaaaatttgctgaagtaggagtcaaagcccaccatctgattggagctggacacagcagtgagttcaaacccatgacacagaatgaacaaaaagaagtcattagtaaatttcgcactggaaaaataaatctgcttatcgctaccacagtggcagaagaaggtctggatattaaagaatgtaacattgttatccgttatggtctcgtcaccaatgaaatagccatggtccaggcccgtggtcgagccagagctgatgagagcacctacgtcctggttgctcacagtggttcaggagttatcgaacatgagacagttaatgatttccgagagaagatgatgtataaagctatacattgtgttcaaaatatgaaaccagaggagtatgctcataagattttggaattacagatgcaaagtataatggaaaagaaaatgaaaaccaagagaaatattgccaagcattacaagaataacccatcactaataactttcctttgcaaaaactgcagtgtgctagcctgttctggggaagatatccatgtaattgagaaaatgcatcacgtcaatatgaccccagaattcaaggaactttacattgtaagagaaaacaaagcactgcaaaagaagtgtgccgactatcaaataaatggtgaaatcatctgcaaatgtggccaggcttggggaacaatgatggtgcacaaaggcttagatttgccttgtctcaaaataaggaattttgtagtggttttcaaaaataattcaacaaagaaacaatacaaaaagtgggtagaattacctatcacatttcccaatcttgactattcagaatgctgtttatttagtgatgaggattagcacttgattgaagattcttttaaaatactatcagttaaacatttaatatgattatgatt

SEQ ID NO: 211770 - DNA, 3078 bp, Artificial Sequence
  derived and/or modified sequence
atgagcaatggctacagcacagatgagaacttccgctacctgatcagctgcttccgggcccgggtgaagatgtacatccaggtggagcctgtgctggactacctgaccttcctgcctgctgaggtgaaggagcagatccagaggacagtggccaccagcggcaacatgcaggccgtggagctgctgctgagcaccctggagaagggcgtgtggcacctgggctggacccgggagtttgtggaggccctgcggaggacaggcagccccctggccgcccgctacatgaaccctgagctgacagacctgcccagccccagctttgaaaatgcccatgatgagtacctgcagctgctgaacctgctgcagcccaccctggtggacaagctgctggtgagagatgtgctggacaagtgcatggaggaggagctgctgaccattgaagatagaaacagaattgctgctgctgagaacaatggaaatgaaagtggagtgcgggagctgctgaagagaattgtgcagaaggagaactggttcagcgccttcctgaatgtgctgcggcagacaggcaacaatgagctggtgcaggagctgaccggcagtgactgcagcgagagcaatgctgagattgagaacctgagccaggtggatggcccccaggtggaggagcagctgctgagcaccaccgtgcagcccaacctggagaaggaggtgtggggcatggagaacaacagcagcgagagcagctttgctgacagctctgtggtgtctgagagtgacaccagcctggccgagggctctgtgtcctgcctggatgagagcctgggccacaacagcaacatgggcagtgacagcggcaccatgggcagtgacagtgatgaggagaatgtggccgcccgggccagccctgagcctgagctgcagctgcggccctaccagatggaggtggcccagcctgccctggagggcaagaacatcatcatctgcctgcccactggaagtggcaagaccagggtggccgtgtacatcgccaaggaccacctggacaagaagaagaaggccagcgagcccgggaaggtgattgtgctggtgaacaaggtgctgctggtggagcagctgttcaggaaggagttccagcccttcctgaagaagtggtacagagtcatcggcctgagcggggacacccagctgaagatctccttccctgaggtggtgaagagctgtgacatcatcatcagcacagcccagatcctggagaacagcctgctgaacctggagaatggagaagatgctggggtgcagctgagtgacttcagcctcatcatcattgatgagtgccaccacaccaacaaggaggccgtgtacaacaacatcatgaggcactacctgatgcagaagctgaagaacaaccggctgaagaaggagaacaagcctgtgatccccctgccccagatcctgggcctgacagccagccctggggtgggcggggccaccaagcaggccaaggccgaggagcacatcctgaagctgtgtgccaacctggatgccttcaccatcaagacagtgaaggagaacctggaccagctgaagaaccagatccaggagccctgcaagaagtttgccatcgcagatgccacccgggaggaccccttcaaggagaagctgctggagatcatgacccgcatccagacctactgccagatgagccccatgtctgactttggcacccagccctatgagcagtgggccatccagatggagaagaaggccgccaaggagggcaacaggaaggagcgggtgtgtgccgagcacctgaggaagtacaatgaggccctgcagatcaatgacaccatccgcatgattgatgcctacacccacctggagaccttctacaatgaggagaaggacaagaagtttgctgtgattgaagatgacagtgatgagggcggagatgatgagtactgtgatggagatgaagatgaagatgacctgaagaagcccctgaagctggatgaaacagaccgcttcctgatgaccctcttctttgagaacaacaagatgctgaagaggctggccgagaacccagaatatgaaaatgagaagctgaccaagctgaggaacaccatcatggagcagtacaccaggacagaggagagcgcccggggcatcatcttcaccaagacccggcagagcgcctatgccctgagccagtggatcacagaaaatgagaagtttgctgaggtgggcgtgaaggcccaccacctgattggagctggccacagcagcgagttcaagcccatgacccagaatgagcagaaggaggtgatcagcaagttcagaacaggcaagatcaacctgctgattgccaccaccgtggccgaggagggcctggacatcaaggagtgcaacatcgtcatccgctatggcctggtgaccaatgagatcgccatggtgcaggcccggggccgggcccgggcagatgagagcacctacgtgctggtggcccacagcggcagcggcgtgattgaacatgaaacagtgaatgacttccgggagaagatgatgtacaaggccatccactgtgtgcagaacatgaagccagaggagtatgcccacaagatcctggagctgcagatgcagagcatcatggagaagaagatgaagaccaagaggaacatcgccaagcactacaagaacaaccccagcctcatcaccttcctgtgcaagaactgcagcgtgctggcctgcagcggggaggacatccacgtgattgagaagatgcaccacgtgaacatgaccccagagttcaaggagctgtacatcgtgcgggagaacaaggccctgcagaagaagtgtgccgactaccagatcaatggagagatcatctgcaagtgtggccaggcctggggcaccatgatggtgcacaagggcctggacctgccctgcctgaagatccggaactttgtggtggtgttcaagaacaacagcaccaagaagcagtacaagaagtgggtggagctgcccatcaccttccccaacctggactacagcgagtgctgcctcttcagtgatgaggactag

SEQ ID NO: 211771 - DNA, 3078 bp, Artificial Sequence
  derived and/or modified sequence
atgagcaacggctacagcaccgacgagaacttccggtacctgatctcttgtttccgggcccgcgtcaagatgtacatccaggtggagcctgtgcttgactatttgaccttcctgccagccgaggttaaggaacagatccagcgaaccgtagcgaccagcggtaacatgcaggccgttgaactgctcttgtcaacgctcgagaagggagtctggcaccttggctggacgagagagttcgttgaggctctgcgccggacaggaagtccactcgccgcccggtacatgaatcccgaacttacagacctgccaagccccagcttcgagaacgcgcatgatgaatacctccagttgctgaacttgctgcagccaaccctggttgacaagctcctggtgagggacgttctggataagtgtatggaggaggaactgctgaccattgaagaccggaatcgtatcgccgctgcagagaacaacggcaacgaatcgggagtcagggaactgctgaagaggatcgtccagaaagaaaactggttctctgcctttcttaacgtgctgaggcagaccggtaacaacgaactggtgcaggagctgactggatcagactgctcagagagcaacgcggagattgaaaatctttcacaggtggatgggcctcaggtggaagaacagctgctgtcaacaactgtgcaacctaatcttgagaaagaagtctggggaatggagaacaattcgtccgaatcctctttcgccgattcgagcgtcgtgtccgagtcggacacctctttggccgaaggatcagtaagctgcctcgacgagtctttgggccataattcgaatatgggctccgacagtggcacaatgggaagtgactccgacgaggaaaatgtcgccgccagagcttctccagagcctgagctgcagctccggccctaccagatggaggtcgctcagcctgcattggaaggcaaaaatattatcatatgcctgcctactggctctggtaagaccagggtagcagtctacatagctaaggatcatttggataagaagaaaaaggctagcgagccgggcaaagtcatcgtactcgtcaacaaagttctgctcgtggaacagttattcaggaaggagttccagcctttcctgaagaaatggtatcgagttatcggcctgtcgggagacacccaactgaagatctccttccccgaagtggtgaaatcatgcgacataatcatatccactgcacagattcttgaaaactccttgctgaacttggagaacggcgaagatgccggggtacagctgtctgatttttcactgatcatcattgatgagtgtcatcacactaataaggaggctgtgtacaacaacattatgaggcattacttgatgcagaagctgaagaacaaccgccttaagaaagaaaacaaacccgttattccccttccgcaaatactcggtctcaccgcgagcccaggggtggggggcgctaccaaacaggccaaagccgaggagcatatccttaagctttgcgctaacctggacgcctttaccatcaaaacagtcaaggaaaatctcgaccagttaaaaaaccagatacaggaaccctgtaaaaaattcgcaatcgccgatgctactagggaggatcctttcaaggaaaaactgctggagatcatgacgcgcatccaaacatattgtcaaatgagtcctatgtcagactttggcacacaaccctatgaacagtgggccatccaaatggaaaagaaggcagcgaaagagggcaaccgtaaggagagggtgtgcgctgagcatctgagaaaatacaacgaagcactccagataaacgacacaattagaatgatcgatgcatacacccacttagaaacattctacaacgaagagaaagataagaagtttgccgtgattgaagatgatagtgacgaaggcggtgatgatgagtactgcgacggcgatgaggatgaggacgatttgaaaaagcctctaaagctggacgaaactgaccggtttctgatgaccctgttttttgaaaataacaaaatgctcaagcggctagccgaaaacccagaatacgaaaacgaaaagctcaccaaactgcggaacaccattatggagcagtatacgcgaacagaggaaagcgcccgcggtatcatttttaccaagactcgacagtccgcttatgccctatctcagtggattactgagaatgagaagtttgctgaagtaggagtgaaggcgcatcacctaattggggctgggcactcatcagagtttaaaccaatgactcagaacgaacagaaagaggtgatttccaaatttcgtaccggcaaaatcaatctgctcatcgcgaccaccgtggccgaggagggcctggatataaaggaatgcaacatcgttataaggtatggccttgtaactaatgagatagctatggtgcaggccaggggacgggcccgcgccgatgagtccacttacgtcttagtcgctcactctggcagtggagtgatcgagcatgaaaccgtgaacgatttcagggaaaaaatgatgtataaagccattcattgcgtgcagaacatgaagcccgaggaatacgcccacaaaatactcgagttgcagatgcaaagcattatggagaaaaaaatgaagaccaaacgcaatatagcaaagcactataagaacaaccccagcctcatcacattcctgtgcaagaactgtagcgttctcgcttgtagtggcgaggatatccatgtaatcgaaaagatgcatcacgtcaatatgacccccgaattcaaagagctctatattgttagagagaacaaagcactgcagaaaaagtgcgccgactaccaaataaacggcgagataatctgcaagtgtgggcaggcctggggcactatgatggtacataagggcctcgatctaccatgcctgaaaatccgaaatttcgtggtagtgtttaagaacaattctaccaagaagcagtacaaaaagtgggtagagttacccattacatttcctaacctggattattccgaatgctgccttttcagcgatgaggactag

SEQ ID NO: 211772 - DNA, 3078 bp, Artificial Sequence
  derived and/or modified sequence
atgagcaacggctacagcaccgacgagaacttccggtacctgatcagctgtttccgagcgcgcgttaagatgtacatccaagttgagccagtactagactatctgaccttccttcctgcagaggtgaaagagcagattcagcgaacagtggccacttctggcaatatgcaagcggtggagctgctcctctcaaccttggaaaaaggcgtgtggcacctgggctggacacgcgaatttgtcgaggccctccgaagaaccggatccccccttgccgccaggtatatgaatcccgaactgactgacctcccttccccgagttttgaaaacgcccacgatgagtacctccaactactgaacctactgcagcccactctggttgataagctgctggtccgggatgtgctggacaaatgcatggaagaagaactgttgacaattgaagatcggaacaggattgcggccgctgaaaacaacggtaatgaaagcggggtccgggagctgttaaagagaattgtccagaaggagaactggttctccgccttcctgaacgttttgaggcagaccggcaataacgagcttgtacaagagttgaccgggagtgattgctctgagtccaatgcagaaatcgagaatcttagccaggtggacgggccccaggtggaggagcaactgctctccacaaccgtacaaccaaacctggaaaaagaggtgtggggtatggagaacaactcatctgaatcgtcattcgctgattcctctgtagtctcagaatccgacacgagccttgcagaggggagtgtgtcatgccttgatgaaagtcttggccacaactcaaacatggggtccgactcaggcacaatgggaagtgacagcgatgaagaaaacgtggctgcccgtgcgtccccagaaccagagctgcagctgcgaccctaccagatggaggtggcgcaacctgcgctcgagggcaagaacatcattatatgtctccccaccggatccgggaagactagagtcgctgtctatatcgccaaagaccatctggacaaaaaaaaaaaagcgtcggagcctggaaaagttatcgtgctggtgaataaagttctactggtcgaacagctctttcggaaagaattccagcccttcctgaagaagtggtatcgcgtcattggcttgtctggggacacacagctgaagatctcgtttccggaggtggtgaagagctgcgacattatcatttccactgcacagatcctcgagaatagtctgttgaacctcgagaacggcgaagatgccggcgtgcagctcagcgatttcagtctcatcatcatcgacgagtgccaccacaccaacaaggaggccgtttacaataatatcatgcgacattatctcatgcagaagctgaagaataatcgactcaaaaaagaaaacaagcctgtgatccccctgcctcagatcctgggccttacagcctcccctggcgttgggggggccactaagcaggccaaggctgaggagcacatcctgaaattgtgtgccaatctcgacgccttcactatcaaaacagtgaaagagaacttggatcagctaaaaaaccaaatccaagaaccatgcaagaaattcgctatcgcagacgccacaagggaagatccttttaaagaaaaactgctcgagattatgaccagaattcagacctactgtcagatgagcccaatgtccgattttggtacccagccgtacgaacagtgggccattcagatggagaagaaagcggccaaagagggcaatcggaaggaacgggtatgcgctgaacatctcaggaagtacaatgaagccctgcaaattaacgacaccattcggatgatcgatgcctacacccatctggagacattctataacgaagaaaaagacaagaaattcgccgtcatcgaggatgactctgatgaggggggggatgatgagtactgtgacggggatgaagacgaagatgacctaaagaaacctttgaaactggacgagacagaccggttcctaatgacactttttttcgaaaacaacaagatgctcaaacgtttggcggaaaaccccgagtatgagaacgagaaattgactaaactccgcaacacaattatggaacagtacacacgcactgaagaatccgcacggggaatcatttttacaaaaactcgccagagcgcttatgccctttcccaatggataactgaaaatgagaaattcgctgaggtaggcgtcaaagctcaccacctcattggcgcaggccattcaagtgagttcaaacccatgacacagaacgagcaaaaggaagttatatcgaaatttcgcaccggtaaaatcaatctgctgattgcaaccacagtcgccgaggaaggcctagatatcaaggaatgtaatatcgttatcaggtacggcctggtgactaatgagattgcaatggtccaggccagagggcgcgccagggccgacgagtcaacttacgtccttgttgcccacagcgggagcggagtgattgagcatgagacagtcaacgactttcgagaaaaaatgatgtacaaagccattcactgtgtgcaaaatatgaagccggaggaatacgctcacaagatcctggagctccagatgcagtctataatggagaagaagatgaaaacaaagcgcaatatcgcaaagcactataaaaataacccctctctgataaccttcctttgtaagaattgctccgtgctggcctgttctggggaggacatccacgttatcgagaagatgcatcatgttaatatgacaccagagttcaaagaactttatattgtccgtgagaacaaggccctccagaaaaaatgtgcagactaccaaatcaacggtgagattatctgcaaatgcggacaggcttggggtaccatgatggtgcataagggcctcgatctgccttgtctgaagatcagaaactttgtcgtagtcttcaaaaataatagcacaaaaaagcaatataaaaagtgggttgagctgccaataacatttccaaacctcgactacagtgagtgttgcctgttttccgacgaagactag

SEQ ID NO: 211773 - DNA, 3078 bp, Artificial Sequence
  derived and/or modified sequence
atgagcaacggctatagcacggatgaaaacttccgatacctgatatcttgctttcgggctcgagttaaaatgtacattcaggtggaacccgtcttagactacctgactttcctacctgctgaggtcaaggagcagatccaaagaaccgtggcgacctctggcaatatgcaggccgtcgagctcctcttgagtacactagagaagggggtgtggcacctaggatggactcgcgaattcgtcgaggctctccggaggactgggtcccccctggccgcacggtacatgaatccggaactgacagatctgccaagccctagcttcgaaaatgcccatgacgaatatctgcagcttctgaatctcctacagccaacattagtagacaaactcctggtaagagacgttctcgataaatgcatggaggaagagctcctgaccatcgaagaccggaataggattgccgctgctgaaaataacggaaacgagtctggcgtacgagaattgctgaagcggattgtccagaaggaaaactggtttagcgcttttctaaatgtgctgcgccagactggtaataacgaactggtgcaggaactgaccgggagtgattgcagtgaatctaatgccgagatcgaaaacctttctcaggtagacggacctcaggtggaggaacaattactcagcaccaccgtccagcctaacctggagaaggaggtttggggcatggagaataactcctccgagtcttcttttgccgatagctccgtcgtaagtgagtccgacacatctcttgcggaagggagtgtgtcttgtctcgacgagtctctgggccacaactctaatatgggcagcgacagcggaactatgggtagcgactccgacgaagaaaacgttgccgcacgagccagtcctgaaccagagctccagctgcgcccttaccaaatggaggtggcacagcctgccttagagggcaagaatattatcatttgcctgcccacgggcagcggaaaaacaagggtggcagtctacattgccaaggaccatcttgataaaaagaaaaaggcctcagaaccgggtaaggtcattgtcttggttaacaaggttctgcttgtggagcaactgtttcgcaaggaatttcagccctttctaaagaaatggtatagagttattggactctctggagatacgcagctgaagatatcttttccggaggttgtgaaaagttgcgacatcattattagtaccgctcagatactggagaactccttactgaatctggagaatggagaagatgctggcgtgcagctgagcgatttttcccttatcataattgatgagtgccaccacacaaataaggaagcggtttacaacaatatcatgagacattatctgatgcagaaattaaagaataaccggctgaagaaggagaacaaaccagtgattcctctgcctcagatacttggcttgaccgcttccccgggagtcggcggagcaaccaagcaggccaaggcagaagagcatatcctcaagctgtgcgccaacctggatgctttcacaataaagacagtgaaggagaatctggaccagctgaaaaaccagattcaggaaccttgcaagaagtttgccattgctgacgccacacgggaggatccatttaaggaaaagctcctggagatcatgacccgtatccagacctactgccagatgtcacccatgtccgacttcggtacccagccttatgaacaatgggccattcagatggaaaaaaaagctgcaaaagagggcaaccggaaggaacgcgtgtgtgccgagcatctcaggaagtataatgaagcgttgcaaattaatgatacaattcggatgatcgacgcgtatacacaccttgaaactttttacaatgaagagaaagacaaaaaattcgctgtaatcgaggatgactccgatgaaggaggtgacgacgaatactgcgacggagacgaggacgaggatgacctgaagaagcccttgaagctggacgagactgataggtttcttatgacccttttctttgagaataataaaatgctaaagaggctcgccgagaatccagaatacgaaaacgaaaagctgaccaagctcagaaatacaattatggagcaatatactaggactgaggagagcgccaggggtatcatattcactaaaacccggcagtctgcctatgccctcagccagtggataacagaaaatgaaaagttcgcagaagtgggcgttaaagcgcatcatcttattggtgcagggcactcttctgagtttaagcccatgacacaaaacgaacagaaggaagtgatctctaagtttcgcactggaaaaataaatctcctgattgctacaactgtggccgaagaaggcctcgacataaaggagtgcaacatagttatccgttacggcttagtcacaaacgagattgctatggtgcaggccagaggcagggctcgggcagacgaatctacttatgtactcgtggctcactctggatccggggtgattgagcacgaaacggttaatgattttcgggagaagatgatgtacaaagcaattcactgtgtgcagaacatgaaacctgaggagtacgcgcacaagatactggaactgcagatgcagtccataatggaaaaaaagatgaaaacaaagcgaaatatcgccaagcattataaaaataatccctctcttattacattcctctgtaagaactgttctgtactagcttgcagtggtgaggatattcacgttattgaaaaaatgcaccatgtaaacatgaccccggagttcaaggagctttatattgtgagagagaacaaggcattgcaaaagaaatgtgccgactaccagattaatggagagattatctgtaaatgcggccaggcctggggcactatgatggtgcacaaggggctggatcttccttgccttaaaattaggaattttgtcgtcgtgttcaagaacaacagcaccaagaagcagtataaaaaatgggtcgaactgccaatcactttcccgaaccttgactacagtgagtgctgtctgttctccgatgaagactag

SEQ ID NO: 211774 - DNA, 3078 bp, Artificial Sequence
  derived and/or modified sequence
atgagtaatggttacagcaccgacgaaaacttcaggtatctcatttcctgcttcagggcgcgagtaaagatgtatatccaagtcgagcccgtgctggactacctcacatttctgcccgctgaagtgaaagaacaaattcagcggaccgtggcaaccagtggcaatatgcaggcggtcgaactccttctcagtaccctggagaagggagtgtggcatctgggctggaccagagagttcgtcgaggcactgagaaggaccgggagccctctggccgcaagatatatgaatcccgagctaacagacctgccgtcacctagctttgagaacgcacatgatgaatacctgcagctcttaaacctgctccagccaactcttgtcgacaaactgttagtgcgggacgttttggataagtgcatggaggaagagctgttaacaattgaggatcgaaaccgaattgctgccgctgaaaacaacggaaatgaatctggcgtccgcgagctgttgaagcgaattgtacagaaagaaaattggttttcagcattcctcaacgtgctgcgacagactggaaataatgagttagtacaggaactcacaggctcggattgcagtgagtcaaacgccgaaatcgaaaacctgtcccaggtcgatgggccacaggttgaggagcagctcctgagtaccacagttcaaccgaatctagagaaagaggtgtggggcatggagaacaactcttctgagtcatcctttgccgactcatccgtggtctcggagtcagacacttccctcgccgagggaagtgtctcatgcctggatgaaagtttgggccacaactccaacatgggcagtgatagcggcaccatgggcagtgactctgacgaggagaacgtcgcggctcgagccagtccagagccagagttacagttacggccatatcaaatggaggtggcacagcccgctctggagggtaagaacataattatctgccttcccaccggcagcgggaaaacccgcgtggccgtttacattgctaaggatcacctcgataaaaagaaaaaagcgagtgaacccggaaaagttattgttttagtcaacaaagtcctcttagtagaacagctcttcagaaaagaatttcaaccattcctaaaaaaatggtacagggtgattggactcagtggagatactcagctgaaaatcagctttcctgaggtagtgaaatcctgcgatattattatcagcaccgcacagatcctggaaaatagtctcttaaatttggagaacggtgaagacgcgggtgtccagttgtcagattttagtctgattataatcgatgagtgccatcacactaacaaggaggccgtatataataatattatgagacattacctaatgcaaaaacttaaaaacaaccgcctgaagaaggagaacaagcccgtgatccccctgccgcagattctaggtctcaccgcaagtcccggagtgggaggcgcaactaagcaagccaaggcagaggaacatatccttaagctctgtgccaatctggacgcgtttaccataaaaactgtcaaggagaatttggaccagttgaagaaccagattcaggaaccgtgcaagaagttcgccattgccgacgccactagagaagacccttttaaggaaaagctgttagagatcatgacaaggattcagacctactgtcagatgtcccccatgtccgactttgggacccagccgtacgaacagtgggcaattcagatggaaaaaaaagccgctaaggaagggaatcgcaaggaaagggtttgtgctgagcaccttaggaagtataacgaggccctgcaaataaatgacaccatcagaatgatagacgcctacacccatcttgaaaccttttataacgaggagaaagacaagaagttcgctgtaatcgaggatgatagtgacgaaggaggcgacgatgagtattgcgacggagatgaggatgaggacgacctgaaaaaaccactgaaactagatgaaaccgaccggttcttgatgacactcttcttcgaaaacaacaagatgctcaaaagattggctgaaaacccagaatacgagaacgaaaaactcacaaagctgcggaacactataatggagcagtacacccgaaccgaagaaagcgccagagggattatcttcactaagacgcgccagtcggcttatgctctctctcagtggatcacggagaacgagaaattcgcggaggtgggcgttaaagcacaccaccttatcggcgctgggcacagcagcgagttcaaaccaatgacgcagaacgagcaaaaagaggtaatttcaaagtttcgcacgggcaaaatcaacctgttgatcgccactaccgtggccgaggaaggtttggatatcaaggagtgtaatattgtgattagatatgggttggtcaccaatgagatcgctatggtccaggctcggggacgagcgagagcagacgagtcaacatacgtgctggtagctcactctggtagcggagtgattgagcacgagactgtgaacgactttagggaaaagatgatgtacaaagctatacattgtgtccagaacatgaaaccagaagagtacgcccacaagattctcgaactgcagatgcaaagcattatggagaaaaagatgaaaaccaagcgaaacattgctaagcattacaaaaacaacccttccctgattacttttctgtgtaagaactgcagcgtcctagcgtgctcaggtgaagatatccatgtgatcgaaaaaatgcaccatgtcaacatgactccggaattcaaggaactctacattgtccgcgaaaataaagcactgcagaagaagtgcgctgactaccagatcaacggcgaaatcatctgcaagtgcgggcaagcttgggggacgatgatggtccataagggactggacttgccctgcctcaaaatccgtaactttgtagtagtatttaagaataacagcaccaagaaacaatataagaagtgggtcgagctcccgatcaccttccctaacttggattattcagagtgttgtctgtttagtgatgaggattag

SEQ ID NO: 211775 - DNA, 3078 bp, Artificial Sequence
  derived and/or modified sequence
atgagcaacggctacagcaccgacgagaacttcagatacctgatcagctgcttcagagccagagtgaagatgtacatccaggtggagcccgtgctggactacctgaccttcctgcccgccgaggtgaaggagcagatccagagaaccgtggccaccagcggcaacatgcaggccgtggagctgctgctgagcaccctggagaagggcgtgtggcacctgggctggaccagagagttcgtggaggccctgagaagaaccggcagccccctggccgccagatacatgaaccccgagctgaccgacctgcccagccccagcttcgagaacgcccacgacgagtacctgcagctgctgaacctgctgcagcccaccctggtggacaagctgctggtgagagacgtgctggacaagtgcatggaggaggagctgctgaccatcgaggacagaaacagaatcgccgccgccgagaacaacggcaacgagagcggcgtgagagagctgctgaagagaatcgtgcagaaggagaactggttcagcgccttcctgaacgtgctgagacagaccggcaacaacgagctggtgcaggagctgaccggcagcgactgcagcgagagcaacgccgagatcgagaacctgagccaggtggacggcccccaggtggaggagcagctgctgagcaccaccgtgcagcccaacctggagaaggaggtgtggggcatggagaacaacagcagcgagagcagcttcgccgacagcagcgtggtgagcgagagcgacaccagcctggccgagggcagcgtgagctgcctggacgagagcctgggccacaacagcaacatgggcagcgacagcggcaccatgggcagcgacagcgacgaggagaacgtggccgccagagccagccccgagcccgagctgcagctgagaccctaccagatggaggtggcccagcccgccctggagggcaagaacatcatcatctgcctgcccaccggcagcggcaagaccagagtggccgtgtacatcgccaaggaccacctggacaagaagaagaaggccagcgagcccggcaaggtgatcgtgctggtgaacaaggtgctgctggtggagcagctgttcagaaaggagttccagcccttcctgaagaagtggtacagagtgatcggcctgagcggcgacacccagctgaagatcagcttccccgaggtggtgaagagctgcgacatcatcatcagcaccgcccagatcctggagaacagcctgctgaacctggagaacggcgaggacgccggcgtgcagctgagcgacttcagcctgatcatcatcgacgagtgccaccacaccaacaaggaggccgtgtacaacaacatcatgagacactacctgatgcagaagctgaagaacaacagactgaagaaggagaacaagcccgtgatccccctgccccagatcctgggcctgaccgccagccccggcgtgggcggcgccaccaagcaggccaaggccgaggagcacatcctgaagctgtgcgccaacctggacgccttcaccatcaagaccgtgaaggagaacctggaccagctgaagaaccagatccaggagccctgcaagaagttcgccatcgccgacgccaccagagaggaccccttcaaggagaagctgctggagatcatgaccagaatccagacctactgccagatgagccccatgagcgacttcggcacccagccctacgagcagtgggccatccagatggagaagaaggccgccaaggagggcaacagaaaggagagagtgtgcgccgagcacctgagaaagtacaacgaggccctgcagatcaacgacaccatcagaatgatcgacgcctacacccacctggagaccttctacaacgaggagaaggacaagaagttcgccgtgatcgaggacgacagcgacgagggcggcgacgacgagtactgcgacggcgacgaggacgaggacgacctgaagaagcccctgaagctggacgagaccgacagattcctgatgaccctgttcttcgagaacaacaagatgctgaagagactggccgagaaccccgagtacgagaacgagaagctgaccaagctgagaaacaccatcatggagcagtacaccagaaccgaggagagcgccagaggcatcatcttcaccaagaccagacagagcgcctacgccctgagccagtggatcaccgagaacgagaagttcgccgaggtgggcgtgaaggcccaccacctgatcggcgccggccacagcagcgagttcaagcccatgacccagaacgagcagaaggaggtgatcagcaagttcagaaccggcaagatcaacctgctgatcgccaccaccgtggccgaggagggcctggacatcaaggagtgcaacatcgtgatcagatacggcctggtgaccaacgagatcgccatggtgcaggccagaggcagagccagagccgacgagagcacctacgtgctggtggcccacagcggcagcggcgtgatcgagcacgagaccgtgaacgacttcagagagaagatgatgtacaaggccatccactgcgtgcagaacatgaagcccgaggagtacgcccacaagatcctggagctgcagatgcagagcatcatggagaagaagatgaagaccaagagaaacatcgccaagcactacaagaacaaccccagcctgatcaccttcctgtgcaagaactgcagcgtgctggcctgcagcggcgaggacatccacgtgatcgagaagatgcaccacgtgaacatgacccccgagttcaaggagctgtacatcgtgagagagaacaaggccctgcagaagaagtgcgccgactaccagatcaacggcgagatcatctgcaagtgcggccaggcctggggcaccatgatggtgcacaagggcctggacctgccctgcctgaagatcagaaacttcgtggtggtgttcaagaacaacagcaccaagaagcagtacaagaagtgggtggagctgcccatcaccttccccaacctggactacagcgagtgctgcctgttcagcgacgaggactag

SEQ ID NO: 211776 - protein, 248 aa, Artificial Sequence
  derived and/or modified sequence
MADFDTYDDRAYSSFGGGRGSRGSAGGHGSRSQKELPTEPPYTAYVGNLPFNTVQGDIDAIFKDLSIRSVRLVRDKDTDKFKGFCYVEFDEVDSLKEALTYDGALLGDRSLRVDIAEGRKQDKGGFGFRKGGPDDRGMGSSRESRGGWDSRDDFNSGFRDDFLGGRGGSRPGDRRTGPPMGSRFRDGPPLRGSNMDFREPTEEERAQRPRLQLKPRTVATPLNQVANPNSAIFGGARPREEVVQKEQE

SEQ ID NO: 211777 - DNA, 288 bp, Artificial Sequence
  derived and/or modified sequence
atggctcactttaaagatgacctgcagacaaacgtggaaataattcccggcgaatctgcaccaagaaaggagtctccccgtcctcctgctcccccatctagcgctgccggagttggcgggtgttccaaccactctccctctgttcaggagtctccactctctccacccgccctggctcagcttggatcagcccagcagccgagcatgcggaccgagctttcctttagcgaaaaaaaggacactatgatcatatggcagatcaccatcaccgtgtggtgtcagcggtag

SEQ ID NO: 211778 - DNA, 2679 bp, Artificial Sequence
  derived and/or modified sequence
gcgcgcgcgtgcgcgtgcctgcgtccaagggatttgcgatcaggcggcgcggcggacagccccggcggcggggcggggggagttatattgcggggtccttcctcgctcaccctggttcctctcggagcggagacggcaaatggcggacttcgacacctacgacgatcgggcctacagcagcttcggcggcggcagagggtcccgcggcagtgctggtggccatggttcccgtagccagaaggagttgcccacagagcccccctacacagcatacgtaggaaatctacctttcaatacggttcagggcgacatagatgctatctttaaggatctcagcataaggagtgtacggctagtcagagacaaagacacagataaatttaaaggattctgctatgtagaattcgatgaagtggattcccttaaggaagccttgacatacgatggtgcactgttgggcgatcggtcacttcgtgtggacattgcagaaggcagaaaacaagataaaggtggctttggattcagaaaaggtggaccagatgacagaggaatgggtagctctcgagaatctagaggtggatgggattcccgggatgacttcaattctggcttcagggatgacttcttagggggcaggggaggtagtcgcccaggcgaccggcgaacaggcccccccatgggcagccgcttcagagatggccctcccctccgtggatccaacatggatttcagagaacccacagaagaggaaagagcacagagaccacgactccagcttaaacctcgaacagtcgcgacgcccctcaatcaagtagccaatcccaactctgctatcttcgggggtgccaggcctagagaggaagtcgttcaaaaggagcaagaatgagcctgcggttgggagggaatggggcgtggggggttagagcaggaccacagcctggtgagtccccgggcagccgtcctgcagccgccactcctgcgcctgccattggcctcctcacagcggaaacacagcttgtgagtgcatgtcagctgttaacaagtggtttttagtacattctgggctttgctgtatctatctagtgcctgtttgtgcgtttttttctttcttccgctgcttccccattttccttctgtcctttttctcctgctccttgttttcccagcagcacatggggttcctcggaggagcagaggtggccgccgtgggggggcgtttgggctgcggtgctgcgtcatttttcctttgctttctctttactttagacactggcccaactccaggcgtttcctttcattccctcagtgcttctcttctgacctgcatgttgagttctgtattgctggggcttccaacaaaaaccagagtcactgacagagggaacagcagagaccttgttggtattcagctgtgatggatatagagaatcagaggcaccttgttttcacaactaggataaaaatatctgcagggtcctttccattcctatttagagggagtcctggctccatgaccccctcccgagtggactgtccaagcagataggctcacacgagaaacagtgaggctgaaagggggggctatggaagagcggtagggagtccacggagaagatgcagtgaatgcttgcatgcattcacacgtgtgtgtgtcccagctagttcactcctttcgccgtgcgtggtggaggctggcctctctggctgggtgcagtgaatggccagcgggtttcttttctgctgggccaaggcgctttgggggtggagggggtggtgctggtgctgcactgggctgactgcggcgctgacgcagcgtttccccccatccctgttgcctgtgtgttgtgtggatctgttcctagtataggcaacataatgagatactgtgcttcccacctccccttcagttcagagccaaaatgggtctagaatctggcactttactcatttcctttgataaattgtactatgcagagctgtcaggaaccttcagatagcagtagaggactgcagctgtctaggtctgcggccacatcttggggacacactggactgttcccatgtgcagggttcagcagttatgtgggagtgctaggggttaggcttttgagcttgaacgcctgcgtgtgaacagatgaaaaatccttcagtacccaagtcccagtctgtcctatggggagcagtttgggggcggccggcagcaggagcctgggaaagaggccctcgccaggtgatggcagggccagggtggcctggggcacccagcggaatgtgcttagtatttggtcaccagccgtcatcctgggcttttcctactgtgtcttgttacaaggcctcagcaatccacagaactctctctccttccttccacctgtcagcttctctgcttctgagataagaaccatttgtgtaacaccaacacttaacttcagaaagacatgcattatgtggtgtaatcaaacccgatgctttcagatgacctacttacatcttcaatgtggataagataaagaacaaaacacatgcatctaaactgctgggcaatccagttgacttttaaatgtaagaatggaattccaaacacttaacacattcagctatatgacagaaagtaaatctatggatatggtattttgtgaatgatcttttaaataaaagaaaaccttacgtaatatttaa

SEQ ID NO: 211779 - DNA, 747 bp, Artificial Sequence
  derived and/or modified sequence
atggctgattttgacacttacgatgatagggcgtactcctcattcgggggtggccgagggtcacggggatcagcaggcggccacggaagcaggtctcagaaggagctacctaccgagccaccttatactgcctacgtgggtaatcttcccttcaatacagtgcagggagatatcgatgctattttcaaggacctgtccattaggagtgttcgcctggttagggataaggacaccgataagtttaagggcttctgctatgtggagttcgatgaggttgattcactgaaggaggccctcacctacgacggtgctctcctcggcgaccggagtctacgcgttgacatcgccgagggcaggaagcaagacaaaggaggctttggctttcggaagggaggaccagatgaccggggaatggggagcagtcgggaatcccgcggcggatgggacagcagggacgacttcaactctggatttcgcgacgacttcctcgggggaagaggtggaagccgccctggtgaccgaaggactggacctcctatggggtcccgttttagggacggccctcccctgcgcggcagcaacatggactttcgcgaacctacggaggaggagcgcgcccaaagaccgcggttgcagctcaaacctagaaccgtagccacaccccttaatcaggtcgctaaccctaattctgccatcttcggaggcgctcgcccacgggaggaagtggtccagaaagaacaggaatag

SEQ ID NO: 211780 - DNA, 747 bp, Artificial Sequence
  derived and/or modified sequence
atggctgactttgacacctatgatgaccgggcctacagcagctttggaggcggccggggcagccggggcagcgctgggggccacggcagccgcagccagaaggagctgcccacagagcccccctacacagcctacgtgggcaacctgcccttcaacacagtgcagggcgacattgatgccatcttcaaggacctgagcatccgctctgtgcggctggtgcgggacaaggacacagacaagttcaagggcttctgctacgtggagtttgatgaggtggacagcctgaaggaggccctgacctatgatggagccctgctgggggacaggagcctgcgggtggacattgctgagggcaggaagcaggacaagggcggcttcggcttcaggaagggcggcccagatgaccggggcatgggcagcagccgggagagccggggcggctgggacagcagagatgacttcaacagcggcttcagagatgacttcctgggcggccggggcggcagcaggcctggggacagaagaacaggcccccccatgggcagccgcttcagagatggcccccccctgcggggcagcaacatggacttccgggagcccacagaggaggagcgggcccagaggccccggctgcagctgaagcccaggacagtggccacccccctgaaccaggtggccaaccccaacagcgccatctttggaggagcccggccccgggaggaggtggtgcagaaggagcaggagtag

SEQ ID NO: 211781 - DNA, 747 bp, Artificial Sequence
  derived and/or modified sequence
atggccgacttcgacacctacgacgaccgggcctacagcagcttcggggggggacgggggagcaggggatctgccggcggccatggttcacggtcgcaaaaggaattacccactgaacccccgtatacagcttatgttggcaacctgcccttcaacacagtccagggtgatattgatgcaatttttaaggacctaagcatccggagcgtacgcctggtgcgggacaaggacacagataagtttaaaggattctgttacgttgagttcgacgaggtagatagtctgaaagaggcactcacttatgatggtgcgttgctgggggaccggtctctacgagtggacatcgccgaagggcgtaagcaggataaagggggtttcggcttcaggaagggtggcccagatgatagaggaatgggctcatcccgcgagtccagaggtggatgggacagtagagatgacttcaacagcgggttcagagacgatttcctgggcggaagagggggttctaggccaggagatcgccgaacaggccccccgatgggatcccgctttcgggatggcccccctctgcggggcagcaacatggattttagagagcctacagaggaagagagggcacagcggccgaggctccaattaaagcctagaacggtagcaacacctttgaatcaggtcgcaaacccgaacagcgccatctttggcggtgctaggccccgggaggaggttgtccaaaaggagcaggaatag

SEQ ID NO: 211782 - DNA, 747 bp, Artificial Sequence
  derived and/or modified sequence
atggcagatttcgatacttacgatgaccgagcatattcatccttcggcggaggacggggaagcaggggcagtgctggaggtcacgggagtaggtcccaaaaagaactcccaaccgaacccccatacaccgcatatgtcgggaacctgcctttcaatactgtgcagggcgacattgacgcgatctttaaagatcttagcatacggagcgtgaggctcgtgcgcgacaaggatacagacaaatttaaaggcttttgttacgtggagttcgacgaagtggatagtctaaaagaggctttgacttatgacggagcacttttaggggacaggtctctgagggtggacattgccgaaggcagaaagcaggataaagggggattcggcttccgcaaaggcggacccgacgatcgagggatgggcagctctcgagaaagccggggaggctgggactctcgagacgattttaattccggcttccgcgatgatttcctgggaggacggggtggatccagaccaggtgatcgcagaacaggccctcctatgggcagccggtttagggacggaccgcctttaagaggaagcaatatggacttcagggagccaacggaagaggaacgcgcacaaagaccgcgtctgcaattaaagcccaggacagttgccacacccctaaaccaggtggcaaacccaaattccgctatcttcggcggagcccgaccacgagaggaagtcgtccagaaagaacaggagtag

SEQ ID NO: 211783 - DNA, 747 bp, Artificial Sequence
  derived and/or modified sequence
atggccgacttcgacacctacgacgacagagcctacagcagcttcggcggcggcagaggcagcagaggcagcgccggcggccacggcagcagaagccagaaggagctgcccaccgagcccccctacaccgcctacgtgggcaacctgcccttcaacaccgtgcagggcgacatcgacgccatcttcaaggacctgagcatcagaagcgtgagactggtgagagacaaggacaccgacaagttcaagggcttctgctacgtggagttcgacgaggtggacagcctgaaggaggccctgacctacgacggcgccctgctgggcgacagaagcctgagagtggacatcgccgagggcagaaagcaggacaagggcggcttcggcttcagaaagggcggccccgacgacagaggcatgggcagcagcagagagagcagaggcggctgggacagcagagacgacttcaacagcggcttcagagacgacttcctgggcggcagaggcggcagcagacccggcgacagaagaaccggcccccccatgggcagcagattcagagacggcccccccctgagaggcagcaacatggacttcagagagcccaccgaggaggagagagcccagagacccagactgcagctgaagcccagaaccgtggccacccccctgaaccaggtggccaaccccaacagcgccatcttcggcggcgccagacccagagaggaggtggtgcagaaggagcaggagtag

SEQ ID NO: 211784 - protein, 103 aa, Artificial Sequence
  derived and/or modified sequence
MAESWSGQALQALPATVLGALGSEFLREWEAQDMRVTLFKLLLLWLVLSLLGIQLAWGFYGNTVTGLYHRPGLGGQNGSTPDGSTHFPSWEMAANEPLKTHRE

SEQ ID NO: 211785 - DNA, 312 bp, Artificial Sequence
  derived and/or modified sequence
atggccgagagctggagcggccaggccctgcaggccctgcccgccaccgtgctgggcgccctgggcagcgagttcctgagagagtgggaggcccaggacatgagagtgaccctgttcaagctgctgctgctgtggctggtgctgagcctgctgggcatccagctggcctggggcttctacggcaacaccgtgaccggcctgtaccacagacccggcctgggcggccagaacggcagcacccccgacggcagcacccacttccccagctgggagatggccgccaacgagcccctgaagacccacagagagtag

SEQ ID NO: 211786 - DNA, 312 bp, Artificial Sequence
  derived and/or modified sequence
atggccgagtcttggagcggacaagccttgcaggccctgcctgccacagtgttaggcgccctcggctccgaattcctcagagaatgggaggctcaggatatgagggttaccttgttcaagctgctcctcctatggcttgtgctttccttgctgggaatacagctcgcatgggggttttatggaaatacagtgaccgggctctaccatagacccggactgggtggccagaatggctccacgccggatggaagcacccacttcccatcctgggaaatggccgccaacgaacccttgaagacccaccgagagtag

SEQ ID NO: 211787 - DNA, 312 bp, Artificial Sequence
  derived and/or modified sequence
atggccgagagctggagcggccaggccctgcaggccctgcctgccaccgtgctgggcgccctgggcagcgagttcctgcgggagtgggaggcccaggacatgagggtgaccctcttcaagctgctgctgctgtggctggtgctgagcctgctgggcatccagctggcctggggcttctacggcaacacagtgacaggcctgtaccacaggcctggcctgggcggccagaatggcagcaccccagatggcagcacccacttccccagctgggagatggccgccaatgagcccctgaagacccaccgggagtag

SEQ ID NO: 211788 - DNA, 312 bp, Artificial Sequence
  derived and/or modified sequence
atggccgagagctggagcggccaggccctgcaggccctgcccgccaccgtgctgggcgccctgggcagcgaatttctgagagagtgggaagcccaggatatgagagtgacactgttcaagctcctgttgctgtggttagtgctctccctgctgggtatccagttggcttggggcttttacggtaataccgttacaggactgtatcatcgcccaggattgggcggacagaacggctctaccccagacggatccacccacttcccaagttgggaaatggccgccaatgagcctctaaagactcaccgcgagtag

SEQ ID NO: 211789 - DNA, 312 bp, Artificial Sequence
  derived and/or modified sequence
atggcagagagctggagcgggcaggctctgcaggccctcccagctaccgtccttggcgctcttggctcagaattcctgagagagtgggaggcacaagacatgagagtcactctattcaagctgctcttgctctggcttgtactgtccctgttaggaattcagttagcttggggcttctatggtaataccgttacgggcttgtaccacagaccgggtttaggtggacagaatgggagcacccctgatgggtctactcactttccctcttgggaaatggccgctaatgagcccctgaaaacgcatagggagtag

SEQ ID NO: 211790 - DNA, 2146 bp, Artificial Sequence
  derived and/or modified sequence
tactcccggagtcactcatcccttaagcaagcagggtggggttaggtgcgcgtgcgcggttttaatactcctccccgaactgccaactcttcacgcacgcgaagtaggccccaccctggctgggtttacgcgtgcgcactaacgggcctggtcccggaagaccacacgcgtgcgtggtggggactacggtgacagtaccccgggtggggcgagggccagtcatggcggagtcctggtctgggcaggccttgcaggctctgccggccacggtgctgggcgcgctgggcagcgagttcttgcgggagtgggaggcgcaggacatgcgcgtgaccctcttcaagctgctgctgctgtggttggtgttaagtctcctgggcatccagctggcgtgggggttctacgggaatacagtgaccgggttgtatcaccgtccaggtctgggtggtcagaatggatccacgcctgatggctccacgcatttcccttcgtgggaaatggcagcaaacgaacctctcaaaacccacagagaataagggaaggcagcagagggtctccaagggcatcactgggtctgctggcttctacactgggttctgctactccccagacctcagggacaactgccgggggttcagggttggtagcagggagtacccagtgcctacagggctgggcctcttctgcctcttaagcctgctccctcacccaggcactgggcaagtgaagagtttgcctgtactcttatctgggtgccttaaggagagagattgtgttcttcctctctcaggggtgataactcaggaagcctctgggttgggaagaccatcagttcttttgtcttaggtttcttttcctgtccctcttccatccccaagatgtgaccccataaaaatttttcctgagttggccaggcatggtggctcacgcctgtaatcccaacactttgggaggctgaggcaggcagatcacgaggtcaggagttcgagaccagcctgaccaacatggtgaaaaccccatctctactaaaaatacaaaaattagccgggtgtggtggcacacaccagtaatcccagctactcaggaggctgaagcaggagatttgcttgaacctgggaggcagaggttgcagtgagccaagattgcgccgttgtactccagcctgggcaacagagcaagacccatctcaaaaaaaaaatttttttcctgagaggaagcctgaggttgaccagctctggggtttgtaaggcaggtctgttttctcctaggccctgagttttctgaatctctggttttgctttgttggcaaggagccagggaatcctgacctgagccagaccttaagctctatggttatttagctggccattcaggtataaggcagggtggtgtacctgctggcactatccagatggaggcaccaaacacccacatacctggcccaaccagacttctcccgtgagccaggcaaaggaaattgtcatctgccaactgtcctactcatattcctctcagtccttcttgggggtaagctgattacctgaaggacagctgaacccctggggtagcctcctatccaccactgcttaagtgcctatgggaatgtgggtctgcaccttgtcccctcataggatggtaccaagcatttagtgcacagtggccccatcatagcctgcagcctcatcatttcccatctggacctggtacaaatgcacgtcacaggctcagctcctccccactagcattttctctaccttcaagaaccaggcagccctgccatgtcacaataggccaggggagtttccaaagatgtgggtggcaaatgcccctatagaaacaccagtacctgaaagcactgtagccctggacctgcctccttccctcggggccatacttctgtttccatctgctgggccaccagccactttagtgacccctgcctacttccttcctgttggatatcatacttccatctggctgcctttgcttaagccatctttgtggtagaggggccctggaattgcagctgtactgaggatgatgttattcacagcccctggcccacccactaatactactgcacagagtcaggatctcacatttcaccccaggctcaactgaggatgtggcttattaaacacggaagtgc

SEQ ID NO: 211791 - protein, 386 aa, Artificial Sequence
  derived and/or modified sequence
MEDEMPKTLYVGNLSRDVTEALILQLFSQIGPCKNCKMIMDTAGNDPYCFVEFHEHRHAAAALAAMNGRKIMGKEVKVNWATTPSSQKKDTSSSTVVSTQRSQDHFHVFVGDLSPEITTEDIKAAFAPFGRISDARVVKDMATGKSKGYGFVSFFNKWDAENAIQQMGGQWLGGRQIRTNWATRKPPAPKSTYESNTKQLSYDEVVNQSSPSNCTVYCGGVTSGLTEQLMRQTFSPFGQIMEIRVFPDKGYSFVRFNSHESAAHAIVSVNGTTIEGHVVKCYWGKETLDMINPVQQQNQIGYPQPYGQWGQWYGNAQQIGQYMPNGWQVPAYGMYGQAWNQQGFNQTQSSAPWMGPNYGVQPPQGQNGSMLPNQPSGYRVAGYETQ

SEQ ID NO: 211792 - DNA, 4647 bp, Artificial Sequence
  derived and/or modified sequence
aggctcccggctcgccgccatcttgtattggggtttcattgttcccgctgggccgggcggtttagtgtaattgccgccggaggaggaggcggagtaacctctggtcagccgagaaaccccactatcctgtagccataaccgcttaaacgatttgggaggtagtgaagggcagggagctggacctggaggcgccgccgcgacagcagcagccatggaggacgagatgcccaagactctatacgtcggtaacctttccagagatgtgacagaagctctaattctgcaactctttagccagattggaccttgtaaaaactgcaaaatgattatggatacagctggaaatgatccctattgttttgtggagtttcatgagcatcgtcatgcagctgcagcattagctgctatgaatggacggaagataatgggtaaggaagtcaaagtgaattgggcaacaacccctagcagtcaaaagaaagatacaagcagtagtaccgttgtcagcacacagcgttcacaagatcatttccatgtctttgttggtgatctcagcccagaaattacaactgaagatataaaagctgcttttgcaccatttggaagaatatcagatgcccgagtggtaaaagacatggcaacaggaaagtctaagggatatggctttgtctcctttttcaacaaatgggatgctgaaaacgccattcaacagatgggtggccagtggcttggtggaagacaaatcagaactaactgggcaacccgaaagcctcccgctccaaagagtacatatgagtcaaataccaaacagctatcatatgatgaggttgtaaatcagtctagtccaagcaactgtactgtatactgtggaggtgttacttctgggctaacagaacaactaatgcgtcagactttttcaccatttggacaaataatggaaattcgagtctttccagataaaggatattcatttgttcggttcaattcccatgaaagtgcagcacatgcaattgtttctgttaatggtactaccattgaaggtcatgttgtgaaatgctattggggcaaagaaactcttgatatgataaatcccgtgcaacagcagaatcaaattggatatccccaaccttatggccagtggggccagtggtatggaaatgcacaacaaattggccagtatatgcctaatggttggcaagttcctgcatatggaatgtatggccaggcatggaaccagcaaggatttaatcagacacagtcttctgcaccatggatgggaccaaattatggagtgcaaccgcctcaagggcaaaatggcagcatgttgcccaatcagccttctgggtatcgagtggcagggtatgaaacccagtgaataaggactccagaatctaaagccagtggcttgaggctacagggagtgtagtaaagccgttgtttacttaaagatttatcaaatcagtcagtgcaaatgtcagatacaatgtatttatttaaaagattcatttttaatcatgaaattacttatcatccacattgttttaaaaagaaacaagatgctggatgtctgccaatttttgccttcattaccttttttgataaagtttctcagatccttgtttcaaacacaaatgcagggattgctgccactttttaactattaagaggcagaaaattgcacaatattgaacttttttccactgaagtagtgtgcagttctagtttgcattcctgatatgatttaaaacatgtaatataaagatgttaaaaaaaaaaaccaaaactgtgcagagtctagaagttgtttgtcatcttcagcttgtgcacaattctgttttaggttaaaaaaaggcattgtttgagctgtcccatctccactgttatccctttggggttttttaatataaattattagtttacatcatttttgtatctacatcttttttcacaaatttgtcttgccttattaaagttctgtaaaatatacttaaatggaaaaaatgatgttcatttagattgaaaacttttctcagatggattgataattgcattcatcttgtgttttatatgagaaggtgcctcaagaatttcctgttggatttgtttaaaaggatttttatctttcgtgataaactttgctgtgtaccaggaactataaaaacaaaaacttgttactaaagaaaatatctgaaatgtgataagttcttatgccatgttaatttcatgtgtcaacttcaacatttacatgtattatttcattatgtaaaatgttttagcaatttaatattttgcacagttagcaaactttgtatgtcatttccttcaaggcatcatgcagagttgacatgagatttataaggttttaagttgtttgcatgtgaaaatcaaatacatactttggtagtctttgaatacaaagtcatctgctcttgtttttcaagaattttgagacacaaagttgtatgtaaaggaatatattaatttgccgttttctaggtagatttgctcaaaaagagtgaatcaacttaatatgtacaaatgatagctgtgaaactgtagaatatctttgtgtcaggcttggagttcattgtgacctccaaattttgcctgaaggaccagctgggcaaagcatcttttaaatgttcagaggccaaaagataaacaaaaaaaaaaccttaaaatcctacctctttaaacagccttcagataagagaatcctcagtgcaatcattattttgattcgtttggtacctgttttcctggagttcccgattttattattttggggtggctccaagcattaagaggtttaatctttgatggcattgttctagttttgaaatttctagtatatttcagagtctcttagaagacttgtgtgggaagtttcactttgttttcagtgaagatcacaaacctccttcttcctttactcaagaggaaaggtcccagtatacatatttgaatggttgatggttttcaagaccttcagggagctccctgcattttacctagaaacagaaaaggcccgcaaaatcttaagtttcctggcctgcatttcccgggtaggggcaaatgactccaagctggtctctaagccaatacccttataaaccagagcccaggaaagacagctcgagtgtataattctctggagctcaattctatgcagttgtgctgatatttcattaagtcactgtgtatttttaagtgttgatacattaaaagtcgctttatggaagatgagtaaattttttaaatacttggaaattttatttccttgttaacttctacagatcagggcatgcaaccaaaagcagcttaaatgaaatattttaaaataaaatatcaggaagctatttttagatttcttctggcttatgtttctactttaggaccctcattgttctcttattaaaaaaaattatttcctgtgcatctcatggactgcagggtaaattatttgggcataaataatttaaatagttttctttcattttgactatctccagtaataacagtttttattatccagcatattggcttattgcacaaatcttaaaatgtacattgactactttctgagaagaaagtggtatcagtactcatgatgaaaaggttactactgaacaaattcacatttcaggaacacctctatctttggtttaaatcttactcttagtttttccgtctaaaaatcatactggtattagtatcaggtaaggaaattaaagtttttaaaatggtttcattctctgcaatatgcaaaatttagattttactttctggtactgtaaagaacctgaagtgatttacacttaatgggtgattaatccagtattctttaccctgaatgtttggatattaaagttcctttatgttttctataacctgtgggatcttcttgcagtgattattgtgtgtgagattttttttctttttggtctatccatattgttatattcactcaggtattttttttttaatcttattccagaatcagtggtttatattgggttactgtttaacaccaaatggaattggcattctgcagatttaattaattatgaaaccagggtctcattttccttgctgatacttgttgaaaatgagattcacattctagtctttattttcctcctgttttgtccctgtgcttgtacatcttccttttatttgtgtgttatagttctattccatttgagaaggcagttggtaagaactagattgcatgtacaaagacaggtttactaagtgctgtacagtggtcctgaggttacagttgaattagaaaaacgaaatgtacttacaggaaataagaaagcaaacctttcaaatgagagtgatgatttctttaaaaaaaatcagtttttttctctcaaataatgttctttatttcacgaaatcgtcaatcttaagcatgagcagggataaacaactcctagaaggaactcaattcattcttcctggattttctctgttgttaaatcacaaaaatgatagtccccaatcgtttctttataggaggttattacatttcattacagtcactgcattttgactgttgtgtttagaatttgaatgtacatccaaaatgatgagtttcaatttaagagccttaataaaatgtgtgagtgtgtctcaattgaa

SEQ ID NO: 211793 - DNA, 1161 bp, Artificial Sequence
  derived and/or modified sequence
atggaggacgagatgcccaagaccctgtacgtgggcaacctgagcagagacgtgaccgaggccctgatcctgcagctgttcagccagatcggcccctgcaagaactgcaagatgatcatggacaccgccggcaacgacccctactgcttcgtggagttccacgagcacagacacgccgccgccgccctggccgccatgaacggcagaaagatcatgggcaaggaggtgaaggtgaactgggccaccacccccagcagccagaagaaggacaccagcagcagcaccgtggtgagcacccagagaagccaggaccacttccacgtgttcgtgggcgacctgagccccgagatcaccaccgaggacatcaaggccgccttcgcccccttcggcagaatcagcgacgccagagtggtgaaggacatggccaccggcaagagcaagggctacggcttcgtgagcttcttcaacaagtgggacgccgagaacgccatccagcagatgggcggccagtggctgggcggcagacagatcagaaccaactgggccaccagaaagccccccgcccccaagagcacctacgagagcaacaccaagcagctgagctacgacgaggtggtgaaccagagcagccccagcaactgcaccgtgtactgcggcggcgtgaccagcggcctgaccgagcagctgatgagacagaccttcagccccttcggccagatcatggagatcagagtgttccccgacaagggctacagcttcgtgagattcaacagccacgagagcgccgcccacgccatcgtgagcgtgaacggcaccaccatcgagggccacgtggtgaagtgctactggggcaaggagaccctggacatgatcaaccccgtgcagcagcagaaccagatcggctacccccagccctacggccagtggggccagtggtacggcaacgcccagcagatcggccagtacatgcccaacggctggcaggtgcccgcctacggcatgtacggccaggcctggaaccagcagggcttcaaccagacccagagcagcgccccctggatgggccccaactacggcgtgcagcccccccagggccagaacggcagcatgctgcccaaccagcccagcggctacagagtggccggctacgagacccagtag

SEQ ID NO: 211794 - DNA, 1161 bp, Artificial Sequence
  derived and/or modified sequence
atggaggacgagatgccaaaaaccctgtatgttggcaacctatctcgggacgtgaccgaagctcttatcttacaactgttttctcagatcggtccatgtaaaaactgcaagatgattatggacactgcaggaaatgatccctactgtttcgtggaattccatgaacatcggcacgcagccgccgccctggctgcaatgaatggaagaaaaatcatggggaaggaggtgaaggttaactgggctaccacccctagctcacagaaaaaggatactagtagctcaacggtcgtatcaactcaacgttcccaggaccactttcacgtgtttgtgggggacctttctcctgagattacaacagaggacatcaaggcagcctttgccccctttggaaggatttccgacgcccgcgtagtgaaagacatggccacaggcaagagcaaaggatacggttttgtgtctttttttaacaagtgggacgccgagaacgccattcagcaaatggggggccaatggctcggcggaaggcagattagaactaattgggccacaaggaagccaccagccccaaaatccacttacgagtctaacaccaagcagttgtcgtacgatgaggtcgtaaaccagagctcgcccagcaactgcaccgtgtactgtgggggcgtgaccagcggcctcaccgaacaactgatgagacagacattcagcccatttggtcaaatcatggaaattcgggtgtttcctgataaaggttatagcttcgtacggttcaattcccacgaatccgccgcccacgcgattgtgtccgttaacggaacaacaattgaaggacacgtcgtgaaatgctactggggaaaggaaactttagacatgattaaccctgtgcagcagcagaatcagatcggctatccacaaccttacggccagtggggacagtggtacggcaatgcacagcagattggccagtacatgcccaacgggtggcaggtcccggcatacggaatgtatggacaggcttggaatcagcaagggttcaatcaaacccagagttctgccccttggatgggcccgaactatggagtgcagccccctcagggtcagaatgggagcatgctacctaatcagccatccgggtacagagtcgctggatacgaaactcagtag

SEQ ID NO: 211795 - DNA, 1161 bp, Artificial Sequence
  derived and/or modified sequence
atggaggatgagatgcccaagaccctgtatgtgggcaacctgagcagagatgtgacagaggccctgatcctgcagctgttcagccagatcggcccctgcaagaactgcaagatgatcatggacacagctggaaatgacccctactgctttgtggagttccacgagcacagacatgctgctgctgccctggccgccatgaatggaaggaagatcatgggcaaggaggtgaaggtgaactgggccaccacccccagcagccagaagaaggacaccagcagcagcacagtggtgtccacccagaggagccaggaccacttccacgtgtttgtgggggacctgagccctgagatcaccacagaggacatcaaggccgcctttgcccccttcggccgcatcagtgatgcccgggtggtgaaggacatggccaccgggaagagcaagggctacggctttgtgtccttcttcaacaagtgggatgctgaaaatgccatccagcagatgggcggccagtggctgggcggccggcagatccgcaccaactgggccaccaggaagcccccagcccccaagagcacctatgagagcaacaccaagcagctgtcctatgatgaggtggtgaaccagagcagccccagcaactgcaccgtgtactgcggcggcgtgaccagcggcctgacagagcagctgatgaggcagaccttcagccccttcggccagatcatggagatccgggtcttcccagacaagggctacagctttgtgcgcttcaacagccatgaatctgctgcccacgccatcgtgtctgtgaatggcaccaccatcgagggccacgtggtgaagtgctactggggcaaggagaccctggacatgatcaaccctgtgcagcagcagaaccagatcggctacccccagccctacggccagtggggccagtggtatggaaatgcccagcagatcggccagtacatgcccaacggctggcaggtgcctgcctacggcatgtatggccaggcctggaaccagcagggcttcaaccagacccagagcagcgccccctggatgggccccaactacggcgtgcagcccccccagggccagaatggctccatgctgcccaaccagcccagcggctacagagtggccggctatgagacccagtag

SEQ ID NO: 211796 - DNA, 1161 bp, Artificial Sequence
  derived and/or modified sequence
atggaggacgagatgcccaagaccctgtacgtgggcaacctgagcagggatgttacagaagcactgatcctccaattattctcacaaataggaccgtgcaagaactgtaaaatgattatggacactgctggcaatgatccctactgctttgttgaatttcatgagcatcgtcacgccgccgccgccctggcagccatgaatgggcggaagattatgggcaaggaagtcaaagttaattgggccaccacacccagttcacagaagaaggacacaagtagctctactgttgttagcactcaacggtcccaggaccacttccatgtgttcgtaggtgacctcagccctgaaatcacaacagaagacataaaagccgcctttgctccatttgggcggatctcggatgccagggtggtcaaggatatggccactggcaagtctaagggttatggctttgtttcattcttcaacaaatgggatgctgaaaacgcaattcaacaaatgggaggccagtggctgggtggccgacagattcgcaccaactgggccacccgaaagcctccagctccaaagagtacgtacgagtctaacaccaagcagctttcctatgatgaggtcgtgaatcaatcaagcccctctaactgcactgtctactgtggtggggttaccagtggactaaccgagcagttgatgcgccaaaccttcagcccgttcgggcagataatggaaatacgagtgttcccagacaaaggctactccttcgtacgcttcaacagtcacgagtctgcagcccatgccatagtaagtgtcaatggcaccaccattgagggtcacgtcgtcaagtgctattggggaaaggagaccttggacatgatcaaccccgtgcaacagcagaaccaaattgggtacccacagccgtatgggcaatggggtcaatggtatggcaacgcacaacagatcggacagtatatgccaaatggctggcaagtgcccgcatatgggatgtatgggcaagcctggaatcagcagggctttaatcagacacagtcctcagccccgtggatggggcctaactacggggtccagccccctcagggccagaatgggagcatgcttccaaatcagccaagcggctacagagtcgcaggctacgagacccaatag

SEQ ID NO: 211797 - DNA, 1161 bp, Artificial Sequence
  derived and/or modified sequence
atggaagacgaaatgcccaaaactctgtacgtcggcaacctcagtagagacgtcacagaagcccttatactgcagctgtttagccagattggcccatgtaagaactgtaaaatgattatggatacggccggaaacgacccttattgcttcgtcgagtttcatgaacacagacacgctgcagcggcattagccgcaatgaacgggaggaagatcatgggtaaagaggtgaaagtgaactgggccactacaccctctagtcagaagaaagatacttcctcctccactgtggtcagcacacaacggtctcaggatcacttccacgtttttgtaggagacctaagtcctgaaataacaacagaagatattaaagccgcattcgccccttttggacggatcagtgacgcccgagttgtaaaggacatggctacaggaaagagtaaggggtacggctttgtaagcttcttcaacaaatgggacgcagaaaacgcaatccagcagatgggcggtcagtggcttgggggacgccagatccgcacgaactgggctacacgtaaaccaccagccccaaagagcacttacgaaagcaacaccaaacagctgagctatgacgaagtggtcaaccagtcctctccaagtaactgcaccgtgtactgcggtggagttacatccggcttgacagagcaactcatgagacagacattttcacccttcgggcagataatggagattcgagtattcccggataaggggtattcattcgtgcgctttaacagccacgagtctgccgcacacgctatcgtgtctgtgaatgggacaaccatcgaagggcatgtcgtcaaatgctactggggcaaggagactctggacatgataaacccagtgcagcaacagaatcagatcggctacccacaaccctacgggcagtggggacaatggtacggaaacgcacaacagattgggcagtacatgcccaacggttggcaggtcccagcctatggcatgtacggtcaagcttggaaccagcagggcttcaaccaaacacagagtagtgccccttggatgggacctaactatggcgtccagcctcctcagggccagaacggatcaatgctccctaatcagccatcgggctaccgcgtagccggttacgaaacacagtag

SEQ ID NO: 211798 - DNA, 1080 bp, Artificial Sequence
  derived and/or modified sequence
atggcccccaacggcaccgccagcagcttctgcctggacagcaccgcctgcaagatcaccatcaccgtggtgctggccgtgctgatcctgatcaccgtggccggcaacgtggtggtgtgcctggccgtgggcctgaacagaagactgagaaacctgaccaactgcttcatcgtgagcctggccatcaccgacctgctgctgggcctgctggtgctgcccttcagcgccatctaccagctgagctgcaagtggagcttcggcaaggtgttctgcaacatctacaccagcctggacgtgatgctgtgcaccgccagcatcctgaacctgttcatgatcagcctggacagatactgcgccgtgatggaccccctgagataccccgtgctggtgacccccgtgagagtggccatcagcctggtgctgatctgggtgatcagcatcaccctgagcttcctgagcatccacctgggctggaacagcagaaacgagaccagcaagggcaaccacaccaccagcaagtgcaaggtgcaggtgaacgaggtgtacggcctggtggacggcctggtgaccttctacctgcccctgctgatcatgtgcatcacctactacagaatcttcaaggtggccagagaccaggccaagagaatcaaccacatcagcagctggaaggccgccaccatcagagagcacaaggccaccgtgaccctggccgccgtgatgggcgccttcatcatctgctggttcccctacttcaccgccttcgtgtacagaggcctgagaggcgacgacgccatcaacgaggtgctggaggccatcgtgctgtggctgggctacgccaacagcgccctgaaccccatcctgtacgccgccctgaacagagacttcagaaccggctaccagcagctgttctgctgcagactggccaacagaaacagccacaagaccagcctgagaagcaacgccagccagctgagcagaacccagagcagagagcccagacagcaggaggagaagcccctgaagctgcaggtgtggagcggcaccgaggtgaccgccccccagggcgccaccgacagatag

SEQ ID NO: 211799 - DNA, 1080 bp, Artificial Sequence
  derived and/or modified sequence
atggccccaaacggcacagcctccagcttttgtcttgacagcacagcatgtaagattaccattaccgtggtgctcgctgtgcttatcctgatcaccgtcgccggcaatgtggtagtttgtctggccgtcggactcaaccgacgcctcaggaacttgactaattgtttcatagtgtcacttgcgatcacggacctgctcttgggtctgttagtgctgccattttcggcaatctatcaattgtcttgtaagtggtcctttgggaaggtgttctgcaatatttacacgtcactggatgtaatgctctgcacagcttcgatacttaacctgttcatgattagtctggatcgatactgcgccgtaatggaccccctgcggtatcccgtgctggttacaccagtacgtgtggccatttcgctggtcctgatatgggtgatctctataaccctgtctttcttatctatacacctgggttggaatagtcggaacgagacctccaagggcaaccacactacctctaaatgtaaagttcaagtgaacgaagtgtacgggctggtagacggactggtaaccttctatctgcccctgctgatcatgtgtattacatactatcgaatcttcaaagtggccagagaccaggccaaacgaatcaaccacatcagctcatggaaggccgccacaatcagagaacacaaggctaccgtcactctggccgccgttatgggtgcctttatcatctgttggtttccatattttacagcatttgtatatcgaggtctgagaggggatgacgccataaacgaggttctggaggcaatagtgttgtggctgggctacgctaactctgcgctgaatccaatcctgtatgcagcgctgaaccgcgatttcagaacagggtatcagcaattgttctgttgtcggctggccaatagaaactcccacaagactagtctcaggtcaaacgctagccagctaagccggacccaaagcagagaaccccggcaacaggaagagaaaccattaaagcttcaggtttggtctggcacagaggtaacagctcctcagggtgcaactgatagatag

SEQ ID NO: 211800 - DNA, 1080 bp, Artificial Sequence
  derived and/or modified sequence
atggcccccaacggcacagccagcagcttctgcctggacagcacagcctgcaagatcaccatcaccgtggtgctggccgtgctgatcctgatcaccgtggccggaaatgtggtggtgtgcctggccgtgggcctgaacagaaggctgaggaacctgaccaactgcttcatcgtgtccctggccatcacagacctgctgctgggcctgctggtgctgcccttcagcgccatctaccagctgagctgcaagtggagctttgggaaggtgttctgcaacatctacaccagcctggatgtgatgctgtgcacagccagcatcctgaacctcttcatgatcagcctggaccgctactgtgctgtgatggaccccctgcgctaccctgtgctggtgacccctgtgcgggtggccatcagcctggtgctgatctgggtgatcagcatcaccctgtccttcctgagcatccacctgggctggaacagcagaaatgagaccagcaagggcaaccacaccaccagcaagtgcaaggtgcaggtgaatgaggtgtatggcctggtggatggcctggtgaccttctacctgcccctgctgatcatgtgcatcacctactaccgcatcttcaaggtggcccgggaccaggccaagaggatcaaccacatcagctcctggaaggccgccaccatccgggagcacaaggccaccgtgaccctggccgctgtgatgggcgccttcatcatctgctggttcccctacttcaccgcctttgtgtaccggggcctgcggggagatgatgccatcaatgaggtgctggaggccatcgtgctgtggctgggctacgccaacagcgccctgaaccccatcctgtatgctgccctgaacagagacttcagaacaggctaccagcagctgttctgctgccgcctggccaacagaaacagccacaagaccagcctgcggagcaatgccagccagctgagcaggacccagagccgggagccccggcagcaggaggagaagcccctgaagctgcaggtgtggagcggcacagaggtgacagccccccagggcgccacagacagatag

SEQ ID NO: 211801 - DNA, 1080 bp, Artificial Sequence
  derived and/or modified sequence
atggcccccaacggcaccgccagcagcttctgcctggacagcaccgcttgcaaaattacgatcacagtagttcttgctgtcttaattctgattacagtggcaggcaatgtggtcgtctgtctcgcagtgggattgaacagaaggttacgaaacctaaccaattgttttattgtgtcccttgccatcactgatctgttactgggcctcttagtgcttcctttctcagctatttaccagttatcttgtaagtggtcgtttggaaaggtgttctgcaacatttacacatcgttggacgtgatgctgtgtaccgctagtattctaaatttgttcatgattagccttgacagatactgcgctgtgatggatcctctgcgctaccctgtgttagtcacaccagtccgcgtagcaataagtttagtgttgatctgggtcatcagcatcactctgagttttcttagtatccaccttggttggaacagccgtaatgagaccagcaaggggaatcacactacgagcaagtgcaaagtccaggtgaatgaggtgtatgggttggtggacgggttggttacgttttatctgccccttctgattatgtgcatcacctattatcgcatttttaaggtagcaagagatcaagctaaaaggattaatcacatttcatcctggaaggccgcaacgatacgggaacacaaagcaactgtcactttggccgccgtgatgggagccttcataatttgctggtttccttatttcaccgccttcgtataccgaggcctgcgcggagatgacgctattaacgaagtcctggaggcaatagtcctgtggctcggctacgccaactctgctctcaaccctatactgtatgccgccctcaaccgcgatttccggaccggctatcagcaactgttctgctgtcgacttgctaaccgcaacagccataaaacatcactgaggagcaatgcgtcccagttgtctcggacacagagcagggagcctagacaacaagaagagaagcccctcaagctccaggtctggtcaggtaccgaggtgaccgccccacagggggcaactgaccgctag

SEQ ID NO: 211802 - DNA, 1080 bp, Artificial Sequence
  derived and/or modified sequence
atggcccctaacggaactgcttctagtttttgcctcgactctaccgcgtgcaaaatcaccatcactgtggttctcgctgttcttatcctgatcaccgtcgccggtaacgtggtggtatgtctagcggtgggtctcaatagacgactgcgaaatttaacgaactgttttatagtgtccctggctatcacagacctgttgctcggattactggtgctgcctttctccgccatttatcagctgtcctgcaaatggtcttttgggaaagtcttctgcaacatctacaccagcctggacgtcatgctgtgcaccgcatccattctcaaccttttcatgataagcttagaccggtactgcgccgtgatggaccctctgcgctaccctgtgctcgtaactcccgtgagggtggcaataagcctggttctcatctgggttatctccataactctttcttttctctcgatccatttaggctggaattctaggaacgagacgtcgaaaggcaaccataccacctcgaaatgcaaggtgcaagttaatgaagtatacgggctagtggacgggctggttactttctacctacctctgctgattatgtgtatcacatattaccgaatcttcaaagtggccagagaccaggctaagcggatcaatcatatcagtagttggaaggccgcaaccataagggaacacaaggccaccgtcactctggccgcagtgatgggtgcatttattatatgttggttcccttattttacagccttcgtatacaggggcttgcgtggcgacgacgccataaatgaagtcctggaagcaatcgtgctttggctcgggtacgccaactccgctctgaatcctattttgtacgccgctctgaaccgagactttaggaccggttaccagcagctcttctgttgcaggctggccaatagaaattctcataagacatctcttcggtcaaacgctagtcagttgagccgcacacagtcaagagaaccgagacagcaggaggagaagcccctaaaacttcaagtgtggagcgggactgaggtgaccgctccacagggtgcaaccgaccgctag

SEQ ID NO: 211803 - DNA, 3095 bp, Artificial Sequence
  derived and/or modified sequence
caggagattgcctgctctctgaaaaaccaggaggagctggtagggaaggactggggcgtggaacagggcctcagcttgtttctcgccagttggaatcatatacagccaccactgggagggagccttggagattacctagtgaccaggggctcttatttaatcaagaggcattgcacatgcagttactttattgacgtagtgtttgcactacttcaatagtgcaaagggaggaagggaggaaggagaaaccaccctaatgcccgtgagagggtgatgtggggatgataggataaacctattcatggtgagcctccccacagactgttatgcaaccattagaaggaatgagtgagttctgtccctgctgacctggatgtgggatcacgtgttctgccaagtaagaccagtaagatttagagatgcgttcggagcaggggtggcgtggatgacaggtgacgaactgccgattaaatctggccctctgcctggctttgtacagcccgtggctaagaatggtttttacatttttaaattttggaaaaaaatcaaaaaaaggagatttttatgacacgtgaaaatgatatgaaatttacatttcagtgttcattactgaagttttgttggagtgcagccacgctcttctgtcggcacgtcatctgcatagctgcattcgcactgcaaaggcagagccgagccgtcacaggctgtgaggcagaacgtgtttattacctgacccttttctgaaaaagtttgtcggccaccgccttagagtatgatgacattttgccaaacagcagcaccagatatggttctcagcacttcagaggagtagattcattacatttgtttattcgttcattcattttatcctttattcgtcagatgcttactgtctatctgtggggccaggcaccaggaaccagcagagaacaaacagatgcaggccttcttcttgtggagctgaaagtctgtgtctagatccttcttttctcagtacaagcacttccagcctttccaactctttctcacgagtctcagtgtccagccccttgcatcctgcctcccttctgcctccccagtatgtatcctgattgcccaagtccctcccaaaaagaggtatccaaactggtcccatacttcctggggtcttgccaagaggttgagatctagtagaaggacacatcttgaattgggtcatgctttctatctggtttcaaggtgcttaacatccaacctttgccttttcagctcctgccctccactgactccagagagggagatccccagtacttgactccatcacgcagatgggagcaggcaccagctatggagagggatacagctgcgtctccacatgacccatcctgcatgacaccaaagccaccgccagacagtgcctcggattctatgcaaaacctgggaagcggagacctaccccagccccgggaggaagctagctcttcaggggaccgtctgaggactggagtttgatccatgaacctggcttcgaggccttgcttttctctcttcttcattcatattcattcccaacaccttagaaggtgttgcttaatttatttctagaaaagcagcccagagtcagtcattgaagccttccccaccccctggccaaaaaaaaaaaaaaaaaaaaactggacacattttggatctgttgggagcttggagtccagtggttggcatagttgtcacattgggagcagagaagaagcaaccaggggccctgatcaggggactgagccgtagagtcccaggatggcacccaatggcacagcctcttccttttgcctggactctaccgcatgcaagatcaccatcaccgtggtccttgcggtcctcatcctcatcaccgttgctggcaatgtggtcgtctgtctggccgtgggcttgaaccgccggctccgcaacctgaccaattgtttcatcgtgtccttggctatcactgacctgctcctcggcctcctggtgctgcccttctctgccatctaccagctgtcctgcaagtggagctttggcaaggtcttctgcaatatctacaccagcctggatgtgatgctctgcacagcctccattcttaacctcttcatgatcagcctcgaccggtactgcgctgtcatggacccactgcggtaccctgtgctggtcaccccagttcgggtcgccatctctctggtcttaatttgggtcatctccattaccctgtcctttctgtctatccacctggggtggaacagcaggaacgagaccagcaagggcaatcataccacctctaagtgcaaagtccaggtcaatgaagtgtacgggctggtggatgggctggtcaccttctacctcccgctactgatcatgtgcatcacctactaccgcatcttcaaggtcgcccgggatcaggccaagaggatcaatcacattagctcctggaaggcagccaccatcagggagcacaaagccacagtgacactggccgccgtcatgggggccttcatcatctgctggtttccctacttcaccgcgtttgtgtaccgtgggctgagaggggatgatgccatcaatgaggtgttagaagccatcgttctgtggctgggctatgccaactcagccctgaaccccatcctgtatgctgcgctgaacagagacttccgcaccgggtaccaacagctcttctgctgcaggctggccaaccgcaactcccacaaaacttctctgaggtccaacgcctctcagctgtccaggacccaaagccgagaacccaggcaacaggaagagaaacccctgaagctccaggtgtggagtgggacagaagtcacggccccccagggagccacagacaggtaatagccctagccattggtgcacaggatgggggcaatgggaggggatgctactgatgggaatgattaagggagctgctgtttaggtggtgctggtttatgttctaggaactcttcatgagcactttgtaaacaccctcttgcttaatcctcccaacggcccccaaaggtagaacttagctcccttttaaaaggagcacattaaaattctcagaggacttggcaagggccgcacagctggggcct

SEQ ID NO: 211804 - protein, 84 aa, Artificial Sequence
  derived and/or modified sequence
MFRKGKKRHSSSSSQSSEISTKSKSVDSSLGGLSRSSTVASLDTDSTKSSGQSNNNSDTCAEFRIKYVGAIEKLKLSEGKGLEG

SEQ ID NO: 211805 - protein, 96 aa, Artificial Sequence
  derived and/or modified sequence
MFRKGKKRHSSSSSQSSEISTKSKSVDSSLGGLSRSSTVASLDTDSTKSSGQSNNNSDTCAEFRIKYVGAIEKLKLSEGKGLEGPLDLINYIDVAQ

SEQ ID NO: 211806 - protein, 86 aa, Artificial Sequence
  derived and/or modified sequence
MFRKGKKRHSSSSSQSSEISTKSKSVDSSLGGLSRSSTVASLDTDSTKSSGQSNNNSDTCAEFRIKYVGAIEKLKLSEGKGLEGPL

SEQ ID NO: 211807 - protein, 65 aa, Artificial Sequence
  derived and/or modified sequence
MFRKGKKRHSSSSSQSSEISTKSKSVDSSLGGLSRSSTVASLDTDSTKSSGQSNNNSDTCAEFRI

SEQ ID NO: 211808 - protein, 150 aa, Artificial Sequence
  derived and/or modified sequence
MFRKGKKRHSSSSSQSSEISTKSKSVDSSLGGLSRSSTVASLDTDSTKSSGQSNNNSDTCAEFRIKYVGAIEKLKLSEGKGLEGPLDLINYIDVAQQDGKLPFVPPEEEFIMGVSKYGIKVSTSDQYEQAQAICKVLSTAFDSVLTSEKP

SEQ ID NO: 211809 - DNA, 255 bp, Artificial Sequence
  derived and/or modified sequence
atgttcagaaagggcaagaagaggcacagctcctcatcatcccaatcatctgagatatcaaccaaatcaaagagcgtggatagcagcctgggcggactatctcggtccagcacagtggcgtcactggacaccgacagtactaaaagctctggtcagagcaacaataactcagatacctgtgccgaatttaggatcaaatacgtcggcgccattgagaaactcaagttgagcgagggtaaggggttagaagggtag

SEQ ID NO: 211810 - DNA, 291 bp, Artificial Sequence
  derived and/or modified sequence
atgttcaggaagggaaagaagcgccatagcagttcaagcagccagagctcagaaatttccaccaaatccaaatccgtggacagtagcctggggggactgagtagaagcagcacagttgcgtcacttgacaccgattctactaagagttccggacagtctaacaacaactccgatacttgcgcagagttccgaattaaatatgtgggcgccatcgagaagctgaaactctctgagggaaaaggcctggagggaccactagatttgattaattacatcgacgttgcccagtag

SEQ ID NO: 211811 - DNA, 261 bp, Artificial Sequence
  derived and/or modified sequence
atgttccggaagggcaagaagcgacatagcagctcctcttcccagtcctcagaaatctctaccaagtccaagagcgtcgatagtagcctgggcggcctcagtaggtcctctactgtagcttcacttgatacggattccactaagtcttctggtcagtccaataacaattcagacacttgtgccgagtttcggatcaagtacgtaggtgctatcgaaaaacttaagttatcagaggggaaggggcttgaaggacctttatag

SEQ ID NO: 211812 - DNA, 345 bp, Artificial Sequence
  derived and/or modified sequence
atgtttcgcaaaggcaagaagaggcactcatcttccagctcccagtccagcgagattagtaccaagagcaagtctgttgacagcagtttgggcgggctgagtagatccagcactgtggcttctctggacacagattccaccaaaagcagtggacagtccaacaataactccgatacctgcgcagagtttcggattaaatatgtgggagcaatcgaaaagctgaaactctctgaaggcaaaggcttggaaggaccattggacttgataaactacatcgatgtggcccaacaggatgggaagctgcccttcgtgccgcctgaagaggagttcataatgggtgtgtag

SEQ ID NO: 211813 - DNA, 198 bp, Artificial Sequence
  derived and/or modified sequence
atgttccgtaaagggaagaagcgccatagtagtagcagttcacagagctcggaaatatcgactaagtctaagagcgttgactcaagcctgggcgggctgagcagaagctcaacagttgcctctttagacaccgatagcacgaaaagtagcgggcagtcaaataacaattctgacacctgcgccgagttcagaatatag

SEQ ID NO: 211814 - DNA, 453 bp, Artificial Sequence
  derived and/or modified sequence
atgttcagaaaaggcaaaaagcgccacagctctagttcctctcagtcgtcagaaatcagcaccaagagtaagagcgttgactcaagcctgggcggactatctaggtccagtaccgtcgctagtctcgatacggattctacgaaaagcagtggtcagtctaataataactctgacacctgcgccgagttccgcatcaagtatgttggggcaatcgaaaagctcaaattgtctgagggcaaggggctggaaggtcccctggacctcataaactacatagacgtggcccagcaagacggcaaactgccatttgtgccacccgaggaggagtttatcatgggagtgagcaagtacggcattaaagtctcaacaagcgaccaatatgaacaggcccaggccatatgtaaggtgcttagcaccgccttcgattccgtactgacctctgaaaagccctag

SEQ ID NO: 211815 - DNA, 663 bp, Artificial Sequence
  derived and/or modified sequence
agatcgggcgtgggcttgcggactgcagcttcccgagccgctgtcgccccggaggggcggcaaggcgggcggccgcgggccgtttccttgcctcttcctctgccccgcttcggccgcctcccgcctctcagggtcggggttgtctgtccccttcgctgtcacatcctccgcacccagcgcttggaaggtgctccatcacggtgacagacaggtgccaagcaggctggcgtctgggaggaacttcggagccggctctccctaggccccgagcttggccgcatccgtccttactctggtgaccctgggcaggtcactgactcttcgggcgctttggcatcctcgtttgaaaggggctgttatcctgcagccttgctggggatcttctctggatcaagcaatggtggtgaaaaatgtttcgcaagggcaaaaaacgacacagtagtagcagttcccaaagtagcgaaatcagtactaagagcaagtctgtggattctagccttgggggtctttcacgatccagcactgtggccagcctcgacacagattccaccaaaagctcaggacaaagcaacaataattcagatacctgtgcagaatttcgaataaaatatgttggtgccattgagaaactgaaactctccgagggaaaaggccttgaagggc

SEQ ID NO: 211816 - DNA, 445 bp, Artificial Sequence
  derived and/or modified sequence
gcctcttcctctgccccgcttcggccgcctcccgcctctcagggtcggggttgtctgtccccttcgctgtcacatcctccgcacccagcgcttggaaggtgctccatcacggtgacagacaggggatcttctctggatcaagcaatggtggtgaaaaatgtttcgcaagggcaaaaaacgacacagtagtagcagttcccaaagtagcgaaatcagtactaagagcaagtctgtggattctagccttgggggtctttcacgatccagcactgtggccagcctcgacacagattccaccaaaagctcaggacaaagcaacaataattcagatacctgtgcagaatttcgaataaaatatgttggtgccattgagaaactgaaactctccgagggaaaaggccttgaagggccattagacctgataaattatatagacgttgcccag

SEQ ID NO: 211817 - DNA, 540 bp, Artificial Sequence
  derived and/or modified sequence
gagctcgcggaggcctgacgggaacacggtcccgagagcggcgcggacggccaggaaggatgggcgccctggcaatgcagaggagtcaccgagctccgcctttgaccagcgtgcagctgggagagtgagatcagagaccacagcagatcgtggcgctgtgatcagggggtacactcaagctgtgggtcccttaccccagccttgagatcccaggaaggcctgcagcctgaaacgggccttgaaaggggatcttctctggatcaagcaatggtggtgaaaaatgtttcgcaagggcaaaaaacgacacagtagtagcagttcccaaagtagcgaaatcagtactaagagcaagtctgtggattctagccttgggggtctttcacgatccagcactgtggccagcctcgacacagattccaccaaaagctcaggacaaagcaacaataattcagatacctgtgcagaatttcgaataaaatatgttggtgccattgagaaactgaaactctccgagggaaaaggccttgaagggccattaga

SEQ ID NO: 211818 - DNA, 699 bp, Artificial Sequence
  derived and/or modified sequence
agatcgggcgtgggcttgcggactgcagcttcccgagccgctgtcgccccggaggggcggcaaggcgggcggccgcgggccgtttccttgcctcttcctctgccccgcttcggccgcctcccgcctctcagggtcggggttgtctgtccccttcgctgtcacatcctccgcacccagcgcttggaaggtgctccatcacggtgacagacaggtgcgtagtttctctgaaaagcatcacccaggtcagaatgaaaggaaactctctgtgcagaccgctgtatgtgggacctttgaagacagtcaaatagtgttcaattctatagggatcttctctggatcaagcaatggtggtgaaaaatgtttcgcaagggcaaaaaacgacacagtagtagcagttcccaaagtagcgaaatcagtactaagagcaagtctgtggattctagccttgggggtctttcacgatccagcactgtggccagcctcgacacagattccaccaaaagctcaggacaaagcaacaataattcagatacctgtgcagaatttcgaataaaatatgttggtgccattgagaaactgaaactctccgagggaaaaggccttgaagggccattagacctgataaattatatagacgttgcccagcaagatggaaagttgccttttgttcctccggaggaagaatttattatgggagtt

SEQ ID NO: 211819 - DNA, 659 bp, Artificial Sequence
  derived and/or modified sequence
tccgggcggggccgcgctcccggggcgcgggtggaggagcttggaaccacgcagatcgggcgtgggcttgcggactgcagcttcccgagccgctgtcgccccggaggggcggcaaggcgggcggccgcgggccgtttccttgcctcttcctctgccccgcttcggccgcctcccgcctctcagggtcggggttgtctgtccccttcgctgtcacatcctccgcacccagcgcttggaaggtgctccatcacggtgacagacaggtgccaagcaggctggcgtctgggaggaacttcggagccggctctccctaggccccgagcttggccgcatccgtccttactctggtgaccctgggcaggtcactgactcttcgggcgctttggcatcctcgtttgaaaggggctgttatcctgcagccttgctggggatcttctctggatcaagcaatggtggtgaaaaatgtttcgcaagggcaaaaaacgacacagtagtagcagttcccaaagtagcgaaatcagtactaagagcaagtctgtggattctagccttgggggtctttcacgatccagcactgtggccagcctcgacacagattccaccaaaagctcaggacaaagcaacaataattcagatacctgtgcagaatttcgaataaa

SEQ ID NO: 211820 - DNA, 1772 bp, Artificial Sequence
  derived and/or modified sequence
gcggacgtgggcaggagggctggaaaagccggcgctggagcgggaacgggagtagctgcctgggcgccaaaggccgcggcactcccacgcggaccccgaagtccgcaacccggggatgggcccgcggctgcgaggggatcttctctggatcaagcaatggtggtgaaaaatgtttcgcaagggcaaaaaacgacacagtagtagcagttcccaaagtagcgaaatcagtactaagagcaagtctgtggattctagccttgggggtctttcacgatccagcactgtggccagcctcgacacagattccaccaaaagctcaggacaaagcaacaataattcagatacctgtgcagaatttcgaataaaatatgttggtgccattgagaaactgaaactctccgagggaaaaggccttgaagggccattagacctgataaattatatagacgttgcccagcaagatggaaagttgccttttgttcctccggaggaagaatttattatgggagtttccaagtatggcataaaagtatcaacatcagatcaatatgaacaagcacaagccatttgcaaggttttatccaccgcttttgactctgtattaacatctgagaaaccctgaatcctgcaatcaagtagaagtcaacttcatctgaaagttcagctgttttcaaactgcaatgctgaaatgttatgcaaataatgaagttatcccttgctctagattttctgaagaaaatggattgtgtaaaatgctgatcatttgtttattaaaatgtgtcctattacacagtgagttaactctcaatgaagtcatctattttctgggctaaaaaacttcatttgtctttttcaacttctaataagcttaacctaagtgtcacagaagcctaggtgtcacagaggtccactcagtgacaaacacacactgaaggcctgaggaagacgagatgtcacagaggtccactcagtgacaaacacacactgaaggcctgaggaagactagatgtcacagaggtccactcagtgacaaacacacactgaaggcctgaggaagacgagatgtcacagaggtccactcagtgacaaacacacactgaaggcctgaggaagactagatgtcacagaggtccactcagtgacaaacacacactgaaggcctgaggaagacgagatgtcacagaggtccactcagtgacaaacacacactgaaggcctgaggaagacgagatgtcacagaggtccactcagtgacaaacacacactgaaggcctgaggaagactagatgtcacagaggtccactcagtgacaaacacacactgaaggcctgaggaagacgagatgtcacagaggtccactcagtgacaaacacacactgaaggcctgaggaagacgagatgtcacagaggtccactcagtgacacacactgaaggcctgaggaagactgaggacatgggctcagtggtggcttcccagtcatggtatcactggcatggacctctgtccggcagaggtgtggactggagaccaggattcatgctggtctggaacagtgacattgccaacttaagacacacaaagcagattttcagaagtgtctggtcaagataacatgctggccaaccacaattcctagagttaagagaaccttaaaagattaccgctcatgctaaaagtatgtaaagatcccatgtacagtatgatagtgtactttttttaaaggactgtcaatatacaaaactttaaagattaaaaacattaaaaataaaa

SEQ ID NO: 211821 - DNA, 255 bp, Artificial Sequence
  derived and/or modified sequence
atgttcaggaagggcaagaagaggcacagcagcagcagcagccagagcagcgagatcagcaccaagagcaagtctgtggacagcagcctgggcggcctgagccgcagcagcacagtggccagcctggacacagacagcaccaagagcagcggccagagcaacaacaacagcgacacctgtgccgagttccgcatcaagtatgtgggcgccatcgagaagctgaagctgtctgagggcaagggcctggagggctag

SEQ ID NO: 211822 - DNA, 291 bp, Artificial Sequence
  derived and/or modified sequence
atgttcaggaagggcaagaagaggcacagcagcagcagcagccagagcagcgagatcagcaccaagagcaagtctgtggacagcagcctgggcggcctgagccgcagcagcacagtggccagcctggacacagacagcaccaagagcagcggccagagcaacaacaacagcgacacctgtgccgagttccgcatcaagtatgtgggcgccatcgagaagctgaagctgtctgagggcaagggcctggagggccccctggacctgatcaactacattgatgtggcccagtag

SEQ ID NO: 211823 - DNA, 261 bp, Artificial Sequence
  derived and/or modified sequence
atgttcaggaagggcaagaagaggcacagcagcagcagcagccagagcagcgagatcagcaccaagagcaagtctgtggacagcagcctgggcggcctgagccgcagcagcacagtggccagcctggacacagacagcaccaagagcagcggccagagcaacaacaacagcgacacctgtgccgagttccgcatcaagtatgtgggcgccatcgagaagctgaagctgtctgagggcaagggcctggagggccccctgtag

SEQ ID NO: 211824 - DNA, 345 bp, Artificial Sequence
  derived and/or modified sequence
atgttcaggaagggcaagaagaggcacagcagcagcagcagccagagcagcgagatcagcaccaagagcaagtctgtggacagcagcctgggcggcctgagccgcagcagcacagtggccagcctggacacagacagcaccaagagcagcggccagagcaacaacaacagcgacacctgtgccgagttccgcatcaagtatgtgggcgccatcgagaagctgaagctgtctgagggcaagggcctggagggccccctggacctgatcaactacattgatgtggcccagcaggacggcaagctgccctttgtgcccccagaggaggagttcatcatgggcgtgtag

SEQ ID NO: 211825 - DNA, 198 bp, Artificial Sequence
  derived and/or modified sequence
atgttcaggaagggcaagaagaggcacagcagcagcagcagccagagcagcgagatcagcaccaagagcaagtctgtggacagcagcctgggcggcctgagccgcagcagcacagtggccagcctggacacagacagcaccaagagcagcggccagagcaacaacaacagcgacacctgtgccgagttccgcatctag

SEQ ID NO: 211826 - DNA, 453 bp, Artificial Sequence
  derived and/or modified sequence
atgttcaggaagggcaagaagaggcacagcagcagcagcagccagagcagcgagatcagcaccaagagcaagtctgtggacagcagcctgggcggcctgagccgcagcagcacagtggccagcctggacacagacagcaccaagagcagcggccagagcaacaacaacagcgacacctgtgccgagttccgcatcaagtatgtgggcgccatcgagaagctgaagctgtctgagggcaagggcctggagggccccctggacctgatcaactacattgatgtggcccagcaggacggcaagctgccctttgtgcccccagaggaggagttcatcatgggcgtgtccaaatatggcatcaaggtgtccaccagtgaccagtatgagcaggcccaggccatctgcaaggtgctgagcacagcctttgattctgtgctgaccagcgagaagccctag

SEQ ID NO: 211827 - DNA, 255 bp, Artificial Sequence
  derived and/or modified sequence
atgttccggaagggcaagaagcggcacagcagcagcagcagccagtcctcagagatcagtacaaagtccaaatcagtcgattcaagtctggggggcctctccagaagcagtactgtagcgtcactcgataccgactccaccaaaagtagcggccaatccaataataactctgacacttgcgccgagttcaggattaagtacgttggagccatcgaaaaactaaagttaagtgagggaaagggactggagggatag

SEQ ID NO: 211828 - DNA, 291 bp, Artificial Sequence
  derived and/or modified sequence
atgttccggaagggcaagaagcggcacagcagcagcagcagccagtccagcgaaatttctacaaaaagcaagtccgtcgattcttcactgggcggcctgtctcgcagtagtacggtcgcctcactggacacagactctactaaatcgtcagggcagtctaacaacaattccgatacatgcgccgaattcaggatcaaatacgttggcgcgatcgaaaagttgaaactgagcgagggaaaagggctggagggcccgctggacctgatcaattatatcgatgtggctcagtag

SEQ ID NO: 211829 - DNA, 261 bp, Artificial Sequence
  derived and/or modified sequence
atgttccggaagggcaagaagcggcacagcagcagcagcagccagtcttcagagatcagtactaaatccaaatccgtggacagcagcttgggggggctcagccgatccagcaccgtggcttctcttgacactgattcgaccaagtccagtggccagtccaacaacaactcagatacgtgcgccgaatttagaattaaatacgtcggggcaatcgagaagttaaaattgtccgaaggaaagggactggaggggcctctctag

SEQ ID NO: 211830 - DNA, 345 bp, Artificial Sequence
  derived and/or modified sequence
atgttccggaagggcaagaagcggcacagcagcagcagcagccagtcttcagaaatctcaacaaagagcaaatctgtggattcctcacttggcggcctttcaaggagctcgacagtcgcgagcttggacacagattcgacaaaatcttccggccaaagcaataataacagcgatacatgtgcagaatttagaattaagtacgtgggcgcaattgagaagctgaagctttccgagggtaagggcctggagggcccgctcgacctcataaactacatcgatgtcgcacagcaagacggtaagctgcctttcgtgccacctgaggaagaatttataatgggggtgtag

SEQ ID NO: 211831 - DNA, 198 bp, Artificial Sequence
  derived and/or modified sequence
atgttccggaagggcaagaagcggcacagcagcagcagcagccagtcctcagaaatctcaacaaagtcaaagagcgttgacagttcactgggcggattaagcaggagctccacggtcgctagcctggacactgactctacaaaatcatctggacagtcgaacaataattcagacacatgcgccgaatttcgcatttag

SEQ ID NO: 211832 - DNA, 453 bp, Artificial Sequence
  derived and/or modified sequence
atgttccggaagggcaagaagcggcacagcagcagcagcagccagagctccgaaatctcaacaaaatcaaagtctgtggattcctccctcggtggtctgtcccgatcatctaccgtggcctccctcgatacggattccacgaagtcatccgggcagtctaacaataatagcgacacttgtgctgaatttcggattaagtacgtgggcgcgattgagaagttgaaacttagcgaaggcaagggtttggagggtccgttggacctcattaattacatcgacgtcgctcagcaggacggaaagttgccctttgttcctccagaggaggagttcattatgggggttagcaagtacggaatcaaggtctccacctctgatcagtacgaacaggctcaggcaatttgcaaggtgctgagcaccgcgtttgattctgtcctgacctccgagaagccctag

SEQ ID NO: 211833 - DNA, 255 bp, Artificial Sequence
  derived and/or modified sequence
atgttccggaaggggaaaaaacgacacagctcatcatccagccagtcttccgaaatttcgactaaaagtaaatcagtggacagcagcctcgggggacttagtcggtcaagcacagtagcctctctcgacaccgatagcaccaaatcctcaggccagtctaataacaatagtgatacgtgtgccgagttcaggatcaaatacgtaggggctatcgagaaattgaaactttccgaggggaagggcctcgagggctag

SEQ ID NO: 211834 - DNA, 291 bp, Artificial Sequence
  derived and/or modified sequence
atgttcaggaagggcaagaagcgccactcgtcatcctccagtcagagtagtgagatctctactaagtccaagagtgtcgattcaagtctggggggtctgtccaggtctagtactgtggcctctttggacaccgattctacaaaatccagcgggcagagtaataacaactcagacacttgcgctgaatttagaatcaagtacgtgggagccattgagaagcttaaactgtctgagggtaagggactcgagggtccactggacctcatcaactatattgatgttgcccagtag

SEQ ID NO: 211835 - DNA, 261 bp, Artificial Sequence
  derived and/or modified sequence
atgttcagaaagggcaaaaaacggcatagttctagctccagtcagtcttctgagatatccaccaaaagtaaatctgttgactcatccctcgggggtttgtctagatcatcaaccgtggctagcttagatactgactcgactaagagttcagggcagtccaacaataactccgatacgtgcgcggaatttagaattaagtacgttggagcgatcgagaagttgaagttgtccgaggggaagggactggaaggccctttatag

SEQ ID NO: 211836 - DNA, 345 bp, Artificial Sequence
  derived and/or modified sequence
atgttccgaaaaggcaagaagaggcatagctcttctagctctcagagctcagaaatctccaccaagtctaagtccgtagactcttccctgggtggtctgtctcgctcctctacggttgcatccctggataccgacagcaccaaatcttccggtcagtctaataataacagtgacacctgcgctgaattccgaattaagtacgtgggagccatcgagaaattgaaactgtctgaagggaagggacttgaggggcctctggaccttatcaactatatcgacgtggcccagcaggatggaaagctacccttcgtgccacccgaggaagagtttatcatgggagtgtag

SEQ ID NO: 211837 - DNA, 198 bp, Artificial Sequence
  derived and/or modified sequence
atgttccgcaaaggaaaaaagagacattcttccagcagctcacagagcagcgaaatttctactaagtctaaatccgtggactcttccctgggcggactctccaggtcatccaccgtggcctctctggacaccgattcgaccaagagcagtggccagtctaataacaactcggacacttgcgcggagtttaggatttag

SEQ ID NO: 211838 - DNA, 453 bp, Artificial Sequence
  derived and/or modified sequence
atgttcagaaaggggaaaaagaggcactcatccagtagctctcaaagttctgaaatcagcactaagtccaaaagcgtggatagtagcctcggcggtctgagtcgaagcagcactgtcgcctcattggatactgatagcacaaagtccagcggtcagagtaacaacaattcggacacctgtgccgagttcaggattaagtacgtcggcgctattgagaagcttaagctgagcgaggggaagggcctagagggcccattagaccttattaactacattgatgtggctcagcaggacggtaaactgcccttcgtcccgccagaggaggagttcatcatgggcgtcagtaagtacggcataaaggtgagtacatctgaccagtacgaacaggcccaggcgatttgcaaggttcttagcaccgcattcgattcagtgctaaccagcgaaaagccttag

SEQ ID NO: 211839 - DNA, 255 bp, Artificial Sequence
  derived and/or modified sequence
atgttcagaaagggcaagaagagacacagcagcagcagcagccagagcagcgagatcagcaccaagagcaagagcgtggacagcagcctgggcggcctgagcagaagcagcaccgtggccagcctggacaccgacagcaccaagagcagcggccagagcaacaacaacagcgacacctgcgccgagttcagaatcaagtacgtgggcgccatcgagaagctgaagctgagcgagggcaagggcctggagggctag

SEQ ID NO: 211840 - DNA, 291 bp, Artificial Sequence
  derived and/or modified sequence
atgttcagaaagggcaagaagagacacagcagcagcagcagccagagcagcgagatcagcaccaagagcaagagcgtggacagcagcctgggcggcctgagcagaagcagcaccgtggccagcctggacaccgacagcaccaagagcagcggccagagcaacaacaacagcgacacctgcgccgagttcagaatcaagtacgtgggcgccatcgagaagctgaagctgagcgagggcaagggcctggagggccccctggacctgatcaactacatcgacgtggcccagtag

SEQ ID NO: 211841 - DNA, 261 bp, Artificial Sequence
  derived and/or modified sequence
atgttcagaaagggcaagaagagacacagcagcagcagcagccagagcagcgagatcagcaccaagagcaagagcgtggacagcagcctgggcggcctgagcagaagcagcaccgtggccagcctggacaccgacagcaccaagagcagcggccagagcaacaacaacagcgacacctgcgccgagttcagaatcaagtacgtgggcgccatcgagaagctgaagctgagcgagggcaagggcctggagggccccctgtag

SEQ ID NO: 211842 - DNA, 345 bp, Artificial Sequence
  derived and/or modified sequence
atgttcagaaagggcaagaagagacacagcagcagcagcagccagagcagcgagatcagcaccaagagcaagagcgtggacagcagcctgggcggcctgagcagaagcagcaccgtggccagcctggacaccgacagcaccaagagcagcggccagagcaacaacaacagcgacacctgcgccgagttcagaatcaagtacgtgggcgccatcgagaagctgaagctgagcgagggcaagggcctggagggccccctggacctgatcaactacatcgacgtggcccagcaggacggcaagctgcccttcgtgccccccgaggaggagttcatcatgggcgtgtag

SEQ ID NO: 211843 - DNA, 198 bp, Artificial Sequence
  derived and/or modified sequence
atgttcagaaagggcaagaagagacacagcagcagcagcagccagagcagcgagatcagcaccaagagcaagagcgtggacagcagcctgggcggcctgagcagaagcagcaccgtggccagcctggacaccgacagcaccaagagcagcggccagagcaacaacaacagcgacacctgcgccgagttcagaatctag

SEQ ID NO: 211844 - DNA, 453 bp, Artificial Sequence
  derived and/or modified sequence
atgttcagaaagggcaagaagagacacagcagcagcagcagccagagcagcgagatcagcaccaagagcaagagcgtggacagcagcctgggcggcctgagcagaagcagcaccgtggccagcctggacaccgacagcaccaagagcagcggccagagcaacaacaacagcgacacctgcgccgagttcagaatcaagtacgtgggcgccatcgagaagctgaagctgagcgagggcaagggcctggagggccccctggacctgatcaactacatcgacgtggcccagcaggacggcaagctgcccttcgtgccccccgaggaggagttcatcatgggcgtgagcaagtacggcatcaaggtgagcaccagcgaccagtacgagcaggcccaggccatctgcaaggtgctgagcaccgccttcgacagcgtgctgaccagcgagaagccctag

SEQ ID NO: 211845 - protein, 448 aa, Artificial Sequence
  derived and/or modified sequence
MAHVGDCTQTPWLPVLVVSLMCSARAEYSNCGENEYYNQTTGLCQECPPCGPGEEPYLSCGYGTKDEDYGCVPCPAEKFSKGGYQICRRHKDCEGFFRATVLTPGDMENDAECGPCLPGYYMLENRPRNIYGMVCYSCLLAPPNTKECVGATSGASANFPGTSGSSTLSPFQHAHKELSGQGHLATALIIAMSTIFIMAIAIVLIIMFYILKTKPSAPACCTSHPGKSVEAQVSKDEEKKEAPDNVVMFSEKDEFEKLTATPAKPTKSENDASSENEQLLSRSVDSDEEPAPDKQGSPELCLLSLVHLAREKSATSNKSAGIQSRRKKILDVYANVCGVVEGLSPTELPFDCLEKTSRMLSSTYNSEKAVVKTWRHLAESFGLKRDEIGGMTDGMQLFDRISTAGYSIPELLTKLVQIERLDAVESLCADILEWAGVVPPASQPHAAS

SEQ ID NO: 211846 - DNA, 1347 bp, Artificial Sequence
  derived and/or modified sequence
atggcccacgtgggcgactgcacccagaccccctggctgcccgtgctggtggtgagcctgatgtgcagcgccagagccgagtacagcaactgcggcgagaacgagtactacaaccagaccaccggcctgtgccaggagtgccccccctgcggccccggcgaggagccctacctgagctgcggctacggcaccaaggacgaggactacggctgcgtgccctgccccgccgagaagttcagcaagggcggctaccagatctgcagaagacacaaggactgcgagggcttcttcagagccaccgtgctgacccccggcgacatggagaacgacgccgagtgcggcccctgcctgcccggctactacatgctggagaacagacccagaaacatctacggcatggtgtgctacagctgcctgctggccccccccaacaccaaggagtgcgtgggcgccaccagcggcgccagcgccaacttccccggcaccagcggcagcagcaccctgagccccttccagcacgcccacaaggagctgagcggccagggccacctggccaccgccctgatcatcgccatgagcaccatcttcatcatggccatcgccatcgtgctgatcatcatgttctacatcctgaagaccaagcccagcgcccccgcctgctgcaccagccaccccggcaagagcgtggaggcccaggtgagcaaggacgaggagaagaaggaggcccccgacaacgtggtgatgttcagcgagaaggacgagttcgagaagctgaccgccacccccgccaagcccaccaagagcgagaacgacgccagcagcgagaacgagcagctgctgagcagaagcgtggacagcgacgaggagcccgcccccgacaagcagggcagccccgagctgtgcctgctgagcctggtgcacctggccagagagaagagcgccaccagcaacaagagcgccggcatccagagcagaagaaagaagatcctggacgtgtacgccaacgtgtgcggcgtggtggagggcctgagccccaccgagctgcccttcgactgcctggagaagaccagcagaatgctgagcagcacctacaacagcgagaaggccgtggtgaagacctggagacacctggccgagagcttcggcctgaagagagacgagatcggcggcatgaccgacggcatgcagctgttcgacagaatcagcaccgccggctacagcatccccgagctgctgaccaagctggtgcagatcgagagactggacgccgtggagagcctgtgcgccgacatcctggagtgggccggcgtggtgccccccgccagccagccccacgccgccagctag

SEQ ID NO: 211847 - DNA, 1347 bp, Artificial Sequence
  derived and/or modified sequence
atggcacacgtgggtgattgcacccagacgccatggctgccagtgttggtcgtttccctcatgtgttcagcgcgggccgaatactcaaactgtggcgagaacgagtattacaaccagacgaccggcctctgccaagagtgccccccatgcggccctggcgaggaaccctatctcagttgcggctatggcaccaaggacgaggactatggctgtgtgccctgccccgcagagaagtttagtaaggggggctatcagatctgtaggcggcataaggattgtgagggtttcttccgagccactgtcctcactcccggcgacatggagaacgatgcagaatgtgggccttgtttaccaggctactatatgcttgagaataggcctagaaacatctacggaatggtttgctattcgtgtctgctagcccctccgaacaccaaagagtgtgtgggggccacgtccggggcatctgcgaactttcctggtacatcaggatcaagtaccctctctccgtttcagcacgcacacaaggagctgtcagggcaaggacacctagcaactgcgttgatcatagccatgagtacgatctttattatggcgatcgcgattgtacttattattatgttttacatcctgaaaacaaagccttcagctcccgcttgctgtacgtcccatcccggcaaatccgtagaagctcaagttagcaaagatgaggagaagaaggaagcccccgacaacgttgtgatgtttagcgagaaggacgagtttgagaaactgacagctactccagccaaacccaccaagagcgaaaacgacgcatcctcagagaacgaacagctgctcagccgttcggtagactccgacgaggagccagctcctgacaaacagggaagtcctgagctgtgtctcctgtctctggtacatctggctagagagaagtctgccacttccaataagagtgctggtatacagtctcgacgtaagaagattctcgacgtatatgcaaacgtgtgtggcgttgtggagggcctctctcccacagagcttccctttgattgtttggagaagaccagtcgcatgctctctagcacgtacaattcggagaaagctgtcgtcaagacttggagacacctggccgaatccttcggcctgaagcgggatgagattggtggcatgacggatgggatgcagctcttcgacagaattagtaccgccggatacagcatccccgagctgctgaccaagctcgttcaaattgagcgcctggatgccgttgagtccctgtgcgccgatatcctggagtgggcaggtgtggtccccccagccagccaaccccatgccgcttcctag

SEQ ID NO: 211848 - DNA, 1347 bp, Artificial Sequence
  derived and/or modified sequence
atggcccacgtgggggactgcacccagaccccctggctgcctgtgctggtggtgtccctgatgtgcagcgcccgggcagagtacagcaactgtggagaaaatgagtactacaaccagaccaccggcctgtgccaggagtgccccccctgtggccctggagaggagccctacctgagctgtggctacggcaccaaggatgaagattatggctgtgtgccctgcccagctgagaagttcagcaaaggaggctaccagatctgccgccgccacaaggactgtgagggcttcttccgggccaccgtgctgacccctggggacatggagaatgatgctgaatgtggcccctgcctgcccggctactacatgctggagaaccggcccaggaacatctacggcatggtgtgctacagctgcctgctggccccacccaacaccaaggaatgtgtgggcgccaccagcggggccagcgccaacttccctggcaccagcggcagcagcaccctgagccccttccagcacgcccacaaggagctgagcggccagggccacctggccacagccctgatcatcgccatgagcaccatcttcatcatggccatcgccatcgtgctgatcatcatgttctacatcctgaagaccaagcccagcgccccagcctgctgcaccagccaccctgggaagtctgtggaggcccaggtgtccaaggatgaggagaagaaggaggccccagacaacgtggtgatgttcagcgagaaggatgaatttgagaagctgacagccaccccagccaagcccaccaagtcagaaaatgatgccagcagtgaaaatgagcagctgctgagccgctctgtggacagtgatgaggagcccgccccagacaagcagggcagccctgagctgtgcctgctgagcctggtgcacctggcccgggagaagagcgccaccagcaacaagtctgctggcatccagagcaggaggaagaagatcctggatgtgtatgccaacgtgtgtggggtggtggagggcctgagccccacagagctgccctttgactgcctggagaagaccagcaggatgctgagcagcacctacaacagcgagaaggctgtggtgaagacctggaggcacctggccgagagctttggcctgaagagagatgagatcggcggcatgacagatggcatgcagctgtttgaccgcatcagcacagctggctacagcatccctgagctgctgaccaagctggtgcagatcgagcggctggatgctgtggagagcctgtgtgccgacatcctggagtgggccggcgtggtgcccccagccagccagccccacgccgccagctag

SEQ ID NO: 211849 - DNA, 1347 bp, Artificial Sequence
  derived and/or modified sequence
atggcccacgtgggcgactgcacccagaccccctggctgcccgtgcttgtcgtgtctctaatgtgctctgcgagggctgagtatagcaactgcggagagaatgagtactataaccagactaccgggctctgccaggagtgccccccttgtgggccaggagaagagccctatctttcttgcggctatggaactaaggacgaagactacggctgcgttccttgtcctgcagagaagtttagtaaaggcgggtaccagatttgcaggaggcacaaagactgtgaaggttttttcagggctacagtgctcacacctggagatatggaaaatgacgctgaatgtggcccttgtctgccgggctactacatgcttgagaatcgacctcggaacatatacggaatggtatgttatagctgccttctcgccccacctaacactaaagaatgcgtcggcgcgacctccggcgcaagtgccaattttcccggcacatcgggtagttctaccctgtcgccgttccaacatgcccacaaagagcttagcgggcagggccatctcgcaacagccctgataattgccatgagcaccatcttcataatggcaatcgcaatcgtgctgatcatcatgttttacatactgaaaactaagccctctgccccagcctgctgcacatctcacccgggcaaatcagttgaagctcaggtttcgaaagacgaggagaaaaaagaggcacctgataatgttgtgatgtttagcgagaaggacgagtttgagaaattgactgccactcccgctaagcctaccaaaagcgagaatgacgcaagcagtgagaatgagcaactgttaagccggtcagtggatagcgacgaagaaccagccccggataagcagggctcccctgagctctgcctgctgagcctggtccatctcgcgagagaaaaatctgccactagtaacaagtcagcaggtattcagtctcgacggaagaagatcttggatgtttacgctaacgtgtgtggcgtcgtcgagggcctgtcaccgactgaactgccgtttgactgtcttgagaaaactagcagaatgctctccagcacttacaattctgaaaaggccgtagtaaaaacatggagacaccttgccgagtcctttggtctgaaaagagatgagataggcgggatgacagacggcatgcaactgttcgatcggattagcacagccggctactctatccccgaattgctgaccaaactggtacagatagaacgccttgacgcagtggagagcctctgtgctgacattcttgagtgggccggtgtggtgcctccagcctcacagcctcacgctgcatcttag

SEQ ID NO: 211850 - DNA, 1347 bp, Artificial Sequence
  derived and/or modified sequence
atggcgcacgtgggcgactgtactcagacaccctggttacccgtgctggtcgtatccctaatgtgctcagctagggccgagtacagtaactgcggagagaatgagtactataaccagaccacgggactgtgtcaggaatgccccccatgcggtccgggagaagagccctatctttcatgtggctatggcacaaaagacgaggactacggatgcgtgccttgtccagcggagaagtttagcaaggggggttatcaaatatgtcgtcgccataaggactgcgaaggtttctttcgagccaccgtgctgaccccaggcgacatggagaacgacgccgagtgcggcccttgcttaccaggatattacatgctcgagaaccgacctcggaacatttatgggatggtgtgttattcatgcctgctggcccctccgaacaccaaggagtgtgtgggggcaacaagcggagcttctgccaacttccccggaacatcaggttcatctacactctcccctttccagcacgcccacaaggagctgtccggtcaaggacatcttgccactgctcttattattgcaatgtcgacaatcttcataatggcgattgcaatagtattgatcatcatgttctatatcctgaagacaaagccatctgcccctgcctgctgtacgagccaccccggtaagtcagtcgaagctcaggtgtctaaagacgaggaaaaaaaggaggctccagataatgtcgtaatgtttagtgaaaaggatgagttcgaaaagttgacagcaacccctgctaaacccactaaatctgagaatgacgctagctctgagaacgaacagttgctgtctaggagtgtggatagcgacgaggaacccgcaccagacaagcaggggagccccgagttgtgtctgctatccctggtacacctcgccagggagaagtctgcaacgtcaaacaaaagcgccggaatccagtctcgacgcaagaaaatactggacgtctatgcaaacgtgtgcggtgttgtggaggggctttcacccacagagctgccctttgattgtttggagaagacgtcgagaatgcttagcagtacgtacaattccgaaaaggccgtggtcaagacgtggcgccatttagctgaatcatttggccttaaacgggatgaaattgggggtatgacagatggaatgcagctttttgaccggatatcaacagcaggttatagcatcccagaactgctgactaaactagtgcaaattgaacgtctggatgctgtggaatctttgtgcgctgacattctggagtgggctggcgtggtgcctcccgcatctcagccacatgctgcttcttag

SEQ ID NO: 211851 - protein, 211 aa, Artificial Sequence
  derived and/or modified sequence
MQAPHKEHLYKLLVIGDLGVGKTSIIKRYVHQNFSSHYRATIGVDFALKVLHWDPETVVRLQLWDIAGQERFGNMTRVYYREAMGAFIVFDVTRPATFEAVAKWKNDLDSKLSLPNGKPVSVVLLANKCDQGKDVLMNNGLKMDQFCKEHGFVGWFETSAKENINIDEASRCLVKHILANECDLMESIEPDVVKPHLTSTKVASCSGCAKS

SEQ ID NO: 211852 - DNA, 636 bp, Artificial Sequence
  derived and/or modified sequence
atgcaagcccctcataaggagcacctgtacaaactgctggtgatcggcgacttgggcgtgggtaaaacatctattatcaaacgatacgtccaccagaatttttctagccattatagagctaccattggtgtggattttgctcttaaggttctgcactgggatcctgagactgtggttcgcttgcagctgtgggatatcgctgggcaggaacggtttggcaatatgacccgcgtgtattatagagaggctatgggcgcgttcattgtgtttgatgtcaccaggcctgcaactttcgaggcagtcgcaaagtggaagaatgacctcgatagcaaactgtccttgccgaatgggaagccggtgtccgtggtgctccttgcaaacaagtgtgaccaaggaaaggatgtcctgatgaataatggtctgaaaatggaccaattttgtaaagagcatgggtttgtcgggtggtttgagacctcagccaaggagaacattaatattgatgaagctagccggtgccttgtcaagcacatcctggccaatgaatgtgatttgatggagtctattgaacctgatgttgtcaaaccacaccttacgagcaccaaggtggccagctgcagcggatgtgctaaatcatag

SEQ ID NO: 211853 - DNA, 636 bp, Artificial Sequence
  derived and/or modified sequence
atgcaggccccccacaaggagcacctgtacaagctgctggtgattggagacctgggcgtgggcaagaccagcatcatcaagagatatgtgcaccagaacttcagcagccactaccgggccaccatcggcgtggactttgccctgaaggtgctgcactgggaccctgagaccgtggtgcggctgcagctgtgggacattgctggccaggagcgcttcggcaacatgaccagggtgtactaccgggaggccatgggcgccttcatcgtgtttgatgtgaccaggcctgccacctttgaggccgtggccaagtggaagaatgacctggacagcaagctgagcctgcccaacgggaagcctgtgtctgtggtgctgctggccaacaagtgtgaccagggcaaggatgtgctgatgaacaacggcctgaagatggaccagttctgcaaggagcacggctttgtgggctggtttgagaccagcgccaaggagaacatcaacattgatgaggccagccgctgcctggtgaagcacatcctggccaatgaatgtgacctgatggagagcattgaaccagatgtggtgaagccccacctgaccagcaccaaggtggccagctgcagcggctgtgccaagagctag

SEQ ID NO: 211854 - DNA, 636 bp, Artificial Sequence
  derived and/or modified sequence
atgcaggccccccacaaggagcacctgtacaagctgctggtgatcggcgatctcggtgtgggaaaaacaagcataatcaaacgctatgtccaccaaaattttagttcacactatagagcaactattggtgtggacttcgccctgaaagtgctgcattgggaccccgagactgtagtcagactccagctgtgggacattgctgggcaggaacggtttggcaacatgactcgcgtctattaccgggaggctatgggggctttcatcgtgtttgatgttactaggcccgcaactttcgaagccgttgccaaatggaaaaacgacttagactcaaagctctccctgccaaacgggaaaccggtcagcgtggtgctacttgctaataaatgtgatcagggcaaggatgtactgatgaacaacggacttaagatggaccagttttgtaaggagcacgggtttgtggggtggtttgagaccagtgcaaaggaaaacattaacatcgacgaggcaagtcgatgcctcgtgaaacacattttggccaacgagtgtgacttgatggagagcatagaaccggatgtcgttaagccgcacctcaccagtaccaaggtcgcatcttgctctggatgcgccaaatcatag

SEQ ID NO: 211855 - DNA, 636 bp, Artificial Sequence
  derived and/or modified sequence
atgcaggcaccacacaaagagcacttgtacaagttactggtcatcggggatctgggcgtgggaaagacaagcattattaagaggtatgttcaccagaatttctcgagccactaccgggcaactatcggcgttgatttcgcactgaaggtcctccattgggatcccgagacggtggtccgattgcagctgtgggacatcgctgggcaagaacgatttggaaacatgactcgagtgtattacagagaggccatgggtgcctttattgtcttcgatgtcaccagacctgcaaccttcgaagcagtggcgaagtggaagaatgatctggatagcaaacttagcctccccaacggcaagcctgtgagcgtagtgcttctcgcgaacaaatgcgaccagggtaaagacgtcctcatgaacaatgggctaaaaatggaccagttttgcaaagagcatggttttgtggggtggtttgaaacctccgccaaggagaacatcaatatcgatgaagctagtcgatgcttagttaagcatattttagcaaacgagtgtgatctaatggagtcgatcgaacccgatgtcgtcaaaccgcatctgacatccacaaaagtagcgtcttgtagtggatgcgccaaaagttag

SEQ ID NO: 211856 - DNA, 1444 bp, Artificial Sequence
  derived and/or modified sequence
ttgcgctccccaagtctctctcgtgcgcagagcccaggctgcgcttccctggtcaggcacggcacgtctggccggccgccaggatgcaggccccgcacaaggagcacctgtacaagttgctggtgattggcgacctgggcgtggggaagaccagtatcatcaagcgctacgtgcaccagaacttctcttcgcactaccgggccacaatcggcgtggacttcgcgctcaaggtgctccactgggacccggagactgtggtgcgcctgcagctctgggatatcgcaggtcaagaaagatttggaaacatgacgagggtctattaccgagaagctatgggtgcatttattgtcttcgatgtcaccaggccagccacatttgaagcagtggcaaagtggaaaaatgatttggactccaagttaagtctccctaatggcaaaccggtttcagtggttttgttggccaacaaatgtgaccaggggaaggatgtgctcatgaacaatggcctcaagatggaccagttctgcaaggagcacggtttcgtaggatggtttgaaacatcagcaaaggaaaatataaacattgatgaagcctccagatgcctggtgaaacacatacttgcaaatgagtgtgacctaatggagtctattgagccggacgtcgtgaagccccatctcacatcaaccaaggttgccagctgctctggctgtgccaaatcctagtaggcacctttgctggtgtctggtaggaatgacctcattgttccacaaattgtgcctctatttttaccattttgggtaaacgtcaggatagagataccacatgtggcaagccaaagatctatgcctctgttttttcagtgagagagaaatagcaaatgttctttctatgctttcctcaccatcatcacagtgtttacaaacttttgaaaatatttagtctgttacaaacttctgtcatgtagctgaccaaaatcctgcagggccacagtcggcactgttatttgcttcttttaatcagcaaaggcctcaagtcttaaaataaaaggggagaagaacaaactagctgtcaagtcaaggactggctttcaccttgccctggtgtctttttccagatttcagtatattctctgatggcctgacaggcctattaagtagatgtgatattttctcccaagatgacctccattctcggcagacctaagagttgcctctgagttagctctttggaatcgtgaacacaggtgtgctatattgtccttgtcctaactgtcacttgccatggcctgaatgttggcttaactgaatattgtatgaaaagacatgcctccatatgtgcctttctgttagctttctctgactcaagctgtggggctcctctatacatgctatacatgtaatatatattatatatatttttgcaagtgaacaataaaacattaaaagat

SEQ ID NO: 211857 - DNA, 636 bp, Artificial Sequence
  derived and/or modified sequence
atgcaggccccccacaaggagcacctgtacaagctgctggtgatcggcgacctgggcgtgggcaagaccagcatcatcaagagatacgtgcaccagaacttcagcagccactacagagccaccatcggcgtggacttcgccctgaaggtgctgcactgggaccccgagaccgtggtgagactgcagctgtgggacatcgccggccaggagagattcggcaacatgaccagagtgtactacagagaggccatgggcgccttcatcgtgttcgacgtgaccagacccgccaccttcgaggccgtggccaagtggaagaacgacctggacagcaagctgagcctgcccaacggcaagcccgtgagcgtggtgctgctggccaacaagtgcgaccagggcaaggacgtgctgatgaacaacggcctgaagatggaccagttctgcaaggagcacggcttcgtgggctggttcgagaccagcgccaaggagaacatcaacatcgacgaggccagcagatgcctggtgaagcacatcctggccaacgagtgcgacctgatggagagcatcgagcccgacgtggtgaagccccacctgaccagcaccaaggtggccagctgcagcggctgcgccaagagctag

SEQ ID NO: 211858 - protein, 243 aa, Artificial Sequence
  derived and/or modified sequence
MARLWGALSLWPLWAAVPWGGAAAVGVRACSSTAAPDGVEGPALRRSYWRHLRRLVLGPPEPPFSHVCQVGDPVLRGVAAPVERAQLGGPELQRLTQRLVQVMRRRRCVGLSAPQLGVPRQVLALELPEALCRECPPRQRALRQMEPFPLRVFVNPSLRVLDSRLVTFPEGCESVAGFLACVPRFQAVQISGLDPNGEQVVWQASGWAARIIQHEMDHLQGCLFIDKMDSRTFTNVYWMKVND

SEQ ID NO: 211859 - DNA, 732 bp, Artificial Sequence
  derived and/or modified sequence
atggccaggctgtggggcgccttaagcctgtggcccctctgggcggctgtgccctggggaggagccgcagccgtgggcgtgcgggcctgttcttccaccgccgccccagacggggtcgagggcccagctctaagaagatcctattggaggcaccttcggcggctggtgctgggccccccagagcctcccttctcccatgtttgtcaggtcggcgatccagttctgcgaggggtcgccgcacctgttgagagagcccagctgggcggccctgagttgcaaaggctgacccagcgactggtgcaggtgatgagaaggcggcgatgtgtggggctctctgccccccagctgggagtcccaagacaggtactggctctggagctccccgaggctctgtgccgcgaatgcccccctaggcaacgtgctctgcgccagatggagcctttccccctgcgggtgtttgtgaacccttcacttagggtactcgacagtcgactcgtgacttttcccgagggctgtgagtcagtggcgggatttctggcttgcgtgccccggtttcaggccgtccaaatcagtggtttggacccgaacggggaacaggtggtgtggcaggcgtctggctgggctgccaggataatccagcatgaaatggatcacctgcaggggtgcttgttcatcgacaagatggatagtcgcacattcacaaatgtttactggatgaaggtcaatgattag

SEQ ID NO: 211860 - DNA, 732 bp, Artificial Sequence
  derived and/or modified sequence
atggcccggctgtggggcgccctgagcctgtggcccctgtgggccgctgtgccctggggcggcgctgctgctgtgggcgtgcgggcctgcagcagcacagctgccccagatggagtggagggccctgccctgcggcgcagctactggaggcacctgcggcggctggtgctgggccccccagagccccccttcagccacgtgtgccaggtgggggaccctgtgctgcggggcgtggccgcccctgtggagcgggcccagctgggcggccctgagctgcagaggctgacccagaggctggtgcaggtgatgagaagaagaagatgtgtgggcctgagcgccccccagctgggcgtgccccggcaggtgctggccctggagctgcctgaggccctgtgccgggagtgccccccccggcagagggccctgcggcagatggagcccttccccctgcgggtgtttgtgaaccccagcctgcgggtgctggacagccggctggtgaccttccctgagggctgtgagagcgtggccggcttcctggcctgtgtgccccgcttccaggccgtgcagatcagcggcctggaccccaacggggagcaggtggtgtggcaggccagcggctgggccgcccgcatcatccagcacgagatggaccacctgcagggctgcctcttcatcgacaagatggacagcaggaccttcaccaacgtgtactggatgaaggtgaatgactag

SEQ ID NO: 211861 - DNA, 732 bp, Artificial Sequence
  derived and/or modified sequence
atggcccggctgtggggcgccctgagcctgtggcccctgtgggccgcagtgccctggggaggagcagcagccgtaggggtcagggcttgcagctctaccgccgctcctgatggcgtggagggccccgctttaagacggagctactggagacatcttagaagattggtgctcggccctccagagcctccatttagtcacgtgtgtcaagtcggggacccggtcctgaggggagtagctgctccagtggagcgcgcccaactgggcgggccagaattgcaacgcttaactcagcgacttgtccaggtgatgagacggcggcgatgtgtagggctaagtgctcctcagctgggcgtccctcgccaggtgctcgctctagaacttcccgaggcgctgtgtcgtgaatgcccacccagacagcgagccctgagacagatggaaccatttcctctgcgtgtattcgtgaacccatctcttcgcgttctggatagtagattagttactttccccgagggatgcgaaagcgtcgcaggatttcttgcatgcgtcccaagatttcaggccgtgcagatttccgggctggatcccaatggcgagcaagtggtttggcaagcatctggatgggccgccaggattatccagcatgagatggaccatctccagggctgtttgtttatagacaaaatggacagcagaacttttacgaacgtatattggatgaaggtaaacgactag

SEQ ID NO: 211862 - DNA, 1158 bp, Artificial Sequence
  derived and/or modified sequence
ccgggtcactgttaagggggccgccatggcccggctgtggggcgcgctgagtctttggccactgtgggcggccgtgccgtggggcggggcggcagccgtcggtgtccgggcttgcagctccacggccgccccggacggcgtcgagggcccggcgctgcggcgctcctattggcgccacctgaggcgtctggtgctgggtcctcccgaaccgccgttctcgcacgtgtgccaagtcggggacccggtgctgcgcggcgtggcggccccggtggagcgggcgcagctaggcgggcccgagctgcagcggctgacgcaacggctggtccaggtgatgcggcggcggcgctgcgtgggcctaagcgcgccgcagctgggggtgccgcggcaggtgctggcgctggagctccccgaggcgctgtgtcgggagtgcccgccccgccagcgcgcgctccgccaaatggagcccttccccctgcgcgtgttcgtgaaccccagcctgcgagtgcttgacagccgcctggtcacctttcccgagggctgcgagagcgtcgccggcttcctggcctgcgtgccccgcttccaggcggtgcagatctcagggctggaccccaatggagaacaggtggtgtggcaggcgagcgggtgggcagcccgcatcatccagcacgagatggaccacctgcagggctgcctgtttattgacaaaatggacagcaggacgttcacaaacgtctattggatgaaggtgaatgactaaagctttgctactggggctgaggattccggataccaagacgcaaacactttcactttgagctgggcaaatcttacttggcatcaacttggatggctcgcatatgacaggaaactggattgccaaggcatggcagactgagctggaggaagatgtcagaaatgtttgccctgaaatcagttacggacaaaatgttggctacaacttgaggagaaaaatcacccccaaaggagtggacatttcctaacaattctgtatggaggaaggtggggtaattgcattcgtctgcagtagacacgagttcctcggacctgtataatctcccaaagccaaggtttggtaataatgtagtccccaaatacctgaaagctgtctttaaaaatgcaggtaagcatgtgactggc

SEQ ID NO: 211863 - DNA, 732 bp, Artificial Sequence
  derived and/or modified sequence
atggcacgcctgtggggtgcgctgtcactatggcccttgtgggctgcagtcccttggggtggtgccgcagccgtgggagtccgtgcctgttccagtacggcagctcccgacggagtcgaagggccagctctgcgacggagctattggcgccatctcaggaggctggttctgggcccacccgagccacccttttcacatgtgtgccaggtcggagatcccgtcctgcgcggagtcgccgcaccagtggagcgtgcccagctgggaggtccagagctgcaaagacttacccaacgccttgttcaggttatgcgcagaaggagatgtgtaggactgtctgctccgcagctaggtgtgccccgtcaggttttagctcttgaactgccagaggccctgtgccgtgaatgcccacccagacaacgggctcttcggcaaatggagccctttcctctgcgggtctttgtcaatccatcactgcgagtgctcgatagccgactcgtcaccttcccggagggatgcgagtccgttgccggatttcttgcttgtgtccctcgctttcaggccgtgcagatttctggactcgatccaaatggagagcaggttgtgtggcaggcgtcaggttgggctgcaagaataatccagcatgaaatggaccacctccaaggttgtctatttattgacaaaatggacagccgaacattcacaaatgtgtattggatgaaggtcaacgattag

SEQ ID NO: 211864 - DNA, 732 bp, Artificial Sequence
  derived and/or modified sequence
atggccagactgtggggcgccctgagcctgtggcccctgtgggccgccgtgccctggggcggcgccgccgccgtgggcgtgagagcctgcagcagcaccgccgcccccgacggcgtggagggccccgccctgagaagaagctactggagacacctgagaagactggtgctgggcccccccgagccccccttcagccacgtgtgccaggtgggcgaccccgtgctgagaggcgtggccgcccccgtggagagagcccagctgggcggccccgagctgcagagactgacccagagactggtgcaggtgatgagaagaagaagatgcgtgggcctgagcgccccccagctgggcgtgcccagacaggtgctggccctggagctgcccgaggccctgtgcagagagtgcccccccagacagagagccctgagacagatggagcccttccccctgagagtgttcgtgaaccccagcctgagagtgctggacagcagactggtgaccttccccgagggctgcgagagcgtggccggcttcctggcctgcgtgcccagattccaggccgtgcagatcagcggcctggaccccaacggcgagcaggtggtgtggcaggccagcggctgggccgccagaatcatccagcacgagatggaccacctgcagggctgcctgttcatcgacaagatggacagcagaaccttcaccaacgtgtactggatgaaggtgaacgactag

SEQ ID NO: 211865 - protein, 567 aa, Artificial Sequence
  derived and/or modified sequence
MEFFTMPPRTWFMRQLQRMWFLRPSMAIMVFRMIEERPTHAITVRVSYLEIYNESLFDLLSTLPYVGPSVTPMTIVENPQGVFIKGLSVHLTSQEEDAFSLLFEGETNRIIASHTMNKNSSRSHCIFTIYLEAHSRTLSEEKYITSKINLVDLAGSERLGKSGSEGQVLKEATYINKSLSFLEQAIIALGDQKRDHIPFRQCKLTHALKDSLGGNCNMVLVTNIYGEAAQLEETLSSLRFASRMKLVTTEPAINEKYDAERMVKNLEKELALLKQELAIHDSLTNRTFVTYDPMDEIQIAEINSQVRRYLEGTLDEIDIISLRQIKEVFNQFRVVLSQQEQEVESTLRRKYTLIDRNDFAAISAIQKAGLVDVDGHLVGEPEGQNFGLGVAPFSTKPGKKAKSKKTFKEPLRPDTPPSKPVAFEEFKNEQGSEINRIFKENKSILNERRKRASETTQHINAIKREIDVTKEALNFQKSLREKQGKYENKGLMIIDEEEFLLILKLKDLKKQYRSEYQDLRDLRAEIQYCQHLVDQCRHRLLMGATVGKNLTSGTMSPLSSLRTCRWH

SEQ ID NO: 211866 - protein, 725 aa, Artificial Sequence
  derived and/or modified sequence
MGTRKKVHAFVRVKPTDDFAHEMIRYGDDKRSIDIHLKKDIRRGVVNNQQTDWSFKLDGVLHDASQDLVYETVAKDVVSQALDGYNGTIMCYGQTGAGKTYTMMGATENYKHRGILPRALQQVFRMIEERPTHAITVRVSYLEIYNESLFDLLSTLPYVGPSVTPMTIVENPQGVFIKGLSVHLTSQEEDAFSLLFEGETNRIIASHTMNKNSSRSHCIFTIYLEAHSRTLSEEKYITSKINLVDLAGSERLGKSGSEGQVLKEATYINKSLSFLEQAIIALGDQKRDHIPFRQCKLTHALKDSLGGNCNMVLVTNIYGEAAQLEETLSSLRFASRMKLVTTEPAINEKYDAERMVKNLEKELALLKQELAIHDSLTNRTFVTYDPMDEIQIAEINSQVRRYLEGTLDEIDIISLRQIKEVFNQFRVVLSQQEQEVESTLRRKYTLIDRNDFAAISAIQKAGLVDVDGHLVGEPEGQNFGLGVAPFSTKPGKKAKSKKTFKEPLRPDTPPSKPVAFEEFKNEQGSEINRIFKENKSILNERRKRASETTQHINAIKREIDVTKEALNFQKSLREKQGKYENKGLMIIDEEEFLLILKLKDLKKQYRSEYQDLRDLRAEIQYCQHLVDQCRHRLLMEFDIWYNESFVIPEDMQMALKPGGSIRPGMVPVNRIVSLGEDDQDKFSQLQQRVLPEGPDSISFYNAKVKIEQKHNYLKTMMGLQQAHRK

SEQ ID NO: 211867 - DNA, 1704 bp, Artificial Sequence
  derived and/or modified sequence
atggagttcttcaccatgccccccagaacctggttcatgagacagctgcagagaatgtggttcctgagacccagcatggccatcatggtgttcagaatgatcgaggagagacccacccacgccatcaccgtgagagtgagctacctggagatctacaacgagagcctgttcgacctgctgagcaccctgccctacgtgggccccagcgtgacccccatgaccatcgtggagaacccccagggcgtgttcatcaagggcctgagcgtgcacctgaccagccaggaggaggacgccttcagcctgctgttcgagggcgagaccaacagaatcatcgccagccacaccatgaacaagaacagcagcagaagccactgcatcttcaccatctacctggaggcccacagcagaaccctgagcgaggagaagtacatcaccagcaagatcaacctggtggacctggccggcagcgagagactgggcaagagcggcagcgagggccaggtgctgaaggaggccacctacatcaacaagagcctgagcttcctggagcaggccatcatcgccctgggcgaccagaagagagaccacatccccttcagacagtgcaagctgacccacgccctgaaggacagcctgggcggcaactgcaacatggtgctggtgaccaacatctacggcgaggccgcccagctggaggagaccctgagcagcctgagattcgccagcagaatgaagctggtgaccaccgagcccgccatcaacgagaagtacgacgccgagagaatggtgaagaacctggagaaggagctggccctgctgaagcaggagctggccatccacgacagcctgaccaacagaaccttcgtgacctacgaccccatggacgagatccagatcgccgagatcaacagccaggtgagaagatacctggagggcaccctggacgagatcgacatcatcagcctgagacagatcaaggaggtgttcaaccagttcagagtggtgctgagccagcaggagcaggaggtggagagcaccctgagaagaaagtacaccctgatcgacagaaacgacttcgccgccatcagcgccatccagaaggccggcctggtggacgtggacggccacctggtgggcgagcccgagggccagaacttcggcctgggcgtggcccccttcagcaccaagcccggcaagaaggccaagagcaagaagaccttcaaggagcccctgagacccgacaccccccccagcaagcccgtggccttcgaggagttcaagaacgagcagggcagcgagatcaacagaatcttcaaggagaacaagagcatcctgaacgagagaagaaagagagccagcgagaccacccagcacatcaacgccatcaagagagagatcgacgtgaccaaggaggccctgaacttccagaagagcctgagagagaagcagggcaagtacgagaacaagggcctgatgatcatcgacgaggaggagttcctgctgatcctgaagctgaaggacctgaagaagcagtacagaagcgagtaccaggacctgagagacctgagagccgagatccagtactgccagcacctggtggaccagtgcagacacagactgctgatgggcgccaccgtgggcaagaacctgaccagcggcaccatgagccccctgagcagcctgagaacctgcagatggcactag

SEQ ID NO: 211868 - DNA, 1002 bp, Artificial Sequence
  derived and/or modified sequence
atgggcaccagaaagaaggtgcacgccttcgtgagagtgaagcccaccgacgacttcgcccacgagatgatcagatacggcgacgacaagagaagcatcgacatccacctgaagaaggacatcagaagaggcgtggtgaacaaccagcagaccgactggagcttcaagctggacggcgtgctgcacgacgccagccaggacctggtgtacgagaccgtggccaaggacgtggtgagccaggccctggacggctacaacggcaccatcatgtgctacggccagaccggcgccggcaagacctacaccatgatgggcgccaccgagaactacaagcacagaggcatcctgcccagagccctgcagcaggtgttcagaatgatcgaggagagacccacccacgccatcaccgtgagagtgagctacctggagatctacaacgagagcctgttcgacctgctgagcaccctgccctacgtgggccccagcgtgacccccatgaccatcgtggagaacccccagggcgtgttcatcaagggcctgagcgtgcacctgaccagccaggaggaggacgccttcagcctgctgttcgagggcgagaccaacagaatcatcgccagccacaccatgaacaagaacagcagcagaagccactgcatcttcaccatctacctggaggcccacagcagaaccctgagcgaggagaagtacatcaccagcaagatcaacctggtggacctggccggcagcgagagactgggcaagagcggcagcgagggccaggtgctgaaggaggccacctacatcaacaagagcctgagcttcctggagcaggccatcatcgccctgggcgaccagaagagagaccacatccccttcagacagtgcaagctgacccacgccctgaaggacagcctgggcggcaactgcaacatggtgctggtgaccaacatctacggcgaggccgcccagctggaggagaccggcagcagactgtggctgtag

SEQ ID NO: 211869 - DNA, 2178 bp, Artificial Sequence
  derived and/or modified sequence
atgggcaccagaaagaaggtgcacgccttcgtgagagtgaagcccaccgacgacttcgcccacgagatgatcagatacggcgacgacaagagaagcatcgacatccacctgaagaaggacatcagaagaggcgtggtgaacaaccagcagaccgactggagcttcaagctggacggcgtgctgcacgacgccagccaggacctggtgtacgagaccgtggccaaggacgtggtgagccaggccctggacggctacaacggcaccatcatgtgctacggccagaccggcgccggcaagacctacaccatgatgggcgccaccgagaactacaagcacagaggcatcctgcccagagccctgcagcaggtgttcagaatgatcgaggagagacccacccacgccatcaccgtgagagtgagctacctggagatctacaacgagagcctgttcgacctgctgagcaccctgccctacgtgggccccagcgtgacccccatgaccatcgtggagaacccccagggcgtgttcatcaagggcctgagcgtgcacctgaccagccaggaggaggacgccttcagcctgctgttcgagggcgagaccaacagaatcatcgccagccacaccatgaacaagaacagcagcagaagccactgcatcttcaccatctacctggaggcccacagcagaaccctgagcgaggagaagtacatcaccagcaagatcaacctggtggacctggccggcagcgagagactgggcaagagcggcagcgagggccaggtgctgaaggaggccacctacatcaacaagagcctgagcttcctggagcaggccatcatcgccctgggcgaccagaagagagaccacatccccttcagacagtgcaagctgacccacgccctgaaggacagcctgggcggcaactgcaacatggtgctggtgaccaacatctacggcgaggccgcccagctggaggagaccctgagcagcctgagattcgccagcagaatgaagctggtgaccaccgagcccgccatcaacgagaagtacgacgccgagagaatggtgaagaacctggagaaggagctggccctgctgaagcaggagctggccatccacgacagcctgaccaacagaaccttcgtgacctacgaccccatggacgagatccagatcgccgagatcaacagccaggtgagaagatacctggagggcaccctggacgagatcgacatcatcagcctgagacagatcaaggaggtgttcaaccagttcagagtggtgctgagccagcaggagcaggaggtggagagcaccctgagaagaaagtacaccctgatcgacagaaacgacttcgccgccatcagcgccatccagaaggccggcctggtggacgtggacggccacctggtgggcgagcccgagggccagaacttcggcctgggcgtggcccccttcagcaccaagcccggcaagaaggccaagagcaagaagaccttcaaggagcccctgagacccgacaccccccccagcaagcccgtggccttcgaggagttcaagaacgagcagggcagcgagatcaacagaatcttcaaggagaacaagagcatcctgaacgagagaagaaagagagccagcgagaccacccagcacatcaacgccatcaagagagagatcgacgtgaccaaggaggccctgaacttccagaagagcctgagagagaagcagggcaagtacgagaacaagggcctgatgatcatcgacgaggaggagttcctgctgatcctgaagctgaaggacctgaagaagcagtacagaagcgagtaccaggacctgagagacctgagagccgagatccagtactgccagcacctggtggaccagtgcagacacagactgctgatggagttcgacatctggtacaacgagagcttcgtgatccccgaggacatgcagatggccctgaagcccggcggcagcatcagacccggcatggtgcccgtgaacagaatcgtgagcctgggcgaggacgaccaggacaagttcagccagctgcagcagagagtgctgcccgagggccccgacagcatcagcttctacaacgccaaggtgaagatcgagcagaagcacaactacctgaagaccatgatgggcctgcagcaggcccacagaaagtag

SEQ ID NO: 211870 - DNA, 2143 bp, Artificial Sequence
  derived and/or modified sequence
gttgccatggcgactatgtacacagccaggcagccccgcgtggggagtgcaggtggtttcggttgcggcagtcgcgtcccgggagcgtcgctgcctggtgaacgctagaatgggtactaggaaaaaagttcatgcatttgtccgtgtcaaacccaccgatgactttgctcatgaaatgatcagatacggagatgacaaaagaagcattgatattcacttaaaaaaagacattcggagaggagttgtcaataaccaacagacagactggtcgtttaagttggatggagttcttcacgatgcctcccaggacttggtttatgagacagttgcaaaggatgtggtttctcaggccctcgatggctataatggtttttaggatgatcgaagaacgccccacacatgccatcactgtgcgtgtttcctacttggaaatctataatgagagcctgtttgatctcctgtccactctgccctatgttggaccctcagtcacaccaatgaccatcgtggaaaaccctcaaggagtcttcattaagggcttgtcagttcacctcacaagtcaggaggaggatgcattcagcctcctttttgagggtgagaccaacaggattatagcctcccacactatgaacaaaaactcttccagatcacactgcattttcaccatctacttagaggcccattcccggaccttatcagaggaaaagtacatcacttccaaaattaacttggtggatctggcaggctcagagaggctggggaagtctgggtctgagggccaagtcctgaaggaagccacctacatcaacaaatcgctctcattcctggagcaggccatcattgcccttggggaccagaagcgggaccacatcccctttcggcagtgcaagctcacccacgctctgaaggactcgttagggggaaactgcaatatggtcctcgtgacaaacatctatggagaagctgcccagttagaagaaacgctatcttcactgagatttgccagcaggatgaagctagtcaccactgagcctgccatcaatgaaaagtatgatgctgagagaatggtcaagaacctggagaaggaactagcactactcaagcaggagctggctatccatgacagcctgaccaaccgcacctttgtgacctatgaccccatggatgaaatccagattgctgagatcaactcccaggtgcggaggtacctggaggggacactggacgagatcgacataatcagccttagacagatcaaggaggtgttcaaccagttccgggtggttctgagccaacaggaacaggaagtggagtccactttgcgcaggaagtacaccctcattgacaggaatgactttgcagccatttctgctatccagaaggcggggcttgtggatgttgatggccacctagtgggtgagcctgaaggacaaaactttggactcggagtcgcccctttctctaccaaacctgggaagaaagccaagtccaagaagacattcaaagagccactcaggcccgacaccccaccctccaaaccagtggcctttgaggagtttaagaatgagcaaggtagtgagatcaaccgaattttcaaagaaaacaaatccatcttgaatgaacggaggaaaagggccagcgagaccacacagcacatcaatgccatcaagcgggagattgatgtgaccaaggaggccctgaatttccagaagtcactacgggagaagcaaggcaagtacgaaaacaaggggctgatgatcatcgatgaggaagaattcctgctgatcctcaagctcaaagacctcaagaagcagtaccgcagcgagtaccaggacctgcgtgacctcagggctgagatccagtattgccagcacctagtggatcagtgtcgccaccgcctgctcatgggtgcgacagttgggaagaatttgacatctggtacaatgagtcctttgtcatccctgaggacatgcagatggcactgaagccaggcggcagcatccggccaggcatggtccctgtgaacaggattgtgtctctgggagaagatgaccaggacaaattcagccagctgcagcagagggtgcttcctgagggccctgattccatctccttctacaatgccaaagtcaagatagagcag

SEQ ID NO: 211871 - DNA, 1704 bp, Artificial Sequence
  derived and/or modified sequence
atggaattcttcacaatgccaccccggacatggttcatgcgccaactgcagcgaatgtggttcctccgtccaagcatggcaatcatggtctttcgcatgatcgaagaaaggccaacccacgcaatcactgtacgggtctcatacttagaaatatataatgaaagcctcttcgatctgctgagtacacttccttatgtgggtcccagtgtaaccccgatgacgatcgttgaaaacccccagggggtgtttattaaaggcctgagtgtccatctgacttctcaggaagaagatgcattttcactcctctttgaaggggagaccaatcgtataattgcttctcataccatgaacaaaaatagctccagatcgcactgcatattcaccatttacctggaagcccactctcggacgctgagtgaggaaaagtacattacctccaagattaacctagtggacttggctggctctgaacgcttaggaaagtctggaagcgagggccaggtcctgaaggaagccacttacatcaacaagagtctgtcttttctggagcaggctataattgctctgggcgaccagaaacgggatcacatcccatttcgtcaatgcaagctgacccacgctctcaaagactccttaggaggaaattgtaacatggtgttagtgacgaacatttatggtgaggcagcgcagctcgaggagactctcagcagtctgagatttgcgtccaggatgaagttggtcactactgaaccagccataaatgagaaatatgacgccgagaggatggttaaaaacctagagaaagagctcgctctacttaagcaggaactggctatccacgactcactaaccaaccggacattcgttacctatgacccaatggatgagatccagattgccgagatcaactcccaggtgcggagatatcttgaggggactctggacgagatcgatataatttcactgaggcaaatcaaggaagtttttaaccagttccgtgtggtcttgagccaacaggagcaggaggtcgaaagtacactgaggagaaagtatacacttatagataggaatgacttcgccgctatttctgccatccagaaggcgggtcttgttgacgtggatgggcacctcgtgggagagcccgagggacaaaatttcgggttgggtgtggcccccttctccacaaaacccggcaaaaaggcgaagtcaaaaaaaacctttaaggagccactccgtcccgacactcctccatcaaagcccgtcgcattcgaagagttcaaaaacgaacaaggaagcgaaataaatagaatctttaaggaaaataagtctatccttaatgaacgtcggaaaagggcctctgaaacaacacagcatattaatgctattaaacgggagatcgatgtgactaaggaggcacttaatttccagaaatctcttcgcgagaaacagggcaaatatgagaataaaggtctgatgattatcgatgaggaggagttcttgcttatcctgaaactgaaggacctgaagaagcaatataggagtgagtaccaggatttgcgagacctccgagccgagattcagtactgccaacacttggtggatcagtgtcggcatcgactcctgatgggagctacagtcggaaagaacctgaccagcggtacaatgtccccactctctagcttgcgtacctgccgctggcactag

SEQ ID NO: 211872 - DNA, 1002 bp, Artificial Sequence
  derived and/or modified sequence
atgggcacacggaaaaaggtgcacgcctttgtgcgcgttaaacctaccgatgatttcgcacacgaaatgattcgctacggcgacgacaaaaggtccattgatattcatttgaagaaagatatccgccgcggggtagtcaacaatcagcagactgactggtccttcaaactggacggagttctgcatgacgctagtcaggacttagtttacgaaactgtagccaaggacgtggtcagccaggctcttgacggctacaatggcactattatgtgctacggccagaccggcgccggcaaaacatataccatgatgggggccacagagaactacaagcaccgcggaatattgcctcgggccttgcagcaggtttttcgaatgatcgaagaacgacccacccacgcgattactgtccgagtttcctatttggagatatataatgaatccctgtttgatctgttaagtaccttgccatacgtgggaccctcggttacccccatgacaattgttgaaaacccacagggcgtatttataaaggggttatctgtgcacctgacaagtcaggaagaggatgccttctctctgttatttgaaggcgaaaccaaccgcatcatcgcgagccacaccatgaataaaaattcctcaaggagccattgcatctttaccatttacctggaagcccacagcagaaccttgtcagaagagaagtatataaccagtaaaatcaatctggtggatctcgcaggttccgaacggctgggcaagtcgggatccgaggggcaggttctcaaggaggccacttatattaataagtccctgagttttctggagcaggccatcattgccctgggggatcagaagagagatcatataccatttcgtcagtgtaaattgacacacgctttgaaagactcactggggggcaattgtaacatggtccttgttaccaatatctatggggaagccgctcagttagaggagaccggtagcagactgtggctgtag

SEQ ID NO: 211873 - DNA, 2178 bp, Artificial Sequence
  derived and/or modified sequence
atgggcactcggaaaaaggtgcacgcattcgtgagagtcaaacctaccgacgattttgctcatgagatgattaggtacggtgacgacaagagatcaatcgatatacatctgaagaaagacataaggcggggagtcgtaaataatcaacagaccgattggagctttaagcttgacggggtgcttcatgacgcgtcccaagacttggtttacgaaaccgtcgccaaggacgtcgtgtcacaggcactggatggttacaacggaaccatcatgtgttatggacagacaggggccggaaagacctatacaatgatgggagcaactgaaaattacaaacatcgaggaattctgcctcgcgcgctacagcaggtcttcagaatgatagaagagcgtcctacccacgcgatcaccgtcagagtgtcctacttggaaatctataacgagtctctctttgacctgctgtccacgttgccatacgtggggcccagcgtgacccccatgacaatcgttgagaatccccagggtgtgttcatcaaagggctgagcgtgcacctcacttcccaggaagaagatgcgtttagtcttcttttcgaaggagagaccaaccggataatcgctagccataccatgaataaaaacagctcccgctcccattgtatttttacaatctacttggaggcacactccaggactctaagtgaggagaagtatattacctcaaagatcaacctcgtagacctggccgggagtgaacggttgggcaaaagcggatcagaggggcaagtgctgaaggaagcaacttatatcaataaatctctgtcttttctagaacaagctattatcgccctgggggatcagaagagggatcatattccttttcgtcagtgtaaactgacccacgccctgaaagactcgcttggggggaattgtaatatggtgctcgtgacgaatatttatggagaggcagcccagctggaggagacgttgtcgagcctgcggttcgcaagcagaatgaaactggtgacgacagaacccgcaattaacgagaagtacgatgcagagaggatggtcaaaaatctggagaaagagctggcactgttaaagcaagaattggctattcatgatagtctgacaaaccgaacctttgtgacttatgatcctatggatgagattcaaatcgctgagatcaattcacaggtgagaagatacttggagggcactctcgatgagattgatatcatttcattgcggcagatcaaagaggtcttcaaccaattccgagtcgtcctgtcccagcaggaacaggaagtggagtccactttaaggcggaaatatacacttatagaccgtaacgatttcgcagccatcagcgcgatccaaaaggccgggctggtggatgtggacgggcacttagtgggcgagccagaaggccagaactttggactgggcgtggcgccattttccaccaagccaggcaagaaggcgaaaagcaaaaagacgtttaaggagccactgaggccagacacccctcctagcaagcccgtggcctttgaggaattcaaaaacgagcaggggtctgaaattaatagaatctttaaagagaataagagcatactgaacgaaagaaggaaacgggcctccgaaaccactcaacacattaacgctattaaaagagaaattgacgtgacaaaggaggccctcaacttccagaagtctctgcgggagaaacaaggtaagtacgagaataagggcctcatgattatcgacgaagaagagtttttactaattctgaagctcaaagacctgaaaaagcagtacaggagcgaatatcaggatctccgggacttgcgggcagagattcaatactgtcaacatctcgtagaccaatgtcgacatagactactcatggagttcgacatctggtacaacgagtcttttgttattcccgaagatatgcagatggccctgaaaccaggcggatccatccgaccaggcatggtcccagtcaacagaatcgtgtcacttggtgaggacgaccaagataagtttagccaactccagcagcgggtgcttcctgaggggcctgacagtatcagcttctacaatgcgaaagttaaaatcgagcaaaagcataattatttgaagaccatgatgggactccagcaagcccaccgaaagtag

SEQ ID NO: 211874 - DNA, 1704 bp, Artificial Sequence
  derived and/or modified sequence
atggagttcttcaccatgccacccaggacctggttcatgaggcagctgcagaggatgtggttcctgcggcccagcatggccatcatggtgttcaggatgattgaggagcggcccacccacgccatcaccgtgcgggtgtcctacctggagatctacaatgaaagcctgtttgacctgctgagcaccctgccctacgtgggccccagcgtgacccccatgaccatcgtggagaacccccagggcgtcttcatcaagggcctgtctgtgcacctgaccagccaggaggaggatgccttcagcctgctgtttgaaggagagaccaaccgcatcatcgccagccacaccatgaacaagaacagcagccgcagccactgcatcttcaccatctacctggaggcccacagcaggaccctgtctgaggagaagtacatcaccagcaagatcaacctggtggacctggccggcagcgagcggctgggcaagagcggcagcgagggccaggtgctgaaggaggccacctacatcaacaagagcctgtccttcctggagcaggccatcatcgccctgggggaccagaagagggaccacatccccttccggcagtgcaagctgacccacgccctgaaggacagcctgggcggcaactgcaacatggtgctggtgaccaacatctatggagaggccgcccagctggaggagaccctgagcagcctgcgctttgccagcaggatgaagctggtgaccacagagcccgccatcaatgagaagtatgatgctgagaggatggtgaagaacctggagaaggagctggccctgctgaagcaggagctggccatccatgacagcctgaccaacagaacatttgtgacctatgaccccatggatgagatccagattgctgagatcaacagccaggtgcggcgctacctggagggcaccctggatgaaattgacatcatcagcctgcggcagatcaaggaggtgttcaaccagttccgggtggtgctgagccagcaggagcaggaggtggagagcaccctgcggaggaagtacaccctgattgacagaaatgactttgctgccatcagcgccatccagaaggccggcctggtggatgtggatggccacctggtgggggagcctgagggccagaactttggcctgggcgtggcccccttcagcaccaagccaggcaagaaggccaagagcaagaagaccttcaaggagcccctgcggccagacaccccacccagcaagcctgtggcctttgaggagttcaagaatgagcagggcagcgagatcaaccgcatcttcaaggagaacaagagcatcctgaatgaaagaaggaagagggccagcgagaccacccagcacatcaatgccatcaagcgggagattgatgtgaccaaggaggccctgaacttccagaagagcctgcgggagaagcagggcaagtatgaaaataaaggcctgatgatcattgatgaggaggagttcctgctgatcctgaagctgaaggacctgaagaagcagtacagaagtgagtaccaggacctgcgggacctgcgggcagagatccagtactgccagcacctggtggaccagtgccgccaccggctgctgatgggcgccaccgtgggcaagaacctgaccagcggcaccatgagccccctgagcagcctgcggacctgccgctggcactag

SEQ ID NO: 211875 - DNA, 1002 bp, Artificial Sequence
  derived and/or modified sequence
atgggcaccaggaagaaggtgcacgcctttgtgcgggtgaagcccacagatgactttgcccacgagatgatccgctatggagatgacaagaggagcattgacatccacctgaagaaggacatccggcggggcgtggtgaacaaccagcagacagactggagcttcaagctggatggagtgctgcatgatgccagccaggacctggtgtatgagaccgtggccaaggatgtggtgtcccaggccctggatggctacaacggcaccatcatgtgctacggccagacaggagctgggaagacctacaccatgatgggcgccacagagaactacaagcaccggggcatcctgccccgggccctgcagcaggtgttcaggatgattgaggagcggcccacccacgccatcaccgtgcgggtgtcctacctggagatctacaatgaaagcctgtttgacctgctgagcaccctgccctacgtgggccccagcgtgacccccatgaccatcgtggagaacccccagggcgtcttcatcaagggcctgtctgtgcacctgaccagccaggaggaggatgccttcagcctgctgtttgaaggagagaccaaccgcatcatcgccagccacaccatgaacaagaacagcagccgcagccactgcatcttcaccatctacctggaggcccacagcaggaccctgtctgaggagaagtacatcaccagcaagatcaacctggtggacctggccggcagcgagcggctgggcaagagcggcagcgagggccaggtgctgaaggaggccacctacatcaacaagagcctgtccttcctggagcaggccatcatcgccctgggggaccagaagagggaccacatccccttccggcagtgcaagctgacccacgccctgaaggacagcctgggcggcaactgcaacatggtgctggtgaccaacatctacggggaggccgcccagctggaggagaccggcagccggctgtggctgtag

SEQ ID NO: 211876 - DNA, 2178 bp, Artificial Sequence
  derived and/or modified sequence
atgggcaccaggaagaaggtgcacgcctttgtgcgggtgaagcccacagatgactttgcccacgagatgatccgctatggagatgacaagaggagcattgacatccacctgaagaaggacatccggcggggcgtggtgaacaaccagcagacagactggagcttcaagctggatggagtgctgcatgatgccagccaggacctggtgtatgagaccgtggccaaggatgtggtgtcccaggccctggatggctacaacggcaccatcatgtgctacggccagacaggagctgggaagacctacaccatgatgggcgccacagagaactacaagcaccggggcatcctgccccgggccctgcagcaggtgttcaggatgattgaggagcggcccacccacgccatcaccgtgcgggtgtcctacctggagatctacaatgaaagcctgtttgacctgctgagcaccctgccctacgtgggccccagcgtgacccccatgaccatcgtggagaacccccagggcgtcttcatcaagggcctgtctgtgcacctgaccagccaggaggaggatgccttcagcctgctgtttgaaggagagaccaaccgcatcatcgccagccacaccatgaacaagaacagcagccgcagccactgcatcttcaccatctacctggaggcccacagcaggaccctgtctgaggagaagtacatcaccagcaagatcaacctggtggacctggccggcagcgagcggctgggcaagagcggcagcgagggccaggtgctgaaggaggccacctacatcaacaagagcctgtccttcctggagcaggccatcatcgccctgggggaccagaagagggaccacatccccttccggcagtgcaagctgacccacgccctgaaggacagcctgggcggcaactgcaacatggtgctggtgaccaacatctacggggaggccgcccagctggaggagaccctgagcagcctgcgctttgccagcaggatgaagctggtgaccacagagcccgccatcaatgagaagtatgatgctgagaggatggtgaagaacctggagaaggagctggccctgctgaagcaggagctggccatccatgacagcctgaccaacagaacatttgtgacctatgaccccatggatgagatccagattgctgagatcaacagccaggtgcggcgctacctggagggcaccctggatgaaattgacatcatcagcctgcggcagatcaaggaggtgttcaaccagttccgggtggtgctgagccagcaggagcaggaggtggagagcaccctgcggaggaagtacaccctgattgacagaaatgactttgctgccatcagcgccatccagaaggccggcctggtggatgtggatggccacctggtgggggagcctgagggccagaactttggcctgggcgtggcccccttcagcaccaagccaggcaagaaggccaagagcaagaagaccttcaaggagcccctgcggccagacaccccacccagcaagcctgtggcctttgaggagttcaagaatgagcagggcagcgagatcaaccgcatcttcaaggagaacaagagcatcctgaatgaaagaaggaagagggccagcgagaccacccagcacatcaatgccatcaagcgggagattgatgtgaccaaggaggccctgaacttccagaagagcctgcgggagaagcagggcaagtatgagaacaagggcctgatgatcattgatgaggaggagttcctgctgatcctgaagctgaaggacctgaagaagcagtacagaagtgagtaccaggacctgcgggacctgcgggcagagatccagtactgccagcacctggtggaccagtgccgccaccggctgctgatggagtttgacatctggtacaatgaaagctttgtgattcctgaggacatgcagatggccctgaagccaggcggcagcatccggcccggcatggtgcctgtgaacagaattgtgtccctgggggaggatgaccaggacaagttcagccagctgcagcagagggtgctgcctgagggccctgacagcatctccttctacaatgccaaggtgaagattgagcagaagcacaactacctgaagaccatgatgggcctgcagcaggcccacaggaagtag

SEQ ID NO: 211877 - DNA, 1704 bp, Artificial Sequence
  derived and/or modified sequence
atggagttcttcaccatgcccccccggacctggttcatgcggcagctacagcgcatgtggttccttaggccgagcatggctatcatggtgtttcgtatgatagaggagcgccccactcacgctattaccgtcagagtgtcataccttgaaatttacaacgagagcctgttcgacttactgtccactttaccctacgtggggccttctgtcacacccatgactatcgtcgagaaccctcagggagtcttcattaaggggctaagtgtgcatttgacgtctcaggaggaagacgccttttcattactgttcgagggtgaaaccaatcggatcatcgcctctcataccatgaataaaaactcaagccggtcacattgtattttcactatatatcttgaggcccactcacgtactctatccgaggagaaatacatcacgtccaagataaacctggtggatctcgctggatctgagaggctcggcaaatctggaagcgagggacaggttcttaaagaagcgacgtatatcaacaagtccctgtcctttctggagcaggccattattgcactgggagaccagaaacgggaccatatacccttccggcagtgcaagctcacccacgcccttaaggacagccttggcgggaactgtaatatggtcctggttactaatatctacggcgaggcagcgcagctggaggagactctgtcctccctgaggttcgcctcccgaatgaaattagtcacgactgagcccgccatcaatgaaaagtatgatgcggagcgaatggtcaagaacctcgagaaagagctggccctgctgaaacaagagttagcaatacacgatagccttacgaaccgaacattcgtcacgtatgaccccatggatgaaattcagattgctgaaatcaacagtcaggtccggcggtacctcgaggggaccctggacgagatcgatatcattagcttacgccaaataaaggaggtatttaaccagtttcgggtggtgctctcacaacaagagcaggaagtcgagtctaccctgagacggaagtatacattaatcgatagaaacgactttgcagctattagtgccatccaaaaggctggactcgtggacgtcgacggacacttggtaggcgagcctgaggggcagaattttggtttaggagtggcgccctttagtaccaaacccggcaaaaaggctaagtcgaaaaaaaccttcaaggagcccctgaggcccgacaccccgccgtccaaacccgtggcttttgaggagttcaagaacgagcaaggttccgagatcaatcggatattcaaagagaacaagtctattctgaacgaaaggcggaaacgcgctagtgaaacaacccagcatatcaatgcaattaagcgggagatagacgttaccaaggaggcattaaacttccaaaagagtctgagagagaaacagggcaagtatgagaacaaaggactcatgattattgacgaggaggaattcctgttgatacttaagttgaaagacctgaagaagcaatatcgatccgagtatcaggatctgagggacctgcgcgcagagattcagtattgtcagcaccttgtggaccagtgcaggcaccggctgctgatgggtgcaaccgttggtaagaatcttacgtcaggtacaatgtctccactttcttccctccgaacatgcaggtggcactag

SEQ ID NO: 211878 - DNA, 1002 bp, Artificial Sequence
  derived and/or modified sequence
atgggcacccggaagaaggtgcacgccttcgtgcgggtgaagcccactgatgatttcgcacacgaaatgattaggtatggggacgacaagcggagtatcgatatccacctaaagaaggatatccgtagaggagtcgtcaacaatcagcagacggactggtcctttaaactggacggagtccttcacgacgcctcacaggacttagtgtacgaaactgtggctaaggacgtagtgtcccaggcactcgatggatataacggaacgatcatgtgctatggtcagaccggggccggaaagacctacactatgatgggggccacagagaattacaaacatcggggaatcttacctagggcgctgcagcaggtctttagaatgattgaggaaaggcccacccacgccatcactgtgcgagtcagctatcttgaaatatacaacgagtcacttttcgacctgcttagcaccctcccatacgtcggcccgtccgtaacacctatgacaatagtagaaaaccctcagggggtcttcataaaggggctgtctgtgcatctcacaagtcaagaggaggatgctttcagtctgctattcgagggcgaaaccaacaggattattgcgtctcataccatgaacaagaatagtagcagaagccattgtatcttcaccatatacttagaagcccacagtaggacactcagcgaggaaaaatacataacatctaaaattaaccttgttgatctcgctgggtccgagcggcttggcaagtcaggctccgagggacaagtcctgaaggaggccacgtatataaacaagtctctctccttcctggaacaagccatcatcgccttaggcgatcagaagcgagatcacattcctttccgacaatgcaagttgacacacgcccttaaggacagtctgggtggaaactgtaatatggtactggtcaccaacatttatggggaggctgcccaactcgaagagactgggtcacgcctctggctttag

SEQ ID NO: 211879 - DNA, 2178 bp, Artificial Sequence
  derived and/or modified sequence
atgggcacccggaagaaggtgcacgccttcgtgcgggtgaagcccactgacgactttgcccacgaaatgattaggtacggggacgacaagcggagtatcgatatacacctaaagaaagatattagacggggggttgtgaataatcagcagacggattggagcttcaaactggatggggtcctgcatgacgcaagccaagatctggtatacgaaactgtggcaaaggacgtggtttctcaggctttggatggatataacggaaccatcatgtgctacggccagacaggcgccgggaaaacctatacgatgatgggcgcaacagagaactataaacatagaggaatcctcccgagggcccttcagcaggtcttccggatgatcgaggagcgaccaactcatgccattaccgtgagggtgagctatttagagatatataatgaaagccttttcgacctgctttccaccctgccctatgtcggtccatcagtgacccctatgactatagtcgaaaatccacagggtgtgtttatcaagggattatccgtgcacttgactagtcaggaagaggacgccttttctctgctttttgaaggcgagaccaaccgtattatcgcaagccataccatgaataagaattcctctcgctctcactgtatctttacgatctacctcgaagcccactcaaggacactgagcgaggaaaagtatattacctccaagatcaatctcgtcgatctggccggatctgagcggctgggcaagagcggctctgaagggcaagtacttaaggaggccacttacataaacaaaagcctctccttcctggaacaagcgatcatcgccctgggcgaccagaagagggaccacatcccatttcggcagtgcaaactcactcatgccctgaaggactctctcggaggcaactgcaacatggtcctggttaccaatatttatggagaggccgctcagctcgaagagaccctctcctccctgcggttcgcgtctcgcatgaagctggtgaccacggaaccggctatcaacgaaaagtacgacgccgaacggatggtgaaaaatctggaaaaagagctagccttacttaaacaggagctggccatccacgattcactgacgaacaggacatttgtaacatatgacccaatggacgagattcaaatcgccgaaattaattctcaggtcagaaggtacctcgaaggtaccttggatgagattgatattatcagcttgcgacaaatcaaagaagtgttcaaccaattccgggtggtgcttagtcaacaagagcaggaggtcgaaagcactctgcggcgaaagtatacattgatagatagaaatgacttcgctgcgatctccgccatccagaaagctggcctcgtcgacgtcgatggccaccttgttggggagccagagggacagaattttgggttaggcgtggcccctttcagtaccaagccagggaaaaaagctaaatccaaaaaaactttcaaggagcccttgaggcccgatacgccaccatctaaaccagtcgccttcgaggagttcaagaacgagcaggggtcagaaataaaccggatttttaaggaaaacaaatctatcctgaatgagagacgcaagagggctagtgaaaccacccagcatatcaatgctatcaaacgggaaatcgatgtaacaaaggaggcccttaacttccagaaaagcctgcgcgaaaagcagggcaaatacgagaacaagggcctgatgatcatcgatgaggaggagttcctgctcatcctgaagctgaaggacctaaaaaagcaataccggtccgaataccaagatttgagggacttaagggctgaaatccagtattgtcagcacctggtggaccaatgcaggcacaggctcttgatggagttcgatatatggtataatgagtcatttgttattcccgaggacatgcaaatggcgctgaaaccgggcgggagcattaggcctggtatggtgcccgtgaataggatcgttagcttgggagaagacgatcaggacaaattttcccaactgcagcaacgcgtcctgcccgagggccctgacagcatatccttctacaatgcaaaggttaagattgaacaaaagcacaattatctgaagacgatgatgggcttacagcaggcgcacagaaaatag

SEQ ID NO: 211880 - DNA, 1704 bp, Artificial Sequence
  derived and/or modified sequence
atggagtttttcaccatgccaccaagaacctggtttatgcggcaactgcaaaggatgtggttcctccgcccaagtatggccataatggtgtttagaatgatagaagaacggccaacacatgctatcaccgtacgcgtgtcttacctggagatctataatgaatctctgttcgatctcttaagcaccttaccgtatgtggggccatcggtaacccctatgacaatagtggaaaatccccaaggcgtgttcataaaggggctctccgtccacctgacatcccaggaggaagacgcatttagcctgctcttcgagggagagactaacagaatcatcgcctcccataccatgaacaagaactctagccgctcccactgcatcttcacaatatacctcgaagcccattcacggacattgtccgaagaaaaatacattactagtaaaattaacctcgtggatctggccggtagcgaaagattaggaaaaagtggctctgaagggcaggtcctcaaggaagcaacatacatcaataaatccctatcttttctcgagcaggcaatcatcgctctgggtgaccagaaacgggaccacattccattcagacagtgtaagctgactcacgctctgaaagactccctgggcggtaactgcaacatggtgctagtgaccaatatttatggagaagccgcacagctggaggagacactgtctagtctccgctttgcgagccgcatgaagttagttactactgagccagccattaacgaaaagtacgacgcggaacggatggtgaaaaacttggagaaagagctcgctctcctgaagcaggaacttgctatacatgactcactgaccaatcgaacctttgtcacctatgaccctatggacgagatccagattgctgagataaatagtcaggttaggagatatctcgagggcacactggatgagatcgacatcatcagcctgagacagatcaaggaagtctttaaccagttcagagtcgtcctgtcacagcaggaacaggaggtggaatcaacgctccgcaggaaatataccttgatcgatcggaatgatttcgctgccatctcagcaatacaaaaggccggtctagttgacgtcgatggacatcttgtaggcgaacctgaggggcagaacttcggactgggcgtagcgccattctctacaaagccaggcaaaaaagccaaaagtaagaagaccttcaaggagcccctgcggccagacaccccacccagcaagccagtggccttcgaggagttcaaaaacgagcagggcagcgagattaaccggatctttaaggagaacaagtccattctgaacgaaaggcgaaagagggccagcgagaccacccagcacataaatgcgattaagagagaaattgatgtgactaaagaggcgttaaactttcagaagagcctcagggagaaacagggaaaatatgagaataagggcttgatgataattgatgaggaagaattcttgctgattttgaaattaaaagaccttaagaagcagtatagaagcgagtatcaagaccttcgagatctgagggctgaaatccagtactgtcaacacctcgtagaccagtgtcgtcatcggctactgatgggcgctactgttggaaaaaacctgacctccggtacgatgtctcccctgtctagccttaggacatgccgatggcactag

SEQ ID NO: 211881 - DNA, 1002 bp, Artificial Sequence
  derived and/or modified sequence
atgggaacgcggaaaaaggtgcatgcatttgtgcgggttaagccgacagacgactttgctcatgaaatgataagatacggagatgacaaacgcagtattgatatccacctcaaaaaggatatcaggaggggcgttgtcaacaaccagcagaccgattggtcatttaaactggatggtgtgctgcatgacgcctctcaggacttggtgtatgagaccgtggcgaaggatgtagtgagtcaggcactggatggatataacgggacaatcatgtgttacggacagacgggtgcaggaaagacttataccatgatgggggcaactgaaaattacaagcacaggggtattctgcctcgcgcactgcagcaagtgttccggatgatcgaagagagacccacgcacgctataacagtaagagtttcttatctggagatttacaatgagagcctgttcgacctgcttagcaccctcccctatgttggtcctagcgtgacaccgatgactattgtggagaatcctcagggcgtcttcattaagggactgagcgtgcacttgacttcacaagaagaggacgccttctcgttgctctttgagggcgaaacaaatcgaatcattgcgagtcatactatgaataaaaacagctccaggtcacattgcatctttaccatttacctggaggctcactcacggacgctgtccgaagagaaatacatcacctcaaaaattaacctcgtggatctcgccggttctgagcgcctcgggaaaagtggctcagaaggtcaggtgctcaaggaagctacatatattaataagtctctgtcctttttggagcaggcaatcatcgcgctcggggatcagaaacgcgatcacataccttttcgccagtgtaaattgacccacgccctgaaggatagcctcggagggaactgcaatatggtgctagtcactaacatttacggcgaagcggctcagcttgaggaaactggctctcgtctctggttgtag

SEQ ID NO: 211882 - DNA, 2178 bp, Artificial Sequence
  derived and/or modified sequence
atgggcactcgtaagaaggttcatgcatttgtccgcgtgaagcccaccgatgattttgcccacgagatgattcgctacggtgacgataagcggtccatcgacatccatttgaaaaaggatatcaggaggggtgtagtcaataatcagcagaccgattggtcattcaaactcgacggagtcctgcacgatgctagtcaggacctggtttatgaaaccgtggcaaaggacgttgtcagtcaggcactcgacggatacaatggcacaatcatgtgctatggtcagaccggcgctggtaagacatataccatgatgggagctacagagaactacaaacatcgcggaatattaccgagagccctccagcaggtttttcgcatgatcgaggaacggcctacccacgctataactgtccgagttagctacctggagatttacaatgagtctttgtttgatctcctgtccacgctgccatacgtgggcccatctgtgactccaatgaccattgtggagaaccctcagggagtgtttataaaaggattgtctgttcacttgaccagtcaggaagaagatgctttttctctcctttttgaaggcgaaactaatcgcattatcgctagccataccatgaacaaaaactcctccaggtcccattgcatatttaccatctacctcgaagctcactcaaggaccctgtcagaggagaaatacatcacttcaaagattaacctagtagatctggctggtagcgaaagactcggaaagtccggttctgaggggcaggtcctgaaagaggccacctacatcaataagtcactcagctttctcgaacaggcgatcatagccctgggtgaccagaagcgggatcatattcctttcaggcaatgtaagctcacccacgccctgaaagattcactggggggaaactgcaacatggtcctggtcacaaatatctatggggaagccgctcaattggaagagaccctctcctcactgaggtttgcatcccggatgaaactggtcactacggaacccgctattaacgagaaatacgacgctgagcgcatggtgaaaaacctggagaaagaactggccctacttaagcaagagttagccattcatgattctcttaccaatcgcaccttcgtgacttatgatccaatggatgaaatccagatcgcagagataaacagccaggttcggcgttacctcgaaggaacattggatgagatcgacattatcagcctaaggcagattaaggaggtttttaaccagttcagagtggtcctgtctcaacaagaacaggaagtggagagtaccttaaggcggaaatacacactgatcgacaggaatgacttcgccgctattagtgctattcagaaggccggtcttgtagacgttgatggccacctcgttggcgaacccgagggacagaactttggccttggggtcgcgccattttcaactaaacccggaaaaaaggccaagtctaagaaaacattcaaagaaccgctgcgacctgatacgcctccctccaaacctgtggcgttcgaggaatttaagaatgaacagggttccgaaatcaaccggattttcaaagaaaacaaaagtatacttaacgaaaggaggaaaagggcaagtgaaactacacaacacattaatgccatcaaacgagaaattgacgtcactaaggaggctttaaacttccaaaagagcctgagggagaagcagggtaagtatgagaacaagggcctcatgataattgatgaggaagaatttctgctcattctcaagctgaaagacttgaaaaaacagtaccgttccgagtatcaggatctccgcgacctacgagctgaaatacagtactgccaacacttagtggatcagtgtaggcaccgattactgatggagttcgacatctggtataatgaaagctttgtgatcccggaagacatgcagatggcgcttaagccaggcggatccattcgaccaggtatggtgcctgtgaacaggattgtgagcctcggtgaggatgaccaggacaagttctcacagctgcagcagagggttttgcccgaaggccctgattctataagtttctataatgccaaagtcaaaattgaacaaaaacataattacttaaaaaccatgatgggacttcagcaagcacaccgcaagtag

SEQ ID NO: 211883 - protein, 154 aa, Artificial Sequence
  derived and/or modified sequence
MGKSASKQFHNEVLKAHNEYRQKHGVPPLKLCKNLNREAQQYSEALASTRILKHSPESSRGQCGENLAWASYDQTGKEVADRWYSEIKNYNFQQPGFTSGTGHFTAMVWKNTKKMGVGKASASDGSSFVVARYFPAGNVVNEGFFEENVLPPKK

SEQ ID NO: 211884 - DNA, 2272 bp, Artificial Sequence
  derived and/or modified sequence
agtgcagcgcagccgcggggagcgaggagcgcgcggagccggccatgggcaagtcagaatctctacagagcctccagcggtagaggcctggcctccagaaggaacttcgagaacccagtgcagccccacctaggacacctataccctccaccccagcagagacagcccagccccttccctcagccctggggagccaggcccagggcttttagcagctctgacctttattttaagtcccaagtctggccccctggtaacctgcactctgcagtccctgatatccccctggggtccctcagccagaaattccatgggatttgacttggcccaggagacatgggagatctggctatgagaaaagggactaggactccctgttgcatcatctcctcagtctcgggtgaaaggcagcagagtagaagaaaggcaccagtgaagcttccaaacagtttcataatgaggtcctgaaggcccacaatgagtaccggcagaagcacggcgtccccccactgaagctctgcaagaacctcaaccgggaggctcaacagtattctgaggccctggccagcacgaggatcctcaagcacagcccggagtccagccgtggccagtgtggggagaaccttgcatgggcatcctatgatcagacaggaaaggaggtggctgatagatggtacagtgaaatcaagaactataacttccagcagcctggcttcacctcggggactggacacttcacggccatggtatggaagaacaccaagaagatgggcgtggggaaggcgtccgcaagtgacgggtcctcctttgtggtggccagatacttcccagcggggaatgttgtcaatgagggcttcttcgaagaaaacgtcctgccgccgaagaagtaacttgttaaatgtaatgggaaggtggcagacttaagaacgtggatatgaagtgcctagaaccaccacaacctggctgtgcgtctgtccctgtgggtgtatgtgcttgtgtgtgtgatgcatgtgagcgtctctggcacacacacttggacatacagttctgtgtgcgctcattcttattacaggagtgagcaaaggaagcatttaccccgatggttacctagaccacgattatttggattggggggaggggggatccgttttttttttttaattttttgttatttctaagcaaacctcttttgtacttttcttacttctaatatccatccctggactttttgtattccaaatgtttgtgatgctgagaagtgaagttcattttatgtgatcttcatgcgtcgtaatctacttttggtagataattaagattattaaaccctcatttaaatgtgacataaaatacagctttaagcacataaatacaaagcagcttccatcaggaacatggagcaggcagggactccattttacagaattactgagatttctcagttgtaaaacatgatgtcatcctgcatgcctcctggaattctccaatggggtcgccaaacaacaaatggagaaaaaaagttttacttccttgcattcttctacctttaaatagcaaagtaccactaccaccaccacctcttgcccccttccctcttttcttaaacttctggcatttcagagctcagcaggctacccctggtttctggagagttgggctaggcctgaagctccccctcccccacctctgctaggcagcccaggcctggtctgggagacagcccctcaccctgcctgggctcttggccaagcggccttggatggatgaagtcagagaggtggggtgagggtgagcttactcagggcccccagaggaagccctcagcctctgccctccccccacacagggcgggagcccaggcctgttcctggcagctgtggctgcagctgtgctcctgctccctcctggaatgtgcgacaagcccaaatgttccggggaggcggccggggcagggggcttagaagtgctaatatggttctgtgttttgcctgaaacgataccaggttcccctgaatagcaactttacaaggtccatgtgggagggaccaacccagatgccctgctgagtgtccctgaaaccatggcagctccatctgtcaagatggcaggggccggagtgagggggctgctggcttaacagcaggcatctgggcaggccagtcctcaaagcagctcctgaaggtctgtgttgcactgtcaccagtctcaagctatgcctctaatttcaccagggatattgactaagaagacaataaaatctttttctttgtgt

SEQ ID NO: 211885 - DNA, 465 bp, Artificial Sequence
  derived and/or modified sequence
atggggaagtcagctagcaagcagttccacaacgaagtcctgaaggcgcataatgagtacagacagaagcacggcgttccgcctctcaagctgtgcaagaatcttaatcgtgaagcacagcagtatagcgaagccctggcttctacccggattttgaaacactcccctgagagctcacggggtcaatgcggagagaacttagcatgggctagctacgaccagacaggcaaagaggtggcagacaggtggtactcagagatcaagaactacaattttcagcagcctggctttacctctggaactgggcacttcacggctatggtgtggaagaacacgaagaaaatgggagtgggcaaagctagcgcatcggatggatcgagcttcgtcgtggcccgttattttcccgcagggaacgtagtaaatgaaggattttttgaagaaaacgtcctcccacccaagaagtag

SEQ ID NO: 211886 - DNA, 465 bp, Artificial Sequence
  derived and/or modified sequence
atgggaaaatcagcaagtaagcagttccacaatgaggtgctgaaagcccacaatgaataccgccaaaaacacggtgtccctcccctaaagctttgtaagaacctcaatcgcgaggctcagcaatactccgaagcactcgcttctacaaggatcctaaaacattcccccgaatcttcgcgcggacagtgtggcgaaaatcttgcttgggcctcctatgaccaaactggaaaggaggtggctgatagatggtattccgagatcaaaaattataacttccaacagccagggttcacctccggaactggtcacttcaccgccatggtttggaagaatacaaaaaagatgggtgttggcaaggcgtcagcctccgatggcagttcctttgtagttgccaggtactttcctgctgggaatgtcgttaacgagggcttttttgaggagaacgtcctgcccccgaaaaaatag

SEQ ID NO: 211887 - DNA, 465 bp, Artificial Sequence
  derived and/or modified sequence
atgggtaaatccgcttccaagcagttccataacgaggtgttaaaagcacacaatgagtatcggcagaaacatggggtccccccgctgaaactttgcaagaaccttaatagagaagcccaacagtacagtgaagccttagcatccactagaatcctgaaacacagccccgaaagtagcaggggccaatgtggggaaaacttggcctgggcctcatacgatcagaccggcaaagaggtggcagaccgatggtactctgaaataaaaaattataacttccagcagcccggtttcaccagcggcaccggccacttcaccgcaatggtctggaaaaacactaagaaaatgggagttggcaaagcgagcgcctccgacggtagcagcttcgtcgttgctaggtacttccctgcaggcaatgtagtcaatgaaggatttttcgaagaaaacgttctgccccccaaaaagtag

SEQ ID NO: 211888 - DNA, 465 bp, Artificial Sequence
  derived and/or modified sequence
atgggcaagagcgccagcaagcagttccacaacgaggtgctgaaggcccacaacgagtacagacagaagcacggcgtgccccccctgaagctgtgcaagaacctgaacagagaggcccagcagtacagcgaggccctggccagcaccagaatcctgaagcacagccccgagagcagcagaggccagtgcggcgagaacctggcctgggccagctacgaccagaccggcaaggaggtggccgacagatggtacagcgagatcaagaactacaacttccagcagcccggcttcaccagcggcaccggccacttcaccgccatggtgtggaagaacaccaagaagatgggcgtgggcaaggccagcgccagcgacggcagcagcttcgtggtggccagatacttccccgccggcaacgtggtgaacgagggcttcttcgaggagaacgtgctgccccccaagaagtag

SEQ ID NO: 211889 - DNA, 465 bp, Artificial Sequence
  derived and/or modified sequence
atgggcaaaagcgcttccaagcagtttcacaatgaagtgctgaaggctcacaatgagtatcgacagaaacacggagtgcctcccctcaagctctgcaagaatctgaatcgggaggctcagcagtattctgaagcactggcctccaccagaatattaaaacattctccagagtcctctagagggcaatgcggggaaaaccttgcctgggcatcttacgatcagacaggcaaggaggtagcagatagatggtactccgaaattaaaaattacaacttccagcagcccggtttcacatccggcaccggtcatttcaccgccatggtgtggaagaacacaaaaaaaatgggagttgggaaggctagtgcttccgatggctcatcattcgtggtggcccgctactttccggccggcaatgtggtcaatgaaggcttcttcgaagagaacgttcttcctccaaagaagtag

SEQ ID NO: 211890 - DNA, 465 bp, Artificial Sequence
  derived and/or modified sequence
atgggcaagagcgccagcaagcagttccacaatgaggtgctgaaggcccacaatgagtaccggcagaagcacggcgtgccccccctgaagctgtgcaagaacctgaaccgggaggcccagcagtacagcgaggccctggccagcacccgcatcctgaagcacagccctgagagcagccggggccagtgtggggagaacctggcctgggccagctatgaccagacaggcaaggaggtggccgaccgctggtacagcgagatcaagaactacaacttccagcagcccggcttcaccagcggcaccggccacttcaccgccatggtgtggaagaacaccaagaagatgggcgtgggcaaggccagcgccagtgatggcagcagctttgtggtggcccgctacttccctgctggaaatgtggtgaatgaaggcttctttgaagaaaatgtgctgccccccaagaagtag

SEQ ID NO: 211891 - DNA, 1890 bp, Artificial Sequence
  derived and/or modified sequence
agccgcggggagcgaggagcgcgcggagccggccatgggcaagtcagcttccaaacagtttcataatgaggtcctgaaggcccacaatgagtaccggcagaagcacggcgtccccccactgaagctctgcaagaacctcaaccgggaggctcaacagtattctgaggccctggccagcacgaggatcctcaagcacagcccggagtccagccgtggccagtgtggggagaaccttgcatgggcatcctatgatcagacaggaaaggaggtggctgatagatggtacagtgaaatcaagaactataacttccagcagcctggcttcacctcggggactggacacttcacggccatggtatggaagaacaccaagaagatgggcgtggggaaggcgtccgcaagtgacgggtcctcctttgtggtggccagatacttcccagcggggaatgttgtcaatgagggcttcttcgaagaaaacgtcctgccgccgaagaagtaacttgttaaatgtaatgggaaggtggcagacttaagaacgtggatatgaagtgcctagaaccaccacaacctggctgtgcgtctgtccctgtgggtgtatgtgcttgtgtgtgtgatgcatgtgagcgtctctggcacacacacttggacatacagttctgtgtgcgctcattcttattacaggagtgagcaaaggaagcatttaccccgatggttacctagaccacgattatttggattggggggaggggggatccgttttttttttttaattttttgttatttctaagcaaacctcttttgtacttttcttacttctaatatccatccctggactttttgtattccaaatgtttgtgatgctgagaagtgaagttcattttatgtgatcttcatgcgtcgtaatctacttttggtagataattaagattattaaaccctcatttaaatgtgacataaaatacagctttaagcacataaatacaaagcagcttccatcaggaacatggagcaggcagggactccattttacagaattactgagatttctcagttgtaaaacatgatgtcatcctgcatgcctcctggaattctccaatggggtcgccaaacaacaaatggagaaaaaaagttttacttccttgcattcttctacctttaaatagcaaagtaccactaccaccaccacctcttgcccccttccctcttttcttaaacttctggcatttcagagctcagcaggctacccctggtttctggagagttgggctaggcctgaagctccccctcccccacctctgctaggcagcccaggcctggtctgggagacagcccctcaccctgcctgggctcttggccaagcggccttggatggatgaagtcagagaggtggggtgagggtgagcttactcagggcccccagaggaagccctcagcctctgccctccccccacacagggcgggagcccaggcctgttcctggcagctgtggctgcagctgtgctcctgctccctcctggaatgtgcgacaagcccaaatgttccggggaggcggccggggcagggggcttagaagtgctaatatggttctgtgttttgcctgaaacgataccaggttcccctgaatagcaactttacaaggtccatgtgggagggaccaacccagatgccctgctgagtgtccctgaaaccatggcagctccatctgtcaagatggcaggggccggagtgagggggctgctggcttaacagcaggcatctgggcaggccagtcctcaaagcagctcctgaaggtctgtgttgcactgtcaccagtctcaagctatgcctctaatttcaccagggatattgactaagaagacaataaaatctttttctttgtgtaataacctc

SEQ ID NO: 211892 - DNA, 465 bp, Artificial Sequence
  derived and/or modified sequence
atgggcaagagcgccagcaagcagttccacaacgaggtgctgaaggcccacaatgagtaccggcagaaacacggggtccctcctctcaaactgtgcaaaaacctgaacagggaggctcagcaatactccgaagccctggcctcgacccgcatactgaaacacagtcctgaatcctcaaggggccaatgcggcgaaaatctggcttgggcttcctacgaccaaaccgggaaagaggttgctgatcggtggtactctgaaataaaaaactataactttcagcaacccgggttcacttctggaacgggacactttacggcaatggtttggaagaatacgaagaaaatgggcgtagggaaggctagcgcttccgacgggtcatcattcgtcgttgcccgatactttcccgccggaaatgtggtcaacgaagggttcttcgaagagaacgtgctgccgccaaaaaagtag

SEQ ID NO: 211893 - RNA, 465 nt, Artificial Sequence
  derived and/or modified sequence
augggaaaaucagcaaguaagcaguuccacaaugaggugcugaaagcccacaaugaauaccgccaaaaacacggugucccuccccuaaagcuuuguaagaaccucaaucgcgaggcucagcaauacuccgaagcacucgcuucuacaaggauccuaaaacauucccccgaaucuucgcgcggacaguguggcgaaaaucuugcuugggccuccuaugaccaaacuggaaaggagguggcugauagaugguauuccgagaucaaaaauuauaacuuccaacagccaggguucaccuccggaacuggucacuucaccgccaugguuuggaagaauacaaaaaagauggguguuggcaaggcgucagccuccgauggcaguuccuuuguaguugccagguacuuuccugcugggaaugucguuaacgagggcuuuuuugaggagaacguccugcccccgaaaaaauag

SEQ ID NO: 211894 - RNA, 465 nt, Artificial Sequence
  derived and/or modified sequence
auggguaaauccgcuuccaagcaguuccauaacgagguguuaaaagcacacaaugaguaucggcagaaacaugggguccccccgcugaaacuuugcaagaaccuuaauagagaagcccaacaguacagugaagccuuagcauccacuagaauccugaaacacagccccgaaaguagcaggggccaauguggggaaaacuuggccugggccucauacgaucagaccggcaaagagguggcagaccgaugguacucugaaauaaaaaauuauaacuuccagcagcccgguuucaccagcggcaccggccacuucaccgcaauggucuggaaaaacacuaagaaaaugggaguuggcaaagcgagcgccuccgacgguagcagcuucgucguugcuagguacuucccugcaggcaauguagucaaugaaggauuuuucgaagaaaacguucugccccccaaaaaguag

SEQ ID NO: 211895 - protein, 1015 aa, Artificial Sequence
  derived and/or modified sequence
MGAERRLLSIKEAFRLAQQPHQNQAKLVVALSRTYRTMDDKTVFHEEFIHYLKYVMVVYKREPAVERVIEFAAKFVTSFHQSDMEDDEEEEDGGLLNYLFTFLLKSHEANSNAVRFRVCLLINKLLGSMPENAQIDDDVFDKINKAMLIRLKDKIPNVRIQAVLALSRLQDPKDDECPVVNAYATLIENDSNPEVRRAVLSCIAPSAKTLPKIVGRTKDVKEAVRKLAYQVLAEKVHMRAMSIAQRVMLLQQGLNDRSDAVKQAMQKHLLQGWLRFSEGNILELLHRLDVENSSEVAVSVLNALFSITPLSELVGLCKNNDGRKLIPVETLTPEIALYWCALCEYLKSKGDEGEEFLEQILPEPVVYADYLLSYIQSIPVVNEEHRGDFSYIGNLMTKEFIGQQLILIIKSLDTSEEGGRKKLLAVLQEILILPTIPISLVSFLVERLLHIIIDDNKRTQIVTEIISEIRAPIVTVGVNNDPADVRKKELKMAEIKVKLIEAKEALENCITLQDFNRASELKEEIKALEDARINLLKETEQLEIKEVHIEKNDAETLQKCLILCYELLKQMSISTGLSATMNGIIESLILPGIISIHPVVRNLAVLCLGCCGLQNQDFARKHFVLLLQVLQIDDVTIKISALKAIFDQLMTFGIEPFKTKKIKTLHCEGTEINSDDEQESKEVEETATAKNVLKLLSDFLDSEVSELRTGAAEGLAKLMFSGLLVSSRILSRLILLWYNPVTEEDVQLRHCLGVFFPVFAYASRTNQECFEEAFLPTLQTLANAPASSPLAEIDITNVAELLVDLTRPSGLNPQAKTSQDYQALTVHDNLAMKICNEILTSPCSPEIRVYTKALSSLELSSHLAKDLLVLLNEILEQVKDRTCLRALEKIKIQLEKGNKEFGDQAEAAQDATLTTTTFQNEDEKNKEVYMTPLRGVKATQASKSTQLKTNRGQRKVTVSARTNRRCQTAEADSESDHEVPEPESEMKMRLPRRAKTAALEKSKLNLAQFLNEDLS

SEQ ID NO: 211896 - DNA, 3048 bp, Artificial Sequence
  derived and/or modified sequence
atgggagcggagaggcggctgctaagtattaaagaagcttttaggctggcccaacagccacatcaaaaccaggctaaattagtcgtggcacttagccggacatacagaactatggatgataagacagtgtttcacgaagagttcattcactatctgaaatacgttatggtggtgtataagagagagccggccgtggaacgggtgatcgaatttgcagctaaattcgtcacaagcttccatcagagtgacatggaagacgatgaagaggaggaggacggggggctcctgaattatctgtttacattcctgctgaaatcccacgaagccaatagcaacgccgttcggttcagagtgtgcctcctcattaacaagctgctaggctccatgccagaaaatgcccagattgacgacgatgtgttcgataaaattaataaagccatgcttattcgcctcaaggataagatccctaacgtcaggatccaagccgtccttgcgttatccagactgcaggaccccaaagatgatgaatgcccagtggtgaatgcctatgcaacattaatcgagaacgattccaaccctgaggttagacgtgccgtgctctcctgtatcgctcctagtgctaagacactcccgaagatagtgggcaggaccaaggatgtcaaagaagccgtgcgtaaactcgcataccaagttctggctgaaaaagttcacatgcgggccatgtctattgcccagagggtcatgctactgcaacagggcctgaatgaccggagtgatgcggtcaaacaggcgatgcaaaagcacctgctgcagggctggctgaggtttagcgaaggcaacatcttggagctgctgcacagactggatgtcgaaaacagttccgaagtggcagtgtctgtgttaaatgcactgttttccattactcctttaagtgaattagtgggattgtgtaagaacaacgatggccgtaagcttattccagtggagaccctgactcccgaaatcgccctctactggtgtgcactttgcgagtatcttaagtctaaaggcgatgaaggggaagagtttctggagcagattctgcctgagcccgtggtctacgccgattacctcctgtcttacatccagtcaatccccgtggtcaatgaggaacaccggggcgacttctcttatattgggaatttgatgaccaaagagttcataggacagcagttgatcctcatcataaagagccttgacacttccgaagagggggggagaaaaaaactgctggccgtgcttcaagaaattctgatcttgcctaccatccccattagcctggtgtctttcctggtagagcgtcttctgcatatcattattgacgataataagcgcacccaaattgttaccgagatcatctccgaaatacgggcccccatagtaacagtgggggtcaataatgatcctgcagacgtaagaaagaaagaattgaaaatggcagaaattaaagtgaagctgatcgaagccaaggaggctttggaaaactgcataaccctgcaggacttcaatagggctagcgaacttaaagaagagatcaaagccctggaagacgccagaataaatctgctaaaagaaaccgagcaattggagataaaagaggtccatatcgagaaaaacgatgcagagactctgcagaaatgcttaatactgtgttacgagctattgaagcagatgtccatctcaacaggcttgagcgccactatgaacggcattatagagagtctgattttaccagggattattagcatccatccggtagtgcgcaaccttgccgtcttgtgcctcggatgctgtggtctgcagaaccaggacttcgctcggaaacatttcgtccttttacttcaagttctgcagattgatgacgtgaccataaaaattagcgctttgaaagctatcttcgaccaactcatgactttcgggattgagcccttcaagaccaaaaagatcaagactcttcattgtgagggaaccgaaattaacagcgacgacgagcaggagtctaaggaggtagaggagacagcgaccgcaaaaaacgttttgaaactgctcagcgacttcttggacagtgaggtgtccgaactccgaaccggcgccgcagaagggctggccaagctgatgttctccggcctgctggtcagcagtagaatcctgagccgcctgattctgctgtggtacaatccagtgacagaggaagacgtgcagctgagacactgcctaggagtgtttttcccggtgtttgcttacgccagccgaacaaaccaagagtgctttgaggaggcattcttacctacactacagacattagctaatgcacccgccagttcccctctagcggagatcgatataaccaatgtcgcagagctgctcgtggaccttactaggccctcgggactcaatcctcaggcaaaaacctctcaggattatcaggccctaaccgtgcacgacaatctggccatgaaaatttgcaatgaaattcttacgagcccttgtagtcctgagattagggtgtacactaaggccctctcatccctggaattgtcttcccatctggcaaaagatctcctggttctgcttaacgagatcctggagcaggttaaggatcgcacatgcctccgggccctggagaagattaagattcagctggaaaagggaaataaggagttcggagaccaggccgaggccgcccaagatgcaactctgaccaccaccaccttccaaaacgaggatgagaagaataaagaggtttacatgacgccccttcggggagtgaaggctacccaagcttcaaagtccacccagctgaaaaccaacagaggtcagcgaaaggtgacggtttcggccagaacaaaccgacggtgtcagacagctgaggccgactctgaaagcgaccatgaggtgccagagccagagtccgagatgaaaatgaggctcccccggcgggctaaaaccgcagcattggagaaatccaagttaaacttagcccagttcttgaacgaggacctgagctag

SEQ ID NO: 211897 - DNA, 3048 bp, Artificial Sequence
  derived and/or modified sequence
atgggcgctgagcggcggctgctgagcatcaaggaggccttccggctggcccagcagccccaccagaaccaggccaagctggtggtggccctgagcaggacctaccgcaccatggatgacaagacagtgttccacgaggagttcatccactacctgaagtatgtgatggtggtgtacaagcgggagcctgctgtggagcgggtgattgaatttgctgccaagtttgtgaccagcttccaccagagcgacatggaggatgatgaggaggaggaggatggcggcctgctgaactacctgttcaccttcctgctgaagagccatgaggccaacagcaatgctgtgcgcttccgggtgtgcctgctgatcaacaagctgctgggctccatgccagaaaatgcccagattgatgatgatgtgtttgacaagatcaacaaggccatgctgatccggctgaaggacaagatccccaacgtgcgcatccaggccgtgctggccctgagccggctgcaggaccccaaggatgatgagtgccctgtggtgaatgcctatgccaccctgattgaaaatgacagcaaccctgaggtgcggcgggctgtgctgagctgcatcgcccccagcgccaagaccctgcccaagatcgtgggccgcaccaaggatgtgaaggaggccgtgaggaagctggcctaccaggtgctggccgagaaggtgcacatgagggccatgagcatcgcccagagggtgatgctgctgcagcagggcctgaatgacagaagtgatgctgtgaagcaggccatgcagaagcacctgctgcagggctggctgcgcttcagcgagggcaacatcctggagctgctgcaccggctggatgtggagaacagcagcgaggtggccgtgtctgtgctgaatgccctcttcagcatcacccccctgtctgagctggtgggcctgtgcaagaacaatgatggcaggaagctgatccctgtggagaccctgaccccagaaattgccctgtactggtgtgccctgtgtgagtacctgaagagcaaaggagatgaaggagaggagttcctggagcagatcctgcctgagcctgtggtgtatgctgactacctgctgagctacatccagagcatccctgtggtgaatgaggagcacagaggagacttctcctacatcggcaacctgatgaccaaggagttcatcggccagcagctgatcctgatcatcaagagcctggacaccagcgaggagggcggcaggaagaagctgctggccgtgctgcaggagatcctgatcctgcccaccatccccatcagcctggtgtccttcctggtggagcggctgctgcacatcatcattgatgacaacaagaggacccagatcgtgacagagatcatcagcgagatccgggcccccatcgtgacagtgggcgtgaacaatgaccctgcagatgtgaggaagaaggagctgaagatggccgagatcaaggtgaagctgattgaggccaaggaggccctggagaactgcatcaccctgcaggacttcaacagagccagcgagctgaaggaggagatcaaggccctggaggatgcccgcatcaacctgctgaaggagacagagcagctggagatcaaggaggtgcacatcgagaagaatgatgctgagaccctgcagaagtgcctgatcctgtgctatgagctgctgaagcagatgagcatcagcacaggcctgagcgccaccatgaatggcatcatcgagagcctcatcctgcccggcatcatcagcatccaccctgtggtgaggaacctggccgtgctgtgcctgggctgctgcggcctgcagaaccaggactttgccaggaagcactttgtgctgctgctgcaggtgctgcagattgatgatgtgaccatcaagatcagcgccctgaaggccatctttgaccagctgatgaccttcggcatcgagcccttcaagaccaagaagatcaagaccctgcactgtgagggcacagagatcaacagtgatgatgagcaggagagcaaggaggtggaggagacagccacagccaagaatgtgctgaagctgctgagtgacttcctggacagcgaggtgtctgagctgaggactggagctgctgagggcctggccaagctgatgttttctggcctgctggtgagcagccgcatcctgagccgcctcatcctgctgtggtacaaccctgtgacagaggaggatgtgcagctgcggcactgcctgggcgtcttcttccctgtgtttgcctatgccagcaggaccaaccaggagtgctttgaggaggccttcctgcccaccctgcagaccctggccaatgccccagccagcagccccctggccgagattgacatcaccaacgtggccgagctgctggtggacctgacccggcccagcggcctgaacccccaggccaagaccagccaggactaccaggccctgactgtgcatgacaacctggccatgaagatctgcaatgagatcctgaccagcccctgcagccctgagatccgggtgtacaccaaggccctgagcagcctggagctgagcagccacctggccaaggacctgctggtgctgctgaatgagatcctggagcaggtgaaggacaggacctgcctgcgggccctggagaagatcaagatccagctggagaagggcaacaaggagtttggagaccaggccgaggccgcccaggatgccaccctgaccaccaccaccttccagaatgaagatgagaagaacaaggaggtgtacatgacccccctgcggggcgtgaaggccacccaggccagcaagagcacccagctgaagaccaacagaggccagaggaaggtgacagtgtctgcccggaccaacagacgctgccagacagctgaggccgacagcgagagtgaccacgaggtgcctgagcctgagagcgagatgaagatgaggctgccccggcgggccaagacagctgccctggagaagagcaagctgaacctggcccagttcctgaatgaagacctgtcctag

SEQ ID NO: 211898 - DNA, 3048 bp, Artificial Sequence
  derived and/or modified sequence
atgggcgccgagcggcggctgctgagcatcaaggaggccttccggctggcacaacaacctcatcaaaaccaagcaaaacttgtggttgctctgtcaaggacctaccggactatggacgataagactgtgttccacgaagaatttattcattatctgaagtacgtgatggtggtgtacaaacgtgagcctgccgtggagcgcgtaatcgaatttgccgctaaatttgtcaccagttttcatcagagcgatatggaagacgacgaggaagaggaggatggcggattacttaactatcttttcacctttttgctgaagtcccatgaggctaattccaacgctgtgcgttttagagtgtgccttctgatcaataagttgctgggtagtatgccagagaatgcccagattgatgatgatgtctttgataaaattaacaaggcaatgctgattcggctcaaagacaagattcctaacgtgcgcattcaagcagtgctagctctgtcgagactgcaagatccaaaggacgatgaatgtccagttgtgaacgcctatgcaaccctgatcgaaaacgacagcaatcccgaagtgaggcgtgctgtcctgtcctgtatcgccccctctgccaaaaccctccctaaaatagtggggagaacaaaggacgtgaaggaagccgtcaggaaacttgcctatcaggttctagccgagaaagtgcatatgcgggccatgtccattgcccaacgggtgatgctactgcagcagggcctcaatgaccggagcgatgccgtgaagcaggcaatgcaaaaacacctgctgcaaggatggctacgttttagcgaaggtaatatcctggagctgcttcataggttagacgttgaaaattccagtgaagtggccgtgtccgtgcttaacgcccttttttcaattacccctctttctgaactggtggggctttgtaagaataatgatggccggaaactcatccctgtcgagactctcacacctgagatcgcgctgtactggtgtgccctgtgtgagtatttaaaaagtaagggagacgaaggtgaagagtttctggaacagatactccccgaacctgtcgtgtatgcagactatctcctatcatacattcagagtataccagtcgttaacgaggagcatcggggagatttttcgtatatcggaaatctcatgacaaaagaatttattggccaacagctcatcctgattatcaagagcctcgacacctctgaggagggaggccgcaaaaaactcctggccgtgctacaagaaattctgatcctcccgactattcccatatctttggtctccttcctggtggaacggctgctgcatatcatcatcgacgacaacaagaggacacagatcgtgactgagatcatttcggagattcgggcacctatcgttactgtcggcgttaacaacgatccagctgacgtgagaaagaaagaacttaagatggctgaaataaaagtcaagttgatcgaagccaaagaggcactggagaactgtattacactgcaggatttcaaccgcgcctccgaattgaaagaggaaataaaggctctggaagacgctcggatcaatctgctcaaggaaaccgagcagcttgagatcaaggaggttcacatcgagaagaacgacgcggagacactgcagaagtgtcttattctctgttatgaactcctgaagcaaatgtccattagcactggattaagtgcaactatgaacgggatcattgaatcattgatcctacccggcattatttcaatccaccctgtcgtgcggaacctggctgtgctttgcctcggatgttgcggccttcaaaatcaagatttcgcacggaaacactttgtgctcctcctgcaagtgctgcaaatcgacgatgttactattaaaatctccgctcttaaagccatcttcgaccaattgatgacatttggcattgaaccttttaagactaagaagataaagacgctccattgcgagggaactgaaattaatagcgacgatgagcaggaaagtaaagaggttgaggagacggccacggctaagaatgtcctgaagctactgagcgactttctggactccgaggtttcagagttgcggactggtgcagccgagggtctggcgaagctgatgttcagcggccttttggtgtcatccagaattctctcacggctcatcttgctctggtacaaccccgtgacagaagaggacgtgcagctccggcattgtttgggcgtgttcttccccgtgttcgcttatgccagcaggaccaatcaagagtgctttgaggaagcatttctgccaacccttcagaccttggccaacgcccccgcctcatctccactagcagaaattgacattacaaatgtggctgagttgttagtcgacctgacaaggccttccggcttgaacccccaagctaaaacctcacaagactaccaggcccttaccgtgcacgacaacctagccatgaaaatttgtaatgagatactgacttctccttgtagccccgaaattagggtgtatactaaggcgctgtcctccctcgagttgagtagtcatttggccaaagaccttctagttctcctgaacgagatcctcgagcaggtaaaagaccggacatgcctgcgtgcactggagaaaattaagattcaattggagaaagggaataaggagtttggcgaccaggctgaggccgctcaggacgcaacattgacaacaaccacctttcagaatgaggatgagaaaaacaaggaagtgtacatgaccccactgaggggcgtgaaagccactcaagccagcaagtccacccaactgaaaacaaaccgcgggcaaagaaaagtcaccgttagtgcccgcaccaatcgccggtgccagacggcagaggcagatagtgagtccgaccacgaggtgcctgagcccgagtccgagatgaagatgaggttacctagaagggccaagaccgcagcgctggagaaatctaaactgaacttggcacagtttctcaatgaggacctttcttag

SEQ ID NO: 211899 - DNA, 4661 bp, Artificial Sequence
  derived and/or modified sequence
cttacggcagtctcgcgggatttccccctctcgcgggaattatttgaacgttcgagcggtaaatactccctggggctgtcatagaagactactcggagagcgctgcctctgggttggcgggctggcaggctgtagccgagcgcgggcaggactcgtcccggcagggttccagagccatgggagcggaaaggaggctgctgtcgattaaggaggcctttcggctggcgcagcagccgcaccagaaccaggcgaagctggtggtggcgctgagccgcacctaccgcacgatggatgataagacagtttttcatgaggagttcattcattaccttaaatatgttatggtggtctataaacgtgaaccagctgtggagagggtaatagaatttgcagcaaagtttgttacctcatttcaccaatcagatatggaagatgatgaggaagaggaagatggtggccttttaaattatttgtttacttttctcttaaagtctcatgaagcaaacagcaatgcagtgagatttagagtgtgcctgctcataaacaagcttttgggaagtatgccagaaaatgctcagattgatgatgatgtgtttgataaaattaataaagccatgcttattagattgaaagataagattccaaatgtgagaatacaggcagttctggcgctttcacgacttcaggatcccaaggatgatgaatgcccagtggttaatgcatatgctactttgattgaaaatgattcaaatccagaagttagacgggcagtgttatcatgtattgcaccatcagcaaagactttgccaaaaattgtagggcgcaccaaggatgtgaaagaggctgtcagaaagctggcttatcaggttttagctgaaaaggttcatatgagagctatgtccattgctcagagagtaatgctccttcaacaaggtcttaatgacagatcagatgctgtgaaacaagctatgcagaagcatcttcttcaaggctggttacggttctctgaaggaaatatcttagagttgctccatcggttggatgtagaaaattcttctgaagtggcagtctctgttctcaatgccttgttttcaataactcctctcagtgaactggtgggactctgtaaaaacaatgatggcaggaaattgattccagtggaaacattaactcctgaaattgctttgtattggtgtgccctttgtgaatatttgaaatcaaaaggagatgaaggtgaagaatttttagagcagattttgccagagcctgtagtatatgcagactatttattgagttacatccagagcattccagttgttaatgaagaacacagaggtgatttttcctatattggaaatttgatgacaaaagaattcataggtcaacaattgattctaattattaagtctttggataccagtgaagaaggaggaagaaaaaaactgctggctgttttacaggagattcttattttacccacaatcccaatatccctggtttcttttcttgttgaaagactactccacatcattatagatgataataagagaacacaaattgttacagaaattatctcagagattcgggcgcccattgttactgttggtgttaataacgatccagctgatgtaagaaagaaagaactcaagatggctgaaataaaagttaagcttatcgaagccaaagaagctttggaaaattgcattaccttacaggattttaatcgggcatcagaattaaaagaagaaataaaagcattagaagatgccagaataaaccttttgaaagagacagagcaacttgaaattaaagaagtccacatagagaagaatgatgctgaaacattgcagaaatgtcttattttatgctatgaactgttgaagcagatgtccatttcaacaggcttaagtgcaaccatgaatggaatcatcgaatctttgattcttcctggaataataagtattcatcctgttgtaagaaacctggctgttttatgcttgggatgctgtggactacagaatcaggattttgcaaggaaacacttcgtattactattgcaggttttgcaaattgatgatgtcacaataaaaataagtgctttaaaggcaatctttgaccaactgatgacgttcgggattgaaccatttaaaactaaaaaaatcaaaacacttcattgtgaaggtacagaaataaacagtgatgatgagcaagaatcaaaagaagttgaagagactgctacagctaagaatgttctgaaactcctttctgatttcttagatagtgaggtatctgaacttaggactggagctgcagaaggactagccaagctgatgttctctgggcttttggtcagcagcaggattctttctcgtcttattttgttatggtacaatcctgtgactgaagaggatgttcaacttcgacattgcctaggcgtgttcttccccgtgtttgcttatgcaagcaggactaatcaggaatgctttgaagaagcttttcttccaaccctgcaaacactggccaatgcccctgcatcttctcctttagctgaaattgatatcacaaatgttgctgagttacttgtagatttgacaagaccaagtggattaaatcctcaggccaagacttcccaagattatcaggccttaacagtacatgacaatttggctatgaaaatttgcaatgagatcttaacaagtccgtgctcgccagaaattcgagtctatacaaaagccttgagttctttagaactcagtagccatcttgcaaaagatcttctggttctattgaatgagattctggagcaagtaaaagataggacatgtctgagagctttggagaaaatcaagattcagttagaaaaaggaaataaagaatttggtgaccaagctgaagcagcacaggatgccaccttgactacaactactttccaaaatgaagatgaaaagaataaagaagtatatatgactccactcaggggtgtaaaagcaacccaagcatcaaagtctactcagctaaagactaacagaggacagagaaaagtgacagtttcagctaggacgaacaggaggtgtcagactgctgaagccgactctgaaagtgatcatgaagttccagaaccagaatcagaaatgaagatgagactaccaagacgagccaaaaccgcagcactagaaaaaagtaaacttaaccttgcccaatttctcaatgaagatctaagttaggaaagacgatggaggtggaatcctttaagattatgtccagttatttgctttaataaagaagaagttacccttgtcaaaatcagaacaaacctgatgtctttctgaagattttctgctgtgcgcttccacgttactttggcctgtattaaagcagtagagcagcatcagttattatagtccagaaaaagtgtgcatcagtcagtcacacagatttatcacaatctgaggtgggcctaggaatctcatttttaaatagtctctccaagtgattcttatgaactctttatgtttaaaatcatgtcattatggaaaacttacaagtgtaactagctagtagcttgcatttgagaagcttatgacttagatgggcagaatcaacaaagatgaaaccgcctgaggacacatttaacaagtaacatttctagggaaaatgaaggaagtaccacaaactggctagaaaggagcttatcaatcaccagtgaggaagaccagtataacgttcaacaacagttattttgacaaaaacttattttgtgattcctacagtgaaaacatttttggtgatatctgcctgggaaatctctcttcctaaagtatttgtatatgggagtccttgtttgtgaatgtttcctggattagggaggtgtcaacataaatgtattattaaccatgaagctgctcgctatatttttggcataacaaaataatatttatttactgtggataataattctagtgggaatataatgtgacaggaacttctctttatatacgctaccaatttatgagcactattcactgtcaatttcatttcttgtcttttgaaattgacacttggcctgacttacgaaacttgtactatatgaaattggtcctcttttctgcaatacccaacgaaacaccttttctctttattattcagaaatgtcctaacatggatctgtttgttttaataattgtgctttttttaggcttatcatctactagaggccatttacttaaggtgaaattttaagatggagctaaagtaagatcactggtttttagaaccaaattgctatacatatgtgcctcatagaacttataaaaggagtcaaagtttcaaagcaagatagttattaagcaaaaggaaaaatggtaatgatagaaagtcagttaaaaatagatgattgttcttcattctgtttgttggctctgtgttctcctgtgcttcagattccttatgtgttgttgttttaaagacaatttgcagggggttgggagaaggactgaaaaggtacattaagtgtgctgtaaggaaaagtcttagaaacataataagctaaaatcccattcacacatggccaggctatccaaaaagaaaggagccatgttctcatgtggtttaccataccaaagcttgctttctctggcatgggaaaaataaatttaagcacc

SEQ ID NO: 211900 - DNA, 3048 bp, Artificial Sequence
  derived and/or modified sequence
atgggagccgagagaagactcttatccatcaaggaggcctttcgcctcgcccagcagccccaccagaatcaagcaaaacttgtcgtcgccttgtcgcggacatacaggaccatggacgataagaccgtcttccatgaagaatttatacactatctaaagtacgtcatggtggtgtataaacgcgaacctgccgtggagcgggtgatagagttcgcggcaaagttcgtgactagtttccaccagagtgatatggaggatgatgaggaggaagaagatggtgggttgttaaattacctgttcacttttctgctaaagtctcatgaggctaatagtaacgctgtgcgctttcgtgtctgcttactgatcaacaaactcttgggtagcatgccggaaaacgctcagatcgatgacgatgttttcgataaaatcaacaaagcaatgctaattaggcttaaggacaaaattcctaatgtcaggatccaggccgtactggcgctgagccggctccaggacccaaaagatgacgagtgtcctgtggttaatgcctatgcaactctgatagaaaacgattctaacccagaggttaggcgggcagttctgtcatgtattgccccttctgctaaaaccctgcctaaaatagttgggagaactaaagacgtcaaagaagcagttcggaagctagcctaccaggtgctggccgagaaagttcatatgcgcgcaatgagcatcgctcagcgggttatgctccttcagcagggcttgaatgataggagtgacgccgtgaagcaggccatgcagaagcatttactgcagggctggctgaggttctccgaaggcaacattctggaactactgcacagactggacgttgagaacagcagcgaagttgccgtcagtgtgctgaacgcccttttttcaatcaccccactgagcgagctcgttgggctgtgcaagaacaatgatggtcgtaagttgatccccgtggagactctaacccctgaaatcgccctgtactggtgtgccctgtgcgaatacctgaaaagcaaaggcgacgaaggggaggagtttttagagcagattctgcccgagcccgtcgtgtatgcagattatctgctgtcttatatccagtccattcccgtagttaacgaggagcacagaggagatttctcctacatcgggaacttgatgactaaagaatttattgggcagcaactgattctgattatcaagtccctggatacctctgaagagggaggcaggaagaagctgctcgccgtgctccaagagatactgattctccctacgatccctatatccctggtgtcattcctcgtggagcgcctgcttcacattataatcgatgacaacaagcgtacacaaatcgtcaccgagatcatatccgagattcgggcacccatagtaacagtgggggtgaataatgatccggctgacgtgagaaagaaggaactcaagatggccgagattaaagtcaaactgatcgaggctaaagaggcgctcgagaattgtatcacattacaggatttcaacagggccagcgaactcaaggaggagatcaaggccctggaggatgctaggatcaaccttctaaaagagacagaacaacttgagataaaagaggtccatatagagaaaaatgatgctgaaacgctgcagaaatgcctaatcctttgctacgagttgctcaagcagatgtccatcagtacgggactttccgcaaccatgaacggcattattgaatctcttatcctgcccggtatcatctcaatacatccagtggtccggaatctggcggttctgtgtctgggctgttgcggtcttcagaaccaagattttgccagaaagcacttcgtgctgttactgcaagttcttcaaatcgacgacgtgacaattaagatttccgccttgaaagctatatttgaccagctgatgacattcggcatcgagccgtttaagacaaagaagatcaaaaccctgcactgtgaaggtacagagatcaattccgacgacgagcaggagtctaaggaggtcgaagaaacggctacagctaagaatgtgctcaaattgctttctgacttcctcgactctgaagtgtcagagctccggaccggagctgcggaaggactggcaaagctaatgttttccggactgctagtctcttctcgtatactctcacggctgatactgctgtggtataatcccgtaactgaggaagatgtgcaactgaggcattgtctaggggtgttctttcccgtcttcgcatacgccagtaggactaaccaggaatgcttcgaggaggcgttcttaccaacactccagaccttggctaatgccccagcctccagtccccttgccgagattgacatcactaacgtcgctgaactcctggtggacctgactcggcctagtggtctgaatccgcaggccaagaccagtcaggactatcaagccctgacagtgcacgacaacctggcaatgaagatttgcaacgagatcctgacgagcccatgctcgcccgagattagagtgtacacaaaggccctatcctctctggaactgagcagccatcttgccaaggacctgctggtccttctgaatgagatcctggagcaggttaaagatcgtacctgtcttagagcattagaaaagatcaaaattcagctggaaaagggaaacaaggagttcggggaccaagctgaggccgcacaggatgctaccctgacaaccaccacgttccagaacgaggacgaaaagaacaaagaggtctatatgacccccctccgtggcgttaaagccacgcaagcttctaagagtacgcagcttaaaacaaataggggccagagaaaggtaactgtttccgccagaacaaaccgacggtgccagaccgcagaggcagacagtgagtccgaccacgaagttcccgagcctgagagcgagatgaagatgcgcctgccaagacgggctaaaacggctgccctggagaagtctaaactgaatctggcccagtttctgaacgaagatctgtcctag

SEQ ID NO: 211901 - DNA, 3048 bp, Artificial Sequence
  derived and/or modified sequence
atgggcgccgagagaagactgctgagcatcaaggaggccttcagactggcccagcagccccaccagaaccaggccaagctggtggtggccctgagcagaacctacagaaccatggacgacaagaccgtgttccacgaggagttcatccactacctgaagtacgtgatggtggtgtacaagagagagcccgccgtggagagagtgatcgagttcgccgccaagttcgtgaccagcttccaccagagcgacatggaggacgacgaggaggaggaggacggcggcctgctgaactacctgttcaccttcctgctgaagagccacgaggccaacagcaacgccgtgagattcagagtgtgcctgctgatcaacaagctgctgggcagcatgcccgagaacgcccagatcgacgacgacgtgttcgacaagatcaacaaggccatgctgatcagactgaaggacaagatccccaacgtgagaatccaggccgtgctggccctgagcagactgcaggaccccaaggacgacgagtgccccgtggtgaacgcctacgccaccctgatcgagaacgacagcaaccccgaggtgagaagagccgtgctgagctgcatcgcccccagcgccaagaccctgcccaagatcgtgggcagaaccaaggacgtgaaggaggccgtgagaaagctggcctaccaggtgctggccgagaaggtgcacatgagagccatgagcatcgcccagagagtgatgctgctgcagcagggcctgaacgacagaagcgacgccgtgaagcaggccatgcagaagcacctgctgcagggctggctgagattcagcgagggcaacatcctggagctgctgcacagactggacgtggagaacagcagcgaggtggccgtgagcgtgctgaacgccctgttcagcatcacccccctgagcgagctggtgggcctgtgcaagaacaacgacggcagaaagctgatccccgtggagaccctgacccccgagatcgccctgtactggtgcgccctgtgcgagtacctgaagagcaagggcgacgagggcgaggagttcctggagcagatcctgcccgagcccgtggtgtacgccgactacctgctgagctacatccagagcatccccgtggtgaacgaggagcacagaggcgacttcagctacatcggcaacctgatgaccaaggagttcatcggccagcagctgatcctgatcatcaagagcctggacaccagcgaggagggcggcagaaagaagctgctggccgtgctgcaggagatcctgatcctgcccaccatccccatcagcctggtgagcttcctggtggagagactgctgcacatcatcatcgacgacaacaagagaacccagatcgtgaccgagatcatcagcgagatcagagcccccatcgtgaccgtgggcgtgaacaacgaccccgccgacgtgagaaagaaggagctgaagatggccgagatcaaggtgaagctgatcgaggccaaggaggccctggagaactgcatcaccctgcaggacttcaacagagccagcgagctgaaggaggagatcaaggccctggaggacgccagaatcaacctgctgaaggagaccgagcagctggagatcaaggaggtgcacatcgagaagaacgacgccgagaccctgcagaagtgcctgatcctgtgctacgagctgctgaagcagatgagcatcagcaccggcctgagcgccaccatgaacggcatcatcgagagcctgatcctgcccggcatcatcagcatccaccccgtggtgagaaacctggccgtgctgtgcctgggctgctgcggcctgcagaaccaggacttcgccagaaagcacttcgtgctgctgctgcaggtgctgcagatcgacgacgtgaccatcaagatcagcgccctgaaggccatcttcgaccagctgatgaccttcggcatcgagcccttcaagaccaagaagatcaagaccctgcactgcgagggcaccgagatcaacagcgacgacgagcaggagagcaaggaggtggaggagaccgccaccgccaagaacgtgctgaagctgctgagcgacttcctggacagcgaggtgagcgagctgagaaccggcgccgccgagggcctggccaagctgatgttcagcggcctgctggtgagcagcagaatcctgagcagactgatcctgctgtggtacaaccccgtgaccgaggaggacgtgcagctgagacactgcctgggcgtgttcttccccgtgttcgcctacgccagcagaaccaaccaggagtgcttcgaggaggccttcctgcccaccctgcagaccctggccaacgcccccgccagcagccccctggccgagatcgacatcaccaacgtggccgagctgctggtggacctgaccagacccagcggcctgaacccccaggccaagaccagccaggactaccaggccctgaccgtgcacgacaacctggccatgaagatctgcaacgagatcctgaccagcccctgcagccccgagatcagagtgtacaccaaggccctgagcagcctggagctgagcagccacctggccaaggacctgctggtgctgctgaacgagatcctggagcaggtgaaggacagaacctgcctgagagccctggagaagatcaagatccagctggagaagggcaacaaggagttcggcgaccaggccgaggccgcccaggacgccaccctgaccaccaccaccttccagaacgaggacgagaagaacaaggaggtgtacatgacccccctgagaggcgtgaaggccacccaggccagcaagagcacccagctgaagaccaacagaggccagagaaaggtgaccgtgagcgccagaaccaacagaagatgccagaccgccgaggccgacagcgagagcgaccacgaggtgcccgagcccgagagcgagatgaagatgagactgcccagaagagccaagaccgccgccctggagaagagcaagctgaacctggcccagttcctgaacgaggacctgagctag

SEQ ID NO: 211902 - protein, 131 aa, Artificial Sequence
  derived and/or modified sequence
MFSDNSHCPDCGQQWFPSLELGHWLYQTELVENECYQVFLDRINRADYCPECYPDNPANRSLVLPWSFPLEWAPQNLTRWTFEKACHPFLLGPPLVRKRIHDSRVAGFNPALQLILTRTDKTLNKKLGQNK

SEQ ID NO: 211903 - DNA, 396 bp, Artificial Sequence
  derived and/or modified sequence
atgttcagcgacaacagccactgccccgactgcggccagcagtggttccccagcctggagctgggccactggctgtaccagaccgagctggtggagaacgagtgctaccaggtgttcctggacagaatcaacagagccgactactgccccgagtgctaccccgacaaccccgccaacagaagcctggtgctgccctggagcttccccctggagtgggccccccagaacctgaccagatggaccttcgagaaggcctgccaccccttcctgctgggcccccccctggtgagaaagagaatccacgacagcagagtggccggcttcaaccccgccctgcagctgatcctgaccagaaccgacaagaccctgaacaagaagctgggccagaacaagtag

SEQ ID NO: 211904 - DNA, 396 bp, Artificial Sequence
  derived and/or modified sequence
atgttctctgataactcccactgtccagactgtgggcagcagtggtttccatctcttgaactcggacactggctctatcaaactgaactcgtcgagaacgaatgttatcaagtgttcctggacaggatcaatcgcgctgactattgtcctgaatgctacccagacaatcctgcgaaccgctccctggtattgccgtggtcttttccgctggaatgggctccgcaaaatctcactcgctggactttcgaaaaagcctgtcacccttttctcttagggccccctctcgtgcgcaagcgaatccacgacagcagagttgcaggcttcaatcccgccctgcaactgattctgacacgcactgacaaaacactgaataagaagcttggacaaaataagtag

SEQ ID NO: 211905 - DNA, 396 bp, Artificial Sequence
  derived and/or modified sequence
atgttttcagataattcacattgccctgattgtggacaacagtggttccctagtttagaactaggccactggttgtaccaaactgaacttgttgaaaatgaatgttaccaggtattcttagaccgtattaacagagctgattattgtcctgagtgttatcctgataatcctgctaatagaagccttgttcttccttggtctttcccacttgagtgggctccccagaatctcaccagatggacctttgagaaagcttgccatccatttcttctgggtcctccactggttagaaaaagaatacatgactctcgagtagctggttttaaccctgcattacagttaatcttgaccagaacagataaaaccttaaacaaaaaactgggccaaaacaaatag

SEQ ID NO: 211906 - DNA, 396 bp, Artificial Sequence
  derived and/or modified sequence
atgttcagtgacaacagccactgcccagactgtggccagcagtggttccccagcctggagctgggccactggctgtaccagacagagctggtggagaatgaatgctaccaggtgttcctggaccgcatcaacagagctgactactgcccagagtgctacccagacaacccagccaacagaagcctggtgctgccctggagcttccccctggagtgggccccccagaacctgacccgctggacctttgagaaggcctgccaccccttcctgctgggcccccccctggtgaggaagagaattcatgacagccgggtggccggcttcaacccagccctgcagctgatcctgaccaggacagacaagaccctgaacaagaagctgggccagaacaagtag

SEQ ID NO: 211907 - DNA, 396 bp, Artificial Sequence
  derived and/or modified sequence
atgttcagcgacaacagccactgccccgactgcggccagcagtggttcccgtctctggagttgggtcactggctgtaccagacagaactagtagagaacgagtgttaccaagtgtttctcgataggataaaccgggctgattactgtcctgaatgttaccctgataaccccgcgaaccgttcactagtgttaccatggagttttccattggagtgggccccccagaatctaacccggtggacatttgagaaggcctgtcacccgttcttattgggtcctcctctcgtgcgcaagcggattcatgacagtcgcgtagcaggctttaaccctgctttgcaattgattttgacccgtaccgataagacgctgaataagaagctgggtcagaacaagtag

SEQ ID NO: 211908 - DNA, 396 bp, Artificial Sequence
  derived and/or modified sequence
atgttctccgacaattcacattgcccagactgcggccagcaatggtttccctccttagagctgggtcactggctttaccaaacagaactggtggagaatgagtgctaccaggtctttcttgatagaatcaatagagcagactactgccctgagtgttacccagataaccctgccaatagatcactggtactgccatggagcttccctttggagtgggctccccaaaatcttacaaggtggacttttgagaaggcctgccacccctttctgctgggaccaccacttgttcgaaagaggattcatgactcacgtgtggcgggtttcaatcccgcattacaattaatcctgacccgcacagacaagaccctgaataagaaactgggtcagaataagtag

SEQ ID NO: 211909 - DNA, 678 bp, Artificial Sequence
  derived and/or modified sequence
atgacttcccagccagttccaaacgagacaattatagtgttgccatctaacgtgatcaattttagtcaggcggaaaagccagagcccaccaaccaggggcaagattctctgaagaaacacctgcacgccgaaattaaagtaattggaacaattcagatactttgcggaatgatggttctttctctaggtatcattcttgcctccgcatcattctcaccaaactttacccaggtgacatctacattgctcaactcagcttatccctttattggtcccttcttctttataatcagcggctcactgagcatcgcaaccgagaaaagactcactaagttgctggtgcacagtagcctggtgggctcgattctgagcgctttgtccgccctagtgggatttattatcctctccgtcaagcaggcgacactcaacccagccagtttgcagtgtgaactcgacaagaacaatattccaaccaggtcatatgtgagctacttctatcacgacagtctgtacaccacagattgttacacagccaaggcgagcttggctggcacgttgtctctcatgctcatttgcacattactggagttttgcctagccgtacttactgctgtcctcaggtggaagcaagcttacagcgatttccccggcgtgtccgttctcgccgggttcacttag

SEQ ID NO: 211910 - DNA, 678 bp, Artificial Sequence
  derived and/or modified sequence
atgaccagccagcctgtgcccaatgagaccatcatcgtgctgcccagcaatgtcatcaacttcagccaggccgagaagccagagcccaccaaccagggccaggacagcctgaagaagcacctgcatgctgagatcaaggtgattggcaccatccagatcctgtgtggcatgatggtgctgagcctgggcatcatcctggccagcgccagcttcagccccaacttcacccaggtgaccagcaccctgctgaacagcgcctaccccttcatcggccccttcttcttcatcatcagcggcagcctgagcatcgccacagagaagaggctgaccaagctgctggtgcacagcagcctggtgggcagcatcctgagcgccctgagcgccctggtgggcttcatcatcctgtctgtgaagcaggccaccctgaacccagccagcctgcagtgtgagctggacaagaacaacatccccaccaggagctatgtgtcctacttctaccatgacagcctgtacaccacagactgctacacagccaaggccagcctggccggcaccctgagcctgatgctgatctgcaccctgctggagttctgcctggccgtgctgacagctgtgctgcgctggaagcaggcctacagcgacttccctggggtgtctgtgctggccggcttcacctag

SEQ ID NO: 211911 - DNA, 678 bp, Artificial Sequence
  derived and/or modified sequence
atgaccagccagcccgtgcccaacgagaccatcatcgtgctgcccagcaacgtgattaacttcagccaagctgagaaacccgaacctactaaccaagggcaggacagcctgaaaaagcatttgcacgccgaaatcaaagtgattggaacaattcagatcctgtgcggcatgatggtgctgagcttggggatcatcttggcgagcgcttcattctcacccaatttcacccaggttacaagcaccctactcaatagcgcttacccttttataggcccattctttttcattataagcggttctctgtccattgcaacagagaagcgcttgacgaagctgcttgtgcacagctccctcgttggaagtatactcagtgccctgtccgcccttgtgggctttatcatactgagtgtcaagcaggccaccttgaatcctgcctcgctgcagtgcgaattggataagaacaatatcccgacgcgctcctatgtcagttatttttatcacgactccctttataccaccgactgctacaccgctaaggcttccctggctgggacgctatctctgatgttgatctgtactctgctggaattttgcctcgccgtgctgacagccgtgttacgttggaaacaagcgtatagtgattttcccggtgtaagtgtgctggccgggttcacatag

SEQ ID NO: 211912 - DNA, 678 bp, Artificial Sequence
  derived and/or modified sequence
atgacgtcgcagccggttcctaacgaaacaatcatcgtactaccttccaacgtaataaacttttctcaagccgaaaagccggaaccgacaaatcagggccaagactccctaaaaaaacacctgcatgcagagattaaggtgatcggtacgatccagatattgtgtggcatgatggttttaagtctcgggattatcttggctagtgcctccttttcacccaattttacccaggtgacctccacgctgctgaatagcgcatacccatttattggacccttttttttcataatctctggatccctctctattgccacagagaaaaggttgacaaaactgctagtgcattcttctctggtgggtagcatcttatccgcactgtcagctttagtgggctttatcattctgagcgttaaacaagcaacactgaatcctgccagcctgcagtgcgaactggacaagaacaacatcccgacacgtagttacgtatcctacttttatcacgacagcctgtatactacagactgctataccgccaaagccagcctggcgggtactctctcactgatgctgatatgcacactattagagttttgcctcgcggtccttactgcagtcctgcggtggaagcaggcctattcagacttccccggagtgagtgtgttagctgggttcacatag

SEQ ID NO: 211913 - DNA, 678 bp, Artificial Sequence
  derived and/or modified sequence
atgaccagccagcccgtgcccaacgagaccatcatcgtgctgcccagcaacgtgatcaacttcagccaggccgagaagcccgagcccaccaaccagggccaggacagcctgaagaagcacctgcacgccgagatcaaggtgatcggcaccatccagatcctgtgcggcatgatggtgctgagcctgggcatcatcctggccagcgccagcttcagccccaacttcacccaggtgaccagcaccctgctgaacagcgcctaccccttcatcggccccttcttcttcatcatcagcggcagcctgagcatcgccaccgagaagagactgaccaagctgctggtgcacagcagcctggtgggcagcatcctgagcgccctgagcgccctggtgggcttcatcatcctgagcgtgaagcaggccaccctgaaccccgccagcctgcagtgcgagctggacaagaacaacatccccaccagaagctacgtgagctacttctaccacgacagcctgtacaccaccgactgctacaccgccaaggccagcctggccggcaccctgagcctgatgctgatctgcaccctgctggagttctgcctggccgtgctgaccgccgtgctgagatggaagcaggcctacagcgacttccccggcgtgagcgtgctggccggcttcacctag

SEQ ID NO: 211914 - protein, 351 aa, Artificial Sequence
  derived and/or modified sequence
MEDSQETSPSSNNSSEELSSALHLSKGMSIFLDILRRADKNDDGKLSFEEFKAYFADGVLSGEELHELFHTIDTHNTNNLDTEELCEYFSQHLGEYENVLAALEDLNLSILKAMGKTKKDYQEASNLEQFVTRFLLKETLNQLQSLQNSLECAMETTEEQTRQERQGPAKPEVLSIQWPGKRSSRRVQRHNSFSPNSPQFNVSGPGLLEEDNQWMTQINRLQKLIDRLEKKDLKLEPPEEEIIEGNTKSHIMLVQRQMSVIEEDLEEFQLALKHYVESASSQSGCLRISIQKLSNESRYMIYEFWENSSVWNSHLQTNYSKTFQRSNVDFLETPELTSTMLVPASWWILNN

SEQ ID NO: 211915 - protein, 100 aa, Artificial Sequence
  derived and/or modified sequence
MLVQRQMSVIEEDLEEFQLALKHYVESASSQSGCLRISIQKLSNESRYMIYEFWENSSVWNSHLQTNYSKTFQRSNVDFLETPELTSTMLVPASWWILNN

SEQ ID NO: 211916 - DNA, 1056 bp, Artificial Sequence
  derived and/or modified sequence
atggaggacagccaggagaccagccccagcagcaacaacagcagcgaggagctgagcagcgccctgcacctgagcaagggcatgagcatcttcctggacatcctgagaagagccgacaagaacgacgacggcaagctgagcttcgaggagttcaaggcctacttcgccgacggcgtgctgagcggcgaggagctgcacgagctgttccacaccatcgacacccacaacaccaacaacctggacaccgaggagctgtgcgagtacttcagccagcacctgggcgagtacgagaacgtgctggccgccctggaggacctgaacctgagcatcctgaaggccatgggcaagaccaagaaggactaccaggaggccagcaacctggagcagttcgtgaccagattcctgctgaaggagaccctgaaccagctgcagagcctgcagaacagcctggagtgcgccatggagaccaccgaggagcagaccagacaggagagacagggccccgccaagcccgaggtgctgagcatccagtggcccggcaagagaagcagcagaagagtgcagagacacaacagcttcagccccaacagcccccagttcaacgtgagcggccccggcctgctggaggaggacaaccagtggatgacccagatcaacagactgcagaagctgatcgacagactggagaagaaggacctgaagctggagccccccgaggaggagatcatcgagggcaacaccaagagccacatcatgctggtgcagagacagatgagcgtgatcgaggaggacctggaggagttccagctggccctgaagcactacgtggagagcgccagcagccagagcggctgcctgagaatcagcatccagaagctgagcaacgagagcagatacatgatctacgagttctgggagaacagcagcgtgtggaacagccacctgcagaccaactacagcaagaccttccagagaagcaacgtggacttcctggagacccccgagctgaccagcaccatgctggtgcccgccagctggtggatcctgaacaactag

SEQ ID NO: 211917 - DNA, 303 bp, Artificial Sequence
  derived and/or modified sequence
atgctggtgcagagacagatgagcgtgatcgaggaggacctggaggagttccagctggccctgaagcactacgtggagagcgccagcagccagagcggctgcctgagaatcagcatccagaagctgagcaacgagagcagatacatgatctacgagttctgggagaacagcagcgtgtggaacagccacctgcagaccaactacagcaagaccttccagagaagcaacgtggacttcctggagacccccgagctgaccagcaccatgctggtgcccgccagctggtggatcctgaacaactag

SEQ ID NO: 211918 - DNA, 1056 bp, Artificial Sequence
  derived and/or modified sequence
atggaggattcccaagagacatctcctagcagcaataactcgagcgaagagctgtcttcggcgctgcacctgagcaaaggaatgtcaatctttctcgatatcctcaggcgcgccgataagaacgacgacggcaagttgagcttcgaggagtttaaggcttattttgctgatggagtactatcaggagaggagttacacgagttgttccatacaatcgacacacataatactaataacctggataccgaggagctctgtgaatattttagtcagcacctcggggagtacgagaacgtgttggctgcgctggaggatctgaacttgtccatcctcaaggctatgggaaagactaaaaaggattaccaagaagcaagtaacctggaacagtttgtgactaggtttctactcaaggagaccttgaatcagctccagagtttgcaaaatagtctggagtgtgcgatggagacgaccgaggagcagactcggcaagagcggcagggaccggccaaaccggaggtgctgtccatccaatggccaggaaaacggtcttcgcgccgggtgcaaagacataactcattctctccgaattctccccagtttaatgtctctgggcccgggcttcttgaagaggacaatcagtggatgacccaaatcaacagactgcagaagcttatcgatagattggagaagaaggatttgaaactcgagccccccgaggaggagatcattgaaggaaacactaagagccacatcatgctagttcagcgccagatgtctgttattgaagaggatctcgaggaatttcagctggctttgaagcattacgtggagtcagcctcaagtcaatccggttgtctcaggatttcaatccagaagctctcgaacgagagccggtatatgatttatgaattctgggaaaattctagcgtgtggaattcccatctgcaaactaactattcaaagaccttccagcggtccaatgttgattttctggaaacgcctgagctcacgtccaccatgcttgttcctgcaagctggtggatcctgaataattag

SEQ ID NO: 211919 - DNA, 303 bp, Artificial Sequence
  derived and/or modified sequence
atgcttgtacagcgacagatgtctgtcatagaggaagacctggaagagttccagcttgccctgaagcattacgtggaaagcgcctcttcccagtcaggatgtctgcggatttctatacagaagctgagtaatgaatctcggtatatgatctatgaattttgggagaattcaagcgtgtggaattcgcacctgcagactaattattccaaaactttccaacggtccaatgtggatttcctggaaacgcccgaactaaccagcacaatgctggttcctgcctcctggtggatactaaacaactag

SEQ ID NO: 211920 - DNA, 303 bp, Artificial Sequence
  derived and/or modified sequence
atgcttgttcagcgtcaaatgagcgtcattgaggaggatctggaggagtttcagctggcgctaaagcattacgtcgagtccgcaagtagccaatcaggttgtttgaggatttctatccagaaactctcaaatgagagtagatacatgatttacgagttttgggagaatagcagtgtgtggaactctcatctgcagactaattatagcaagacgttccagagaagcaatgtcgactttctggagacccccgagcttacttctacaatgctcgtccctgccagctggtggattcttaataactag

SEQ ID NO: 211921 - DNA, 1056 bp, Artificial Sequence
  derived and/or modified sequence
atggaggacagccaggagaccagccccagcagcaacaacagcagcgaggagctgagcagcgccctgcacctgagcaagggcatgagcatcttcctggacatcctgcggcgggctgacaagaatgatgatggcaagctgagctttgaggagttcaaggcctactttgctgatggagtgctgtctggagaggagctgcacgagctgttccacaccatcgacacccacaacaccaacaacctggacacagaggagctgtgtgagtacttcagccagcacctgggggagtatgaaaatgtgctggccgccctggaggacctgaacctgagcatcctgaaggccatgggcaagaccaagaaggactaccaggaggccagcaacctggagcagtttgtgacccgcttcctgctgaaggagaccctgaaccagctgcagagcctgcagaacagcctggagtgtgccatggagaccacagaggagcagacccggcaggagcggcagggccctgccaagccagaggtgctgagcatccagtggccaggcaagaggagcagcagaagagtgcagaggcacaacagcttcagccccaacagcccccagttcaacgtgtctggccctggcctgctggaggaggacaaccagtggatgacccagatcaaccggctgcagaagctgattgaccggctggagaagaaggacctgaagctggagcccccagaggaggagatcatcgagggcaacaccaagagccacatcatgctggtgcagaggcagatgtctgtgattgaggaggacctggaggagttccagctggccctgaagcactacgtggagagcgccagcagccagagcggctgcctgcgcatcagcatccagaagctgagcaatgaaagccgctacatgatctatgagttctgggagaacagctctgtgtggaacagccacctgcagaccaactacagcaagaccttccagaggagcaatgtggacttcctggagaccccagagctgaccagcaccatgctggtgcctgcctcctggtggatcctgaacaactag

SEQ ID NO: 211922 - DNA, 303 bp, Artificial Sequence
  derived and/or modified sequence
atgctggtgcagaggcagatgtctgtcatcgaggaggacctggaggagttccagctggccctgaagcactacgtggagagcgccagcagccagagcggctgcctgcgcatcagcatccagaagctgagcaatgaaagccgctacatgatctatgagttctgggagaacagctctgtgtggaacagccacctgcagaccaactacagcaagaccttccagaggagcaatgtggacttcctggagaccccagagctgaccagcaccatgctggtgcctgcctcctggtggatcctgaacaactag

SEQ ID NO: 211923 - DNA, 5289 bp, Artificial Sequence
  derived and/or modified sequence
aggctatctccagccgtggccgatggccgtgccgggggcagagcccgctcccctccgcgcgttgctacgtgcggggatgacatggatccagacgccgtcaactacgggaaggaggaggcgagagttggagcgcgtgggagcgcagaggccggaggagggagggggggacaccgagcgcggagagcgcggagagcgcggagggaggcgcgcgcgggagcgaacaccctcccggatccagagcccggcggcggcgaagcagcagctgcggccgcgcccttgccagagccggtgcgtccgcctagccccgctccgcctgaggccgtcagggctcccgaggatggaagattcccaggagacatcgccgtcctccaacaactcctcggaggagctcagctctgctctgcacctgtccaagggcatgtcgatcttcctcgacatactgaggagagcagacaaaaatgatgatggaaaattatcctttgaagaattcaaagcatattttgcagatggtgttctcagtggagaagaattacacgagcttttccataccattgatacacataatactaataatcttgacacagaagagctatgtgaatatttttctcagcacttgggcgagtatgagaatgtactagcagcacttgaagacctgaatctttccatcctgaaggcaatgggcaaaacaaagaaagactaccaagaagcctccaatttggaacaattcgtaactagatttttattgaaggaaaccctgaatcagctgcagtctctccagaattccctggaatgtgccatggaaactactgaggagcaaacccgtcaagaaaggcaagggccagccaagccagaagtcctgtcgattcaatggcctggaaaacgatcaagccgccgagtccagagacacaacagcttctccccaaacagccctcagtttaatgtcagcggtccaggcttattagaagaagacaaccagtggatgacccagataaatagactccagaaattaattgatagactggaaaagaaggatctcaaactcgaaccaccagaagaagaaattattgaagggaatactaaatctcacatcatgcttgtgcagcggcagatgtctgtgatagaagaggacctggaagaattccagctcgctctgaaacactacgtggagagtgcttcctcccaaagtggatgcttgcgtatttctatacagaagctttcaaatgaatctcgctacatgatctatgagttctgggagaatagtagtgtatggaatagccaccttcagacaaattatagcaagacattccaaagaagtaatgtggatttcttggaaactccagaactcacatctacaatgctagttcctgcttcgtggtggatcctgaacaactagatgttcctagacattttctttatggttccaagtgcaaaacaggtgttcttatctaaaacgtcaattagaaaattatctgcggttgttaatctactgtatatttttgtttggtatatttactaagtgcactctttcaaaacttattctataactttatcaattcatgtgaattttagctcaattttcaaagttcactaatattctcaatatttaatgctaaatgctttgctacattgtaactcacctaaaaccttttagtgacaaaatcctaatatgtggaaaaaagcatatgcataaaggaataatattgtgaaaatgaatctgttatgataaagaaaaaataaagtggaaacttttagagtattacttcatagggcagattttgtaaactgtcgtatactgtaaagggttaaatcagcgttttgtgatttttaagtaactgtgagtgaagtttattcttcaacaatgtctactccatccccaacccaactcacagccctatgactactatctttgcattagttaaaaagttagtatataggcatcaaacaaccttggctgtaacctatagaatctctatccacgtatcaggttatagactggtttttcaaaagtgaacaatcctgtgataagttggagtaccatttagtaatacagcaacattgtgtcatttattagcatcataattctttgttatgtaagttaaatatatcaagaaagaagagactgtttggaaaaatgtggttcaagttttatgctatatagttttggtatgcgatacagacagctaacttttcttatgaaaaatacatatttgcatgtaaacaatgatttcaaaatacttgaaaaataaaattttaacccaaatgaataactaagaaatataaaacaagcacaaaatcttagggaagtcataaaatagtagtgaaagtattagacagaagacatctgttttcgaatttcaacactagaatgactaaaactatctacctatagaactatctgtagatagtatactatctacactctgctcaacaagctcagaaattaaatatttttaataataaaaatctgttctggttataaaccttgctaatgaaaatacaatacatataaaaatgtatagccatgttattttctagtataaattcctttgaaactataagtctttgaggaaaattataaggtaaaattttcctgtttttccccctttgaaaaactcaggaaaaaaggaagattgaactaataaaattttatttcttaaatataaatttgacctaaaatattttctcaaactaattcatgaaacagcaacttttaccaatacctttgtatactctcagttctcattcagtataaataaaattttaaaatcctttcatagttctattagaaataagtagtaaattttgatatattgtacatacacacgtgtgtgtgtgtgtgtgtgtgtgtgtgtgtgtgtgtgtgtgtatttgtgtgcctctggtcaactctaaggatgacagacactgtgtaacaacacctgggtcaactcttttaatttatatacaaagcaaagaacaacattaatggagatgcacaatgattattcaaacaagctatatatatgtacaaaggcaaacagacacataacagtctctgcagactgattgtatatagtaagaaaagatcaaaagactttaaaacctaaatgacttttgacatacaaactcttcttgagaatgtttgttgtaaatggtttcaaaaatacaaattatagccaatcaaaacattgctttggttggtgcatttaagtatccaactcaaaaagcatatcaaatattttgggtactaggcagtttccaaagtagcatggtagtattacttgttaaaagggttctgttttcattaacagtactaagtggaagggatctgcagattccaaactggaataagctctatcatattctgaaacaagaattagaatgacttgagaacgggcaaataacaaagcaaaccaatataattatatggtcattctgaccccagctcttatacaaattatacatgtatttttgtgtatgtttgtgagagttgtatgtatgtgaatgtgtgtgagtgtgtattcacatacacatatatactggaacctatagtagaaaaggaaactagtagggccaaaaaaaaaaagaaaaagaaaaagaaaaaagaaaaaaaaagaaaaaactgggacctaagtataaatatctcatcctaaagtaaacaataagtttatagttaacgaagatttttttctatttaaaaccccattttcctaaagaacaaagtagtaaaataaaaaaaaatttaaaaaattaaaaaataaaaaaaagaggtcactaaaagaccaagatgggaaacgtaacatggaatacaagcttgaatctgggaaacaagctcaaaaaacagtgaaaaaaaaagtactggtttaggagttcaaaattcagtgaaacaaactttttgccaatagacctagggatctaagaaatagaattagggagagtttacacttacttacctatatatcagcagatttttctggaagaaaccctttttttttttttttttaaacagtaacatccagagtgacaaattgcaggagatttaatgtataaaatttctaggaattaaaagcttaaacccaaaaattgttcatccatatataagaaattatcgaattaaaacttaatgtatgtcaattattttcaaatgtctaaattcctttggaaataaaaatatcagttttactttgaaattgctcaacttctgctattcatatggtctgattagtgacataagtagcagccgtttttcaacttcagtttcattcactaccattgtttccaaattatcaatctctgctagtaattatgaatttaagaccatattattatcaaaaacctagagaccaatcatatatctgaaaagaaatacccattaaaaattctgcctcctgtttattgagaactatgcattgaacattctgaatcattctaagcctctggagagactgtaatgatccattcatgagctggtatgaaatcagtgggaagcagaacaacagaaggaactttaaaagcaacaagcaattatgtaccatatatacactgtagcaaatattttatatttgagagtctttacagcttacatttccattccattattacaagtgatgaaaaacaaaaaattgcaagtagtatgcaaattataaatatacagtcttcccacttcactaaccaaattcctactttccagtgttacttcccaatttatgcaggaaacctcctgcaaagctgaaactgattagaaaattctttatattttaaaatagctctttctcatttttagagaagtcaaatagccaaccatcaaaattaagaataaattgaattgtcacagtccattacagttattgttgctagatccacctcatttgcagatgtccaaacttaaattcatctgttcttaaaatgctacttaaaactttggttgttttcctgtaatataaaagaaaaagttaatttatcaattgattgaatacagtttttactaattagtttatcaaaccaaatactgtgaacgtaccaggtgtttacagatttaaatgcatgttaccatagaaactattaaagtaactagaactgtcaaataacaaaacggctcatgtttttaaaatatatgtaactcattttaaaatatattaaattgtattccaaacctgttcttctgtttctgtggcacctaggtttaaaatatgtattaatgtgtaaatcacaagtaaaatgaattctaatgtacaagtttgttttaaaaagtgtatgtcaagcttttatttacacaataaaatgttattaaagatggaaagtctacaaatg

SEQ ID NO: 211924 - DNA, 2908 bp, Artificial Sequence
  derived and/or modified sequence
attgagaatcactgcttttaaagggaaacacgtcattgtaaagaacacgttgtttagcttctgggactagaggcaaggaaaatatcttgcctagattacagcctttatacagttttatacttggaatagtcatggccttccttggtcatatttttggatgacaatcatctgtttttgtgaggaggaatgggatgggcagtaggagtcagcttaaatcgggctccgtgacagccaacgcagtgaccctcgccccttccttggcagcacatcatgcttgtgcagcggcagatgtctgtgatagaagaggacctggaagaattccagctcgctctgaaacactacgtggagagtgcttcctcccaaagtggatgcttgcgtatttctatacagaagctttcaaatgaatctcgctacatgatctatgagttctgggagaatagtagtgtatggaatagccaccttcagacaaattatagcaagacattccaaagaagtaatgtggatttcttggaaactccagaactcacatctacaatgctagttcctgcttcgtggtggatcctgaacaactagatgttcctagacattttctttatggttccaagtgcaaaacaggtgttcttatctaaaacgtcaattagaaaattatctgcggttgttaatctactgtatatttttgtttggtatatttactaagtgcactctttcaaaacttattctataactttatcaattcatgtgaattttagctcaattttcaaagttcactaatattctcaatatttaatgctaaatgctttgctacattgtaactcacctaaaaccttttagtgacaaaatcctaatatgtggaaaaaagcatatgcataaaggaataatattgtgaaaatgaatctgttatgataaagaaaaaataaagtggaaacttttagagtattacttcatagggcagattttgtaaactgtcgtatactgtaaagggttaaatcagcgttttgtgatttttaagtaactgtgagtgaagtttattcttcaacaatgtctactccatccccaacccaactcacagccctatgactactatctttgcattagttaaaaagttagtatataggcatcaaacaaccttggctgtaacctatagaatctctatccacgtatcaggttatagactggtttttcaaaagtgaacaatcctgtgataagttggagtaccatttagtaatacagcaacattgtgtcatttattagcatcataattctttgttatgtaagttaaatatatcaagaaagaagagactgtttggaaaaatgtggttcaagttttatgctatatagttttggtatgcgatacagacagctaacttttcttatgaaaaatacatatttgcatgtaaacaatgatttcaaaatacttgaaaaataaaattttaacccaaatgaataactaagaaatataaaacaagcacaaaatcttagggaagtcataaaatagtagtgaaagtattagacagaagacatctgttttcgaatttcaacactagaatgactaaaactatctacctatagaactatctgtagatagtatactatctacactctgctcaacaagctcagaaattaaatatttttaataataaaaatctgttctggttataaaccttgctaatgaaaatacaatacatataaaaatgtatagccatgttattttctagtataaattcctttgaaactataagtctttgaggaaaattataaggtaaaattttcctgtttttccccctttgaaaaactcaggaaaaaaggaagattgaactaataaaattttatttcttaaatataaatttgacctaaaatattttctcaaactaattcatgaaacagcaacttttaccaatacctttgtatactctcagttctcattcagtataaataaaattttaaaatcctttcatagttctattagaaataagtagtaaattttgatatattgtacatacacacgtgtgtgtgtgtgtgtgtgtgtgtgtgtgtgtgtgtgtgtgtatttgtgtgcctctggtcaactctaaggatgacagacactgtgtaacaacacctgggtcaactcttttaatttatatacaaagcaaagaacaacattaatggagatgcacaatgattattcaaacaagctatatatatgtacaaaggcaaacagacacataacagtctctgcagactgattgtatatagtaagaaaagatcaaaagactttaaaacctaaatgacttttgacatacaaactcttcttgagaatgtttgttgtaaatggtttcaaaaatacaaattatagccaatcaaaacattgctttggttggtgcatttaagtatccaactcaaaaagcatatcaaatattttgggtactaggcagtttccaaagtagcatggtagtattacttgttaaaagggttctgttttcattaacagtactaagtggaagggatctgcagattccaaactggaataagctctatcatattctgaaacaagaattagaatgacttgagaacgggcaaataacaaagcaaaccaatataattatatggtcattctgaccccagctcttatacaaattatacatgtatttttgtgtatgtttgtgagagttgtatgtatgtgaatgtgtgtgagtgtgtattcacatacacatatatactggaacctatagtagaaaaggaaactagtagggccaaaaaaaaaaagaaaaagaaaaagaaaaaagaaaaaaaaagaaaaaactgggacctaagtataaatatctcatcctaaagtaaacaataagtttatagttaacgaagatttttttctatttaaaaccccattttcctaaagaacaaagtagtaaaataaaaaaaaatttaaaaa

SEQ ID NO: 211925 - DNA, 811 bp, Artificial Sequence
  derived and/or modified sequence
atttgaacagggcctgttgtaagtagttaatgtgtttgacaaccctgtaatatttgatatacctttggaaatgcatgagttactaatttttttgaaatctagttgtttgtaatgattgtcacttatgtctaatatcacaaaatattcaagaaattggagctgtgcaatgaacaataggacttctctttaaaaattgcacatcatgcttgtgcagcggcagatgtctgtgatagaagaggacctggaagaattccagctcgctctgaaacactacgtggagagtgcttcctcccaaagtggatgcttgcgtatttctatacagaagctttcaaatgaatctcgctacatgatctatgagttctgggagaatagtagtgtatggaatagccaccttcagacaaattatagcaagacattccaaagaagtaatgtggatttcttggaaactccagaactcacatctacaatgctagttcctgcttcgtggtggatcctgaacaactagatgttcctagacattttctttatggttccaagtgcaaaacaggtgttcttatctaaaacgtcaattagaaaattatctgcggttgttaatctactgtatatttttgtttggtatatttactaagtgcactctttcaaaacttattctataactttatcaattcatgtgaattttagctcaattttcaaagttcactaatattctcaatatttaatgctaaatgctttgctacattgtaactcacctaaaaccttttagtgacaaaatcctaatatgtggaaaaaagcatatgcataaaggaataat

SEQ ID NO: 211926 - DNA, 1056 bp, Artificial Sequence
  derived and/or modified sequence
atggaggacagccaggagaccagccccagcagcaacaacagcagcgaagagttaagttcagctctccacttgagtaaaggaatgagcatttttctggatatcttgcggcgtgccgataagaacgacgacggcaagctgagtttcgaagaatttaaggcttattttgctgatggtgtgttgtctggtgaggagttgcacgagctttttcacactatcgatactcataacacaaacaatctggatactgaggagctgtgtgaatatttctcccagcacctgggggagtacgaaaatgttctggctgctttagaggatctgaacttaagcatcctgaaggccatggggaaaacgaaaaaggactatcaggaagcgtctaatctggaacagttcgtgacccggttcctccttaaggagaccctcaatcagctccagtccctgcagaattcattagagtgtgccatggaaactacggaagaacaaaccaggcaggaacgtcaaggccctgccaaacccgaggtgctgagtatccagtggcctggcaagagatccagccggcgcgtccagagacataattctttctcacccaacagcccgcagttcaatgtttcaggacccggtctgctggaggaggacaatcagtggatgacccagatcaatcggcttcagaagctaatcgatagactcgagaagaaggatcttaaacttgaaccaccagaagaagaaattattgaggggaatactaaatcccacattatgttggtgcagagacagatgtccgtgattgaggaggacctcgaagaattccagctggcgcttaagcactacgtcgaaagtgcctcatcgcaaagcggctgcctgcggatctccatacagaaactgagcaacgaaagcagatacatgatatatgagttctgggaaaattcttctgtatggaattcccacctgcaaacaaactactcaaagaccttccagagaagcaatgtggatttcctggagaccccagagctcacatccactatgcttgtccctgcctcctggtggatcctcaacaactag

SEQ ID NO: 211927 - DNA, 303 bp, Artificial Sequence
  derived and/or modified sequence
atgctggtgcagcggcagatgagcgtgatcgaggaggacctggaggaatttcagctggcactgaagcactacgtcgagtcagccagtagccagtccggctgccttcgaatttcaatccagaagctgtccaatgagtcccgatatatgatctacgagttctgggagaatagttcggtttggaattctcacctacagactaattactctaagactttccaaaggtccaacgttgatttcctggaaacaccagaactgacttcgactatgttggttcctgctagctggtggatcctgaacaattag

SEQ ID NO: 211928 - DNA, 303 bp, Artificial Sequence
  derived and/or modified sequence
atgctggtgcagcggcagatgagcgtgatcgaggaggacctggaggagttccagctcgcccttaaacactatgttgagtcggcatcttctcaatctggctgtctgcgaataagcatacagaaactgtctaatgagtcgcgatacatgatttatgagttctgggagaacagtagcgtgtggaactctcaccttcagaccaattacagcaaaaccttccagagatccaatgtggactttctggagactccagagctgacatcaacaatgctggtccccgcaagttggtggatcttaaacaattag

SEQ ID NO: 211929 - DNA, 1056 bp, Artificial Sequence
  derived and/or modified sequence
atggaagactcacaggagaccagtccctcgagtaataactcaagcgaagagttgtcttcagctctgcacctgtctaaaggtatgagtatctttttagacattctgaggcgcgctgataagaatgatgacgggaaactttcctttgaggagtttaaagcctattttgccgacggtgtactgtccggcgaggagttacacgagctgtttcatacgattgatacacataatacgaacaacctggatacagaagaactgtgcgaatatttctcgcaacacctcggcgaatatgagaacgtgctcgcggctctcgaggatctcaacttatccatcctgaaagccatgggaaagaccaaaaaggattatcaggaggcatccaatttggaacagttcgtgacaagattcctgctcaaagaaacactgaaccaactccagtccctccagaactccctcgagtgtgcaatggagacaaccgaagagcaaaccagacaggaaaggcagggccctgcaaagcctgaggtacttagcattcaatggcctgggaaaaggtctagccgccgtgttcagcggcacaatagtttctctcctaattcaccccagttcaatgtcagtggtcccggacttctcgaagaagataatcaatggatgactcagattaataggctacagaagctgatcgacagactcgagaagaaggatctcaagttggagcctcccgaagaggagatcatcgaaggcaacacgaagtcacacattatgcttgtgcagaggcagatgagcgtcattgaggaggatctggaagaattccaacttgctctcaagcactatgtcgagagcgccagcagtcaatctgggtgcctgcgaattagtattcaaaagctctcaaatgaatctagatacatgatctatgagttctgggagaacagctcggtttggaactcccacctgcagacgaattactctaaaacctttcagaggagtaatgttgacttcctggaaactccggagctcacctcaactatgcttgtccccgcttcatggtggatattgaacaattag

SEQ ID NO: 211930 - DNA, 303 bp, Artificial Sequence
  derived and/or modified sequence
atgctcgtgcagcgacagatgtcggtgatagaggaagacctcgaagaattccagctggccctgaagcactacgtggaatctgcgagctcccagagcggctgccttcggatttccatccagaaactaagcaatgagagtcgatacatgatttatgaattctgggaaaattctagcgtctggaacagccacctccaaaccaactactctaaaacattccagcggtctaacgtggatttcctcgagacccctgagctcaccagcacgatgctcgtgcctgcctcatggtggatcctgaataactag

SEQ ID NO: 211931 - DNA, 303 bp, Artificial Sequence
  derived and/or modified sequence
atgcttgtccagcgccagatgagcgtcatcgaagaagatcttgaggagtttcagttggcgttgaaacattatgtggagtctgcctcgtctcagagcggctgcctcagaatttctatacagaagttgagtaacgaatccaggtacatgatctacgagttttgggagaactcctcagtgtggaactctcatctgcaaacgaactattcaaagacctttcagaggtctaatgtggacttcctcgagactcccgagctgactagtacaatgctcgtacctgcctcatggtggatcctgaacaattag

SEQ ID NO: 211932 - protein, 399 aa, Artificial Sequence
  derived and/or modified sequence
MQPSGLEGPGTFGRWPLLSLLLLLLLLQPVTCAYTTPGPPRALFWSAYVPCQTQDRDALRLTLEQIDLIRRMCASYSELELVTSAKALNDTQKLACLIGVEGGHSLDNSLSILPTFYMLGVRYLTLTHTCNTPWAESSAKGVHSFYNNISGLTDFGEKVVAEMNRLGMMVDLSHVSDAVARRALEVSQAPVIFSHSAARGVCNSARNVPDDILQLLKKNGGVVMVSLSMGVIQCNPSANVSTVADHFDHIKAVIGSKFIGIGGDYDGAGKFPQGLEDVSTYPVLIEELLSRGWSEEELQGVLRGNLLRVFRQVEKVQEENKWQSPLEDKFPDEQLSSSCHSDLSRLRQRQSLTSGQELTEIPIHWTAKLPAKWSVSESSPHMAPVLAVVATFPVLILWL

SEQ ID NO: 211933 - protein, 486 aa, Artificial Sequence
  derived and/or modified sequence
MQPSGLEGPGTFGRWPLLSLLLLLLLLQPVTCAYTTPGPPRALTTLGAPRAHTMPGTYAPSTTLSSPSTQGLQEQARALMRDFPLVDGHNDLPLVLRQVYQKGLQDVNLRNFSYGQTSLDRLRDGLVGAQFWSAYVPCQTQDRDALRLTLEQIDLIRRMCASYSELELVTSAKALNDTQKLACLIGVEGGHSLDNSLSILPTFYMLGVRYLTLTHTCNTPWAESSAKGVHSFYNNISGLTDFGEKVVAEMNRLGMMVDLSHVSDAVARRALEVSQAPVIFSHSAARGVCNSARNVPDDILQLLKKNGGVVMVSLSMGVIQCNPSANVSTVADHFDHIKAVIGSKFIGIGGDYDGAGKFPQGLEDVSTYPVLIEELLSRGWSEEELQGVLRGNLLRVFRQVEKVQEENKWQSPLEDKFPDEQLSSSCHSDLSRLRQRQSLTSGQELTEIPIHWTAKLPAKWSVSESSPHMAPVLAVVATFPVLILWL

SEQ ID NO: 211934 - DNA, 1200 bp, Artificial Sequence
  derived and/or modified sequence
atgcagcctagtggtttggaaggacccggaacttttggcagatggcctctcctgagcctcctgctgctgctgctccttctccagccagtgacctgtgcatatactacgccggggcctcctcgggcattgttttggagtgcatacgtaccatgccagacgcaggaccgcgacgctctgcgacttaccctcgaacaaattgacttaatcagacggatgtgcgcatcatacagcgagctagagctagtgactagcgcaaaggccctaaatgatactcagaaactggcatgcctgatcggagtagagggtgggcacagcctggataattctttgagcattttacctacgttttacatgctgggcgttcgatacctcactctgacacatacctgcaacaccccttgggccgagtcaagtgctaagggagtccacagtttttacaataacatctctgggctcacggattttggagagaaggtagtagccgaaatgaacaggctgggaatgatggtggatctcagccatgtgtccgacgcggtggcaagaagagctctcgaggtctctcaggcaccagtgatttttagccattctgctgctcggggtgtgtgcaactccgcaaggaatgtgcctgatgatatcttacagctccttaagaagaatggcggcgtagtcatggtgagcctctccatgggcgtgatacagtgcaacccatccgccaatgtatccaccgtcgctgaccacttcgaccatattaaagctgtgatcggttccaagttcattgggatcgggggggattacgacggcgctggcaaattccctcagggactggaagacgttagcacatatccggtcttgattgaagagttgctgagcagagggtggagcgaagaggagctgcaaggtgtgctgcggggcaacctgctgagggtatttcggcaggttgaaaaggtgcaggaggagaacaaatggcaaagccccctggaagacaaatttccagacgaacagctgagctcaagctgtcactcagacctcagtagactgcggcagcgccagtcactgactagtgggcaggaattaacagagatcccgattcattggacagcaaagttaccagcgaaatggagtgtgtcagaatctagcccccacatggcgcctgtattggccgtcgtcgccacattccctgtgctgatcctctggctttag

SEQ ID NO: 211935 - DNA, 1461 bp, Artificial Sequence
  derived and/or modified sequence
atgcagccaagcggtctagaaggccccggtaccttcggccgctggccgttattgtcactattgttattgttgctgctgctccagcccgttacatgtgcatatacaactccaggaccgcccagagcactaaccacactgggagctccacgagcacataccatgcctggaacctacgccccttccacaaccttgtccagccccagtacccaagggttgcaggagcaggccagggcattaatgagagattttccactcgtcgacggacacaacgatctgccacttgtccttagacaggtgtatcagaagggcctgcaggatgtcaaccttaggaacttcagctacgggcagacctctttggaccggttaagggatggactagtgggggcacagttctggagtgcatatgtcccttgtcagacccaggacagagatgccctgcgactcactctggaacagatcgacctgatccgccggatgtgcgcaagctacagcgaacttgaactagtgacttctgctaaggccctgaacgacacacagaaactcgcttgcctgattggcgtagaaggaggtcactctcttgataattccctcagtatcttgcccacattctatatgctgggggtgcgctacctcactttgacacacacatgtaacacaccctgggcggagagctcagccaagggggtccatagtttttacaacaatatctccgggctgacagactttggtgagaaagtagtcgctgaaatgaacagattgggcatgatggttgatctgtctcacgtcagcgatgcagtggcaaggagggccctcgaggtctcccaggctcctgtcatcttctctcacagcgcagccagaggggtgtgtaatagtgctcgaaacgttcctgatgatattcttcaattgctgaagaagaatggcggagttgtaatggtctcactgagcatgggagtgatccagtgtaatcctagcgccaatgtgtcgacggtggcggatcatttcgaccatatcaaggccgtcataggaagtaaattcatcgggatcggcggcgactacgatggcgctgggaagttccctcaagggctggaggacgtctccacatatccagttttgatagaggagttgctgagtcgggggtggagcgaagaagagttacagggcgttctgcgaggtaacctgctgagggtgttcaggcaggtggaaaaggtccaggaggagaacaaatggcagtcaccactggaggataaattccccgacgagcaactgtcaagctcgtgccacagcgatctgtcgcgcctgcgccagcggcagagcctaacaagtggccaagaactcacagaaatccccattcactggacagctaaattgccagctaaatggtctgtcagtgagtcttcaccgcatatggcccccgtcctcgctgtagttgcaacctttcccgtgttaattctatggctctag

SEQ ID NO: 211936 - DNA, 1461 bp, Artificial Sequence
  derived and/or modified sequence
atgcaaccgtctggtttggaggggcctgggacttttggacgctggcctttactgagtctcctcctcttgttgctgctgcttcagcccgtgacgtgcgcctacaccacccccggtccgccccgggcactgactacgctgggcgcaccaagggcacatacaatgcccggcacatacgccccctcaaccacactgagcagccctagcacgcagggactgcaggagcaggcacgtgccctgatgcgagacttccctctggtcgatggccacaacgacctacccctggttttacgtcaggtgtaccagaaggggctacaggatgttaacctaaggaacttctcctacggtcagactagcctggatcgtcttagagacggcctcgtgggcgcccaattctggagtgcttatgtcccctgtcaaacacaagatcgcgatgctctacgcttaacgctggagcaaatcgatctgattagaaggatgtgtgccagttacagtgagttagagctggtgaccagtgcaaaggctctcaacgatacacaaaagctcgcttgcttgattggcgtcgagggggggcactccctcgacaatagtctgagcatcctgccaaccttttatatgctaggagttcggtatctcactctcactcacacatgcaacacaccatgggctgagtcatcagccaagggagttcattctttttacaacaacatctccggcctgaccgatttcggagagaaggtcgtggctgagatgaatagactggggatgatggtcgacctcagccacgtgtctgatgctgttgcccggcgggctctagaagtaagtcaggcccctgtcatattcagccactccgccgcgcgcggggtgtgtaactctgccaggaatgtgcctgacgacatcctgcagctccttaagaagaacggaggggtcgttatggtgtcactgtccatgggcgtaatccagtgtaatccctccgctaatgtgagcaccgttgctgaccatttcgaccacattaaagcagtcatcggttctaagtttattggcatcggtggggactatgacggagctggcaagttcccccagggcctggaggacgtgtcgacataccccgtgctaatcgaagagttgctgtcccgcggctggtccgaggaggaactgcagggagtgcttagaggcaacttgctcagagtatttaggcaagtggaaaaagtgcaggaagaaaataaatggcagagtccattggaggacaagtttcccgacgagcagctgagctctagctgtcatagcgacctcagtagactacgccagcggcagtcgctgacaagcggacaggaattaacagaaattcccattcactggacagccaaattacctgcaaaatggtcagtctctgagtcatctccgcatatggcgcccgtacttgcggtcgtggctaccttccccgtcctgatcctgtggctctag

SEQ ID NO: 211937 - DNA, 1200 bp, Artificial Sequence
  derived and/or modified sequence
atgcagcccagcggcctggagggccctggcaccttcggccgctggcccctgctgagcctgctgctgctgctgctgctgctgcagcctgtgacctgtgcctacaccaccccaggccccccccgggccctcttctggagcgcctacgtgccctgccagacccaggacagagatgccctgcggctgaccctggagcagattgacctgatccggaggatgtgtgccagctacagcgagctggagctggtgaccagcgccaaggccctgaatgacacccagaagctggcctgcctgattggagtggagggcggccacagcctggacaacagcctgagcatcctgcccaccttctacatgctgggcgtgcgctacctgaccctgacccacacctgcaacaccccctgggccgagagcagcgccaagggcgtgcacagcttctacaacaacatcagcggcctgacagactttggagagaaggtggtggccgagatgaaccggctgggcatgatggtggacctgagccacgtgtctgatgctgtggcccggcgggccctggaggtgtcccaggcccctgtgatcttcagccacagcgctgcccggggcgtgtgcaacagcgccagaaatgtgcctgatgacatcctgcagctgctgaagaagaatggaggagtggtgatggtgtccctgtccatgggcgtcatccagtgcaaccccagcgccaacgtgtccacagtggccgaccactttgaccacatcaaggccgtcatcggcagcaagttcatcggcattggaggagactatgatggagctgggaagttcccccagggcctggaggatgtgtccacctaccctgtgctgattgaggagctgctgagccggggctggagcgaggaggagctgcagggcgtgctgcggggcaacctgctgcgggtcttccggcaggtggagaaggtgcaggaggagaacaagtggcagagccccctggaggacaagttcccagatgagcagctgagcagcagctgccacagcgacctgagccggctgcggcagaggcagagcctgaccagcggccaggagctgacagagatccccatccactggacagccaagctgcctgccaagtggagcgtgtctgagagcagcccccacatggcccctgtgctggccgtggtggccaccttccctgtgctgatcctgtggctgtag

SEQ ID NO: 211938 - DNA, 1461 bp, Artificial Sequence
  derived and/or modified sequence
atgcagcccagcggcctggagggccctggcaccttcggccgctggcccctgctgagcctgctgctgctgctgctgctgctgcagcctgtgacctgtgcctacaccaccccaggccccccccgggccctgaccaccctgggcgccccccgggcccacaccatgcctggcacctacgcccccagcaccaccctgagcagccccagcacccagggcctgcaggagcaggcccgggccctgatgagggacttccccctggtggatggccacaatgacctgcccctggtgctgcggcaggtgtaccagaagggcctgcaggatgtgaacctgaggaacttctcctatggccagaccagcctggaccggctgagagatggcctggtgggcgcccagttctggagcgcctacgtgccctgccagacccaggacagagatgccctgcggctgaccctggagcagattgacctgatccggaggatgtgtgccagctacagcgagctggagctggtgaccagcgccaaggccctgaatgacacccagaagctggcctgcctgattggagtggagggcggccacagcctggacaacagcctgagcatcctgcccaccttctacatgctgggcgtgcgctacctgaccctgacccacacctgcaacaccccctgggccgagagcagcgccaagggcgtgcacagcttctacaacaacatcagcggcctgacagactttggagagaaggtggtggccgagatgaaccggctgggcatgatggtggacctgagccacgtgtctgatgctgtggcccggcgggccctggaggtgtcccaggcccctgtgatcttcagccacagcgctgcccggggcgtgtgcaacagcgccagaaatgtgcctgatgacatcctgcagctgctgaagaagaatggaggagtggtgatggtgtccctgtccatgggcgtcatccagtgcaaccccagcgccaacgtgtccacagtggccgaccactttgaccacatcaaggctgtgattggcagcaagttcatcggcatcggcggggactatgatggagctgggaagttcccccagggcctggaggatgtgtccacctaccctgtgctgattgaggagctgctgagccggggctggagcgaggaggagctgcagggcgtgctgcggggcaacctgctgcgggtcttccggcaggtggagaaggtgcaggaggagaacaagtggcagagccccctggaggacaagttcccagatgagcagctgagcagcagctgccacagcgacctgagccggctgcggcagaggcagagcctgaccagcggccaggagctgacagagatccccatccactggacagccaagctgcctgccaagtggagcgtgtctgagagcagcccccacatggcccctgtgctggccgtggtggccaccttccctgtgctgatcctgtggctgtag

SEQ ID NO: 211939 - DNA, 1200 bp, Artificial Sequence
  derived and/or modified sequence
atgcagcccagcggcctggagggccccggcaccttcggccggtggcctttgctgtctctgctcctgcttctccttttgctgcaaccggtaacctgcgcctataccacgccgggcccccccagggccttgttttggtcggcctacgtgccatgccagacccaagatcgagacgcccttcggctcactctagaacagattgacttgattcgtcggatgtgtgctagctatagcgagttggaactagtgacatcagccaaagccctgaacgatacacagaaacttgcatgtttgataggagtcgaaggtggacattcattggataattcactgtctattctacctactttttacatgctgggagttcgatacttgactcttactcacacctgcaacactccctgggctgagagctccgccaaaggagtacatagtttctacaacaatatctccggcctcaccgacttcggcgagaaggtggtcgccgagatgaaccgtctagggatgatggtggatttgtcacacgtgagcgatgccgtggcccggcgagctctcgaggtgtctcaggccccagtgatcttttcccatagtgccgcaagaggcgtctgtaactcagctagaaatgtgcccgatgacatccttcagctcctcaagaagaacggcggtgttgttatggtgtccctgtcaatgggggttatccagtgtaacccatctgctaacgtgtcaacagtggccgaccattttgaccatattaaagccgtcattggatccaagtttatagggataggaggcgattacgatggagcaggaaagttcccacagggactggaagacgtgtcgacatacccggtcctgattgaggaactgctgtctagaggctggtcagaggaggagttacagggagtcctcagagggaatttactgagggtctttcggcaagttgaaaaggtgcaagaggagaacaagtggcaatctcccttggaggataaatttcctgacgaacaacttagctcatcctgccactcagacctaagccggctgaggcagcgccagagtcttactagcggccaggagctcactgaaatccctattcactggacagctaagcttcctgcgaagtggtctgtatcggagtcttccccccatatggcccccgtgttagcggtcgtggcaacattccccgtgctcatcctgtggttgtag

SEQ ID NO: 211940 - DNA, 1461 bp, Artificial Sequence
  derived and/or modified sequence
atgcagcccagcggcctggagggccccggcaccttcggccggtggcctctgttgagtcttttacttttactgcttctactacaacccgtgacttgtgcctatacaactcccggtcccccacgggccctgaccaccctgggagctcctagagcccatactatgcctgggacctatgcgcctagcacgactcttagctcacccagtacccagggtttgcaggagcaggcccgggctctcatgcgggattttccactggtcgatgggcataacgacctcccgctagtcctgagacaagtgtatcagaaaggtctccaagatgtgaatctgagaaatttttcctacggccaaaccagtctagatcggctccgagacgggctggtgggagcacagttctggtcagcttatgtaccatgccaaacacaggatagagatgcactgaggctgaccctcgagcagatcgatctgatacgaagaatgtgtgcgtcgtactcagaactggaactcgtcacatccgctaaggctctgaatgatacccagaagctggcctgtttaatcggggtcgaagggggacattccctcgataactctctgtctattttgccaacgttttatatgcttggtgtgaggtatttgacactaactcacacttgcaataccccttgggctgaatcatcagcaaagggggtccatagcttctacaacaacatcagcggattgaccgacttcggggagaaagtggtggctgagatgaatcgcctagggatgatggtcgatttgtcccatgtcagtgacgcggtggcacgtcgggcgttggaggtaagccaggcaccagtgattttctctcacagtgctgcacgaggcgtatgcaatagtgctcgcaacgttcccgacgacatcctgcaactgctaaagaaaaacggcggcgtcgtcatggtctccctctcgatgggcgtaatacagtgcaaccctagtgcaaatgtatctaccgtggcggatcactttgaccacattaaagcagtcattggcagcaaatttatcggcattggcggggactacgacggagcggggaaattcccccagggcctcgaagacgtctctacctatcccgtgctgattgaagagctcctgagccgaggatggagcgaggaggagctgcagggggttctccgcgggaatctcctgagagtgtttaggcaagtggagaaggttcaagaggaaaataagtggcagagccctctggaagacaaattcccagacgaacagctgagctccagttgccacagcgacctatcacggttacggcaacggcagagccttacaagcgggcaggaattgaccgaaatcccaatccactggacagctaaactgccagccaagtggtctgtgtcagagtcctcccctcatatggcccccgtgctagctgtggtggctactttccccgtcctaatcctttggctgtag

SEQ ID NO: 211941 - DNA, 1461 bp, Artificial Sequence
  derived and/or modified sequence
atgcagcccagcggcctggagggccccggcaccttcggccggtggccactgctgtctctgctccttctcctactgctgctccagccagttacctgtgcatataccaccccagggcctccgagagcactcacaaccctcggggcccctcgtgctcacacaatgcctggcacttatgctcccagcaccacactctcttcaccctccacacaagggttgcaagagcaggctcgggccctcatgcgagattttccactcgtggatggccacaacgacttaccactcgttcttcggcaggtgtatcaaaagggattgcaggatgtgaacttgcggaacttttcatacggccagacatctctggaccgcctgcgcgacggcctcgtgggagcacagttctggagcgcctatgtgccatgccagacccaggatagagacgctttgcggctaactttggaacagattgatctgattcgccggatgtgcgcaagctatagcgaactggagctggtcacctctgctaaggccctgaacgacacacagaaactggcttgtctaattggcgtggaaggtggacatagcctcgacaattctttgtccatccttcccacattctacatgctgggtgtccggtatcttacattgactcatacatgcaacaccccatgggccgagagctcggccaagggagtgcattcattctataataacatcagtgggctgaccgattttggcgaaaaggtggtcgctgaaatgaaccgcctggggatgatggtcgacctgtctcacgtgtctgatgctgtagccaggcgagccctggaagtgagccaagctcctgttatttttagccacagcgcggctaggggcgtgtgcaattccgcacgcaatgtccctgacgacatcctgcagttgttaaagaaaaatggcggagtcgtcatggtgtctcttagcatgggagtgattcaatgtaacccatccgcaaacgtgagcacagtagcagaccatttcgatcatatcaaggcggtaatcgggagtaaattcatcggcatagggggcgactatgatggcgctgggaagttcccgcagggactggaagacgtgtccacctatcctgtgctgattgaggaactgctgagcagaggttggagcgaagaagagctccaaggggtgctgcggggcaatctgctcagagtgtttaggcaggtagagaaagtccaggaggagaacaagtggcagagccctttggaagacaaatttccagacgagcagctgtccagcagttgccattctgatctgtctaggttgcgacagcggcaatcgcttactagtggacaggagctcactgaaataccgatacattggactgccaagctcccagctaaatggagtgtgagcgaaagctccccccatatggcgcctgtactagcagtggtagctacgttcccagttttgattctatggctgtag

SEQ ID NO: 211942 - DNA, 1200 bp, Artificial Sequence
  derived and/or modified sequence
atgcaaccttcaggattggaaggacctggaacgtttggcaggtggcccttgctaagcttgctgctgctgctgcttctcctccagcctgttacctgtgcttacacaacaccgggtccgcctcgagccctcttttggtctgcctacgtcccttgccagacacaggatagggatgcccttaggctgactctggagcagatcgatttgatccgaaggatgtgcgcgtcctattctgaactggagctggtaacgagcgccaaggcactaaacgacacacagaaacttgcatgtctgattggtgtggaaggaggccacagcctcgataacagcctatcgattctgcctactttctatatgctgggtgtgcggtatttaaccctaacacacacttgcaacacaccctgggcggaatcaagtgccaagggtgtgcacagtttttacaacaatatttccggactgaccgactttggtgagaaggtcgttgctgagatgaatcgcctgggaatgatggttgatctcagccacgtttcagatgcagtggctcgcagagctttggaggtctctcaggcgcctgttatcttctcacatagcgccgctcgtggagtgtgtaatagcgcaagaaatgtgcctgatgacatactgcaactcctgaagaaaaatggcggagtcgtgatggtgtccctcagtatgggcgtaatccagtgtaatccatcggccaacgtgtcaaccgtggctgaccacttcgatcacataaaggccgtcattggttctaagtttatcggcatcggtggggactatgacggagcgggaaagttccctcagggactggaggatgtgtctacatacccagtgctgattgaggagctattgtcgcgcggttggagtgaagaagaactccagggggtgttgaggggaaacctgctgcgggtgttccgtcaggtggaaaaggtccaggaggaaaataaatggcagtcacctctagaagataaattcccagacgaacagctgagctctagctgtcactctgacctgagcaggttacggcagagacagtctctgacctcaggccaggaactcacagagatacccatccactggactgccaagctcccagccaagtggagcgtgagcgaaagcagtccgcatatggctccagtgttggctgtggtcgctacctttccggttctgattttgtggctgtag

SEQ ID NO: 211943 - DNA, 1461 bp, Artificial Sequence
  derived and/or modified sequence
atgcagcctagcggactcgaaggtcctggaacctttggcagatggccacttctgagcctgctcctgctcctcctgctcttgcagccggtgacttgcgcctacaccacacctggacctcccagggccctaactacgctcggcgcacctcgggcacacacaatgcccggaacttatgctccttctacaactctctcctcgccctccacacagggcttacaggagcaagccagagcccttatgcgcgattttccactagtggacggccacaatgacctgccacttgtccttcgccaggtgtatcagaagggtctgcaggatgtgaacctgaggaacttcagttacgggcagacatctctcgatagattgcgcgacggcctagttggggcacaattctggagcgcttatgttccatgtcaaacccaggatcgggatgcccttcgtttaacactcgaacagatagatttaatcaggaggatgtgtgcttcctactctgaactggaactcgtcacctcggcaaaagccctcaatgacacccagaagctcgcctgcctgatcggggttgaaggcggacactcactcgacaatagcctgagcattctccctaccttttacatgttgggagtgcgatatctcactctgacccacacctgcaacacgccctgggccgagtcttccgcgaagggcgtgcactccttctataacaacataagtggcctcaccgactttggggagaaagtcgttgccgagatgaacaggttagggatgatggttgacctgtcccacgtcagcgacgctgtcgctcggagagctctggaggtatcacaagcccctgtcattttcagccactctgcagcccgaggagtctgtaatagcgccaggaacgtgcccgacgacatcctgcagctgctcaagaagaatgggggtgtggtgatggtgtcactcagcatgggcgtgatccagtgcaatcccagcgccaacgtcagtaccgtggccgatcactttgatcatattaaggctgtcataggttctaagttcatcggcattgggggagactatgacggggctggcaaattccctcaagggcttgaggacgtctccacatacccggtgttgattgaggaattgctctctcggggatggtccgaagaggaactccaaggggtcttgagaggcaatcttctgagagtgttccgccaggtggaaaaggtacaggaggaaaataagtggcagtcccctctagaggataagttcccggacgagcagctctcatcctcttgtcattctgacctgagccgactcaggcaacggcaatccttgactagcggccaggagttaactgagatccctatccattggaccgccaaactcccggctaagtggagtgtgtcggagagttctcctcatatggcacccgtcttggcagtcgttgcaacattcccagtgctcatactctggctgtag

SEQ ID NO: 211944 - DNA, 1461 bp, Artificial Sequence
  derived and/or modified sequence
atgcagccctcaggacttgagggtccaggcacgtttggtcggtggccactgttgtccctccttttgctgttgctcctcctgcagcccgtaacatgcgcttacactaccccaggacctccgagggcactgacgaccctgggggctccaagggcacataccatgcctgggacatatgccccatcaaccacactgagctccccctcaacacagggcctccaggaacaagctagggccctaatgcgtgacttcccactcgtcgacggccacaatgatcttccgctggtcctgcgtcaggtgtaccagaagggcctgcaggacgtgaacctgagaaacttctcgtacggacagacgtctctcgacaggcttagggacggactggtgggtgcccagttctggtctgcctatgtaccttgccagacccaagaccgcgacgctctgaggcttacacttgagcaaatcgacctgatccgaaggatgtgtgccagctatagcgagctggaattggtgacatctgctaaggccctgaatgatacccagaagctcgcatgcctaattggcgtggaggggggacattccctggacaactccctgagcatcctgcccactttctacatgctcggagtcagatacctaacactcacgcacacctgcaatactccatgggccgaatcctcagcgaagggggtgcattctttctacaacaatattagtggccttactgactttggcgagaaagttgtagcggagatgaaccggctggggatgatggtcgacctgtcccatgtttctgatgccgtcgctcgtagagccttggaggtgagccaggccccagtcatattctcacatagcgcagcacgcggagtgtgcaattccgcaagaaacgtgcccgatgatatccttcaactcctcaaaaagaatggcggagtcgtgatggtgagtctcagtatgggtgtcatccagtgtaacccctctgctaatgtttctactgtggccgatcactttgaccatattaaagccgtgataggctcgaagtttattggcataggcggagactatgatggagccggtaaatttcctcaggggctggaagacgtctcgacctatccagtgcttatagaggaactgctctctcgcggttggtctgaggaagagctacagggagtgcttaggggcaaccttctgagagtgtttagacaagttgagaaggttcaggaggaaaacaaatggcaaagcccattagaggataaatttccagacgaacagctgagttcaagttgtcactcagatctgtccaggcttaggcaaaggcagtctctcacctcaggccaggaactgactgaaattcctattcattggactgccaaacttccggcaaagtggtccgtctctgagagttcaccacacatggccccagtattagccgttgtggctacgtttccagttctcatcctttggctgtag

SEQ ID NO: 211945 - DNA, 1200 bp, Artificial Sequence
  derived and/or modified sequence
atgcagcccagcggcctggagggccccggcaccttcggcagatggcccctgctgagcctgctgctgctgctgctgctgctgcagcccgtgacctgcgcctacaccacccccggcccccccagagccctgttctggagcgcctacgtgccctgccagacccaggacagagacgccctgagactgaccctggagcagatcgacctgatcagaagaatgtgcgccagctacagcgagctggagctggtgaccagcgccaaggccctgaacgacacccagaagctggcctgcctgatcggcgtggagggcggccacagcctggacaacagcctgagcatcctgcccaccttctacatgctgggcgtgagatacctgaccctgacccacacctgcaacaccccctgggccgagagcagcgccaagggcgtgcacagcttctacaacaacatcagcggcctgaccgacttcggcgagaaggtggtggccgagatgaacagactgggcatgatggtggacctgagccacgtgagcgacgccgtggccagaagagccctggaggtgagccaggcccccgtgatcttcagccacagcgccgccagaggcgtgtgcaacagcgccagaaacgtgcccgacgacatcctgcagctgctgaagaagaacggcggcgtggtgatggtgagcctgagcatgggcgtgatccagtgcaaccccagcgccaacgtgagcaccgtggccgaccacttcgaccacatcaaggccgtgatcggcagcaagttcatcggcatcggcggcgactacgacggcgccggcaagttcccccagggcctggaggacgtgagcacctaccccgtgctgatcgaggagctgctgagcagaggctggagcgaggaggagctgcagggcgtgctgagaggcaacctgctgagagtgttcagacaggtggagaaggtgcaggaggagaacaagtggcagagccccctggaggacaagttccccgacgagcagctgagcagcagctgccacagcgacctgagcagactgagacagagacagagcctgaccagcggccaggagctgaccgagatccccatccactggaccgccaagctgcccgccaagtggagcgtgagcgagagcagcccccacatggcccccgtgctggccgtggtggccaccttccccgtgctgatcctgtggctgtag

SEQ ID NO: 211946 - DNA, 1461 bp, Artificial Sequence
  derived and/or modified sequence
atgcagcccagcggcctggagggccccggcaccttcggcagatggcccctgctgagcctgctgctgctgctgctgctgctgcagcccgtgacctgcgcctacaccacccccggcccccccagagccctgaccaccctgggcgcccccagagcccacaccatgcccggcacctacgcccccagcaccaccctgagcagccccagcacccagggcctgcaggagcaggccagagccctgatgagagacttccccctggtggacggccacaacgacctgcccctggtgctgagacaggtgtaccagaagggcctgcaggacgtgaacctgagaaacttcagctacggccagaccagcctggacagactgagagacggcctggtgggcgcccagttctggagcgcctacgtgccctgccagacccaggacagagacgccctgagactgaccctggagcagatcgacctgatcagaagaatgtgcgccagctacagcgagctggagctggtgaccagcgccaaggccctgaacgacacccagaagctggcctgcctgatcggcgtggagggcggccacagcctggacaacagcctgagcatcctgcccaccttctacatgctgggcgtgagatacctgaccctgacccacacctgcaacaccccctgggccgagagcagcgccaagggcgtgcacagcttctacaacaacatcagcggcctgaccgacttcggcgagaaggtggtggccgagatgaacagactgggcatgatggtggacctgagccacgtgagcgacgccgtggccagaagagccctggaggtgagccaggcccccgtgatcttcagccacagcgccgccagaggcgtgtgcaacagcgccagaaacgtgcccgacgacatcctgcagctgctgaagaagaacggcggcgtggtgatggtgagcctgagcatgggcgtgatccagtgcaaccccagcgccaacgtgagcaccgtggccgaccacttcgaccacatcaaggccgtgatcggcagcaagttcatcggcatcggcggcgactacgacggcgccggcaagttcccccagggcctggaggacgtgagcacctaccccgtgctgatcgaggagctgctgagcagaggctggagcgaggaggagctgcagggcgtgctgagaggcaacctgctgagagtgttcagacaggtggagaaggtgcaggaggagaacaagtggcagagccccctggaggacaagttccccgacgagcagctgagcagcagctgccacagcgacctgagcagactgagacagagacagagcctgaccagcggccaggagctgaccgagatccccatccactggaccgccaagctgcccgccaagtggagcgtgagcgagagcagcccccacatggcccccgtgctggccgtggtggccaccttccccgtgctgatcctgtggctgtag

SEQ ID NO: 211947 - DNA, 1309 bp, Artificial Sequence
  derived and/or modified sequence
atgcagccctccggcctcgagggtcccggcacgtttggtcggtggcctctgctgagtctgctgctcctgctgctgctgctccagcctgtaacctgtgcctacaccacgccaggcccccccagagccctcttctggtcagcctatgtgccatgccagacccaggaccgggatgccctgcgcctcaccctggagcagattgacctcatacgccgcatgtgtgcctcctattctgagctggagcttgtgacctcggctaaagctctgaacgacactcagaaattggcctgcctcatcggtgtagagggtggccactcgctggacaatagcctctccatcttacctaccttctacatgctgggagtgcgctacctgacgctcacccacacctgcaacacaccctgggcagagagctccgctaagggcgtccactccttctacaacaacatcagcgggctgactgactttggtgagaaggtggtggcagaaatgaaccgcctgggcatgatggtagacttatcccatgtctcagatgctgtggcacggcgggccctggaagtgtcacaggcacctgtgatcttctcccactcggctgcccggggtgtgtgcaacagtgctcggaatgttcctgatgacatcctgcagcttctgaagaagaacggtggcgtcgtgatggtgtctttgtccatgggagtaatacagtgcaacccatcagccaatgtgtccactgtggcagatcacttcgaccacatcaaggctgtcattggatccaagttcatcgggattggtggagattatgatggggccggcaaattccctcaggggctggaagacgtgtccacatacccggtcctgatagaggagttgctgagtcgtggctggagtgaggaagagcttcagggtgtccttcgtggaaacctgctgcgggtcttcagacaagtggaaaaggtacaggaagaaaacaaatggcaaagccccttggaggacaagttcccggatgagcagctgagcagttcctgccactccgacctctcacgtctgcgtcagagacagagtctgacttcaggccaggaactcactgagattcccatacactggacagccaagttaccagccaagtggtcagtctcagagtcctccccccacatggccccagtccttgcagttgtggccaccttcccagtccttattctgtggctctgatgacccagttagtcctgccagatgtcactgtagcaagccacagacaccccacaaagttcccctgttgtgcaggcacaaatatttcctgaaataaatgttttggacatag

SEQ ID NO: 211948 - DNA, 1697 bp, Artificial Sequence
  derived and/or modified sequence
cggaattggtgggttcttggtctcactgagttctagaatgaagctgcagaccctcgcagtgagtgttacagctcttaaggctctctgactgccacccctgcctgcctgcccggccctgcacaacatgcagccctccggcctcgagggtcccggcacgtttggtcggtggcctctgctgagtctgctgctcctgctgctgctgctccagcctgtaacctgtgcctacaccacgccaggcccccccagagccctcaccacgctgggcgcccccagagcccacaccatgccgggcacctacgctccctcgaccacactcagtagtcccagcacccagggcctgcaagagcaggcacgggccctgatgcgggacttcccgctcgtggacggccacaacgacctgcccctggtcctaaggcaggtttaccagaaagggctacaggatgttaacctgcgcaatttcagctacggccagaccagcctggacaggcttagagatggcctcgtgggcgcccagttctggtcagcctatgtgccatgccagacccaggaccgggatgccctgcgcctcaccctggagcagattgacctcatacgccgcatgtgtgcctcctattctgagctggagcttgtgacctcggctaaagctctgaacgacactcagaaattggcctgcctcatcggtgtagagggtggccactcgctggacaatagcctctccatcttacctaccttctacatgctgggagtgcgctacctgacgctcacccacacctgcaacacaccctgggcagagagctccgctaagggcgtccactccttctacaacaacatcagcgggctgactgactttggtgagaaggtggtggcagaaatgaaccgcctgggcatgatggtagacttatcccatgtctcagatgctgtggcacggcgggccctggaagtgtcacaggcacctgtgatcttctcccactcggctgcccggggtgtgtgcaacagtgctcggaatgttcctgatgacatcctgcagcttctgaagaagaacggtggcgtcgtgatggtgtctttgtccatgggagtaatacagtgcaacccatcagccaatgtgtccactgtggcagatcacttcgaccacatcaaggctgtcattggatccaagttcatcgggattggtggagattatgatggggccggcaaattccctcaggggctggaagacgtgtccacatacccggtcctgatagaggagttgctgagtcgtggctggagtgaggaagagcttcagggtgtccttcgtggaaacctgctgcgggtcttcagacaagtggaaaaggtacaggaagaaaacaaatggcaaagccccttggaggacaagttcccggatgagcagctgagcagttcctgccactccgacctctcacgtctgcgtcagagacagagtctgacttcaggccaggaactcactgagattcccatacactggacagccaagttaccagccaagtggtcagtctcagagtcctccccccacatggccccagtccttgcagttgtggccaccttcccagtccttattctgtggctctgatgacccagttagtcctgccagatgtcactgtagcaagccacagacaccccacaaagttcccctgttgtgcaggcacaaatatttcctgaaataaatgttttggacatagaaa

SEQ ID NO: 211949 - DNA, 2236 bp, Artificial Sequence
  derived and/or modified sequence
agactattgtttcttgggaattgtctgtatcagacatcatgggagcagatccagggcgacatcaaagggaagcatgagtctccaggaccagaggggcttggatgcagatgatcatcatctgggcactgctggatactgaagttctcattatgttgcctagactggtctcaaacctccggcttcaagagatcctctcacctcgaccttcaaattactgggattacaggcatgagccaccatgtcctaccagactttgttaaaagaggaacaggccaggcatcgtgggctcacatgaacactcatgccccagaagtaaacaagtgttagccaaccaggaggcctatcctccccctaacctcacccaaagccatctctgtgccctcccccttgcaggggaaacagcacacactagtgaaatcttgtcttagtgtgtccggaattggtgggttcttggtctcactgagttctagaatgaagctgcagaccctcgcagtgagtgttacagctcttaaggtagcgcgtctggagtttgtttcttttgatgtttggatgtttggagtttcttccttctggtgggtttgtggtcttgttggctcaggagtgaagctgcagaccttcgtggctctctgactgccacccctgcctgcctgcccggccctgcacaacatgcagccctccggcctcgagggtcccggcacgtttggtcggtggcctctgctgagtctgctgctcctgctgctgctgctccagcctgtaacctgtgcctacaccacgccaggcccccccagagccctcaccacgctgggcgcccccagagcccacaccatgccgggcacctacgctccctcgaccacactcagtagtcccagcacccagggcctgcaagagcaggcacgggccctgatgcgggacttcccgctcgtggacggccacaacgacctgcccctggtcctaaggcaggtttaccagaaagggctacaggatgttaacctgcgcaatttcagctacggccagaccagcctggacaggcttagagatggcctcgtgggcgcccagttctggtcagcctatgtgccatgccagacccaggaccgggatgccctgcgcctcaccctggagcagattgacctcatacgccgcatgtgtgcctcctattctgagctggagcttgtgacctcggctaaagctctgaacgacactcagaaattggcctgcctcatcggtgtagagggtggccactcgctggacaatagcctctccatcttacctaccttctacatgctgggagtgcgctacctgacgctcacccacacctgcaacacaccctgggcagagagctccgctaagggcgtccactccttctacaacaacatcagcgggctgactgactttggtgagaaggtggtggcagaaatgaaccgcctgggcatgatggtagacttatcccatgtctcagatgctgtggcacggcgggccctggaagtgtcacaggcacctgtgatcttctcccactcggctgcccggggtgtgtgcaacagtgctcggaatgttcctgatgacatcctgcagcttctgaagaagaacggtggcgtcgtgatggtgtctttgtccatgggagtaatacagtgcaacccatcagccaatgtgtccactgtggcagatcacttcgaccacatcaaggctgtcattggatccaagttcatcgggattggtggagattatgatggggccggcaaattccctcaggggctggaagacgtgtccacatacccggtcctgatagaggagttgctgagtcgtggctggagtgaggaagagcttcagggtgtccttcgtggaaacctgctgcgggtcttcagacaagtggaaaaggtacaggaagaaaacaaatggcaaagccccttggaggacaagttcccggatgagcagctgagcagttcctgccactccgacctctcacgtctgcgtcagagacagagtctgacttcaggccaggaactcactgagattcccatacactggacagccaagttaccagccaagtggtcagtctcagagtcctccccccacatggccccagtccttgcagttgtggccaccttcccagtccttattctgtggctctgatgacccagttagtcctgccagatgtcactgtagcaagccacagacaccccacaaagttcccctgttgtgcaggcacaaatatttcctgaaataaatgttttggacatag

SEQ ID NO: 211950 - protein, 513 aa, Artificial Sequence
  derived and/or modified sequence
MIRTPLSASAHRLLLPGSRGRPPRNMQPTGREGSRALSRRYLRRLLLLLLLLLLRQPVTRAETTPGAPRALSTLGSPSLFTTPGVPSALTTPGLTTPGTPKTLDLRGRAQALMRSFPLVDGHNDLPQVLRQRYKNVLQDVNLRNFSHGQTSLDRLRDGLVGAQFWSASVSCQSQDQTAVRLALEQIDLIHRMCASYSELELVTSAEGLNSSQKLACLIGVEGGHSLDSSLSVLRSFYVLGVRYLTLTFTCSTPWAESSTKFRHHMYTNVSGLTSFGEKVVEELNRLGMMIDLSYASDTLIRRVLEVSQAPVIFSHSAARAVCDNLLNVPDDILQLLKKNGGIVMVTLSMGVLQCNLLANVSTVADHFDHIRAVIGSEFIGIGGNYDGTGRFPQGLEDVSTYPVLIEELLSRSWSEEELQGVLRGNLLRVFRQVEKVREESRAQSPVEAEFPYGQLSTSCHSHLVPQNGHQATHLEVTKQPTNRVPWRSSNASPYLVPGLVAAATIPTFTQWLC

SEQ ID NO: 211951 - DNA, 1542 bp, Artificial Sequence
  derived and/or modified sequence
atgataaggacccctttgagtgctagcgcgcataggcttttacttcccgggtctagaggcaggcctccaagaaatatgcaacccacgggcagggaagggtctcgcgccctgagccggcgctacttacgtaggctactgctgttgctgctcctgcttcttttacgtcaacctgtcacaagggcagagactactcccggtgccccccgagcgttgagcacactcgggtcccctagtctgtttacaaccccgggggtgccttccgcgttgactactcccggcctcaccactccggggacgccgaaaacactcgacctcagaggccgtgcccaggccctgatgcgctcctttccccttgtggacgggcataacgatttgccgcaggttcttagacagcgttataagaacgtcctgcaggacgtgaacctgaggaatttttcccacggacagaccagcctagatcgactgagggacgggctggtcggcgcacagttctggagcgcctcggtgtcttgccagagtcaagatcagaccgccgtcagacttgcactggagcagatcgatctgatccacagaatgtgcgctagttattcagaactggaactggttacgagtgccgagggtctgaattcctcacaaaagctggcttgcctgatcggggtagaagggggacattccctcgatagcagcctgtctgtccttaggagtttctacgtgctgggagtgcgatatctgacccttacattcacatgcagtacaccctgggcagaatcctctaccaagtttcggcatcatatgtatacgaatgtgagtgggctgacatctttcggcgaaaaggtggtggaagaactgaacaggttggggatgatgatcgatctgtcttatgcttccgacacgctcattagaagggtgctggaggtcagtcaggcccccgtgattttcagtcacagcgcggcccgggctgtctgcgataatctattaaacgtccccgacgacattcttcaattgcttaaaaagaatggtggcattgtgatggtaacgctcagcatgggagttttgcagtgcaacctgctggctaatgtgtcaacggtagccgaccacttcgaccacattagagctgtgatcggcagcgagtttattgggatcggcggcaactacgacggcaccgggcggtttcctcagggcttggaagacgtgtctacttaccctgtcctcatcgaagagctcctctctaggtcttggtccgaggaggagctgcagggggtgctgcgaggtaatcttctcagagtgtttcggcaggtggagaaagtgagggaagagagtcgggcacaaagtcccgtggaggccgagttcccctacggacaactctccacctcttgtcattcccatctggtcccccagaatgggcatcaggccacacacctggaggttacaaaacagccaaccaatcgagtgccatggcgcagttctaatgcctccccctacttggtcccgggactggtcgctgccgcaactataccgacattcacccagtggctctgctag

SEQ ID NO: 211952 - DNA, 1542 bp, Artificial Sequence
  derived and/or modified sequence
atgatccgcacccccctgagcgccagcgcccaccggctgctgctgcccggcagccggggccggccccccaggaacatgcagcccaccggccgggagggcagccgggccctgagccgccgctacctgcggcggctgctgctgctgctgctgctgctgctgctgcggcagcctgtgaccagggctgagaccacccctggggccccccgggccctgagcaccctgggcagccccagcctcttcaccaccccaggagtgcccagcgccctgaccaccccaggcctgaccaccccaggcacccccaagaccctggacctgcggggccgggcccaggccctgatgaggagcttccccctggtggatggccacaatgacctgccccaggtgctgcggcagcgctacaagaatgtgctgcaggatgtgaacctgaggaacttcagccacggccagaccagcctggaccggctgagagatggcctggtgggcgcccagttctggagcgcctctgtgtcctgccagagccaggaccagacagctgtgcggctggccctggagcagattgacctgatccacaggatgtgtgccagctacagcgagctggagctggtgaccagcgctgagggcctgaacagcagccagaagctggcctgcctgattggagtggagggcggccacagcctggacagcagcctgtctgtgctgcgctccttctacgtgctgggcgtgcgctacctgaccctgaccttcacctgcagcaccccctgggccgagagcagcaccaagttccgccaccacatgtacaccaacgtgtctggcctgaccagctttggagagaaggtggtggaggagctgaaccggctgggcatgatgattgacctgtcctatgccagtgacaccctcatcagaagagtgctggaggtgtcccaggcccctgtgatcttcagccacagcgctgcccgggctgtgtgtgacaacctgctgaatgtgcctgatgacatcctgcagctgctgaagaagaatggaggcatcgtgatggtgaccctgtccatgggcgtgctgcagtgcaacctgctggccaacgtgtccacagtggccgaccactttgaccacatccgggccgtcatcggcagcgagttcatcggcattggaggcaactatgatggcaccggccgcttcccccagggcctggaggatgtgtccacctaccctgtgctgattgaggagctgctgagccgctcctggagcgaggaggagctgcagggcgtgctgcggggcaacctgctgcgggtcttccggcaggtggagaaggtgcgggaggagagccgggcccagagccctgtggaggccgagttcccctacggccagctgagcaccagctgccacagccacctggtgccccagaatggccaccaggccacccacctggaggtgaccaagcagcccaccaacagagtgccctggaggagcagcaatgccagcccctacctggtgcccggcctggtggccgccgccaccatccccaccttcacccagtggctgtgctag

SEQ ID NO: 211953 - DNA, 1542 bp, Artificial Sequence
  derived and/or modified sequence
atgatccggacccccctgagcgccagcgcccaccggctgctgctgcccggttcaagaggaaggccacctagaaatatgcagcctaccgggcgagagggaagtcgggccctctctagaaggtacctacgccgactgttgttacttctgctcctgctgctgttacgccagcctgtaacaagggcagaaactacacctggtgctccacgcgctttatctacccttggctcacccagcctcttcaccactcctggggtccccagtgcactgaccaccccaggcttgaccacacccggcacacccaagacactggatctgagggggagagcccaagctctgatgcgtagttttccactagtggacgggcacaacgaccttccccaggtgttgagacagcgatacaaaaatgtcctgcaggacgtgaatctgagaaacttctctcacgggcaaacatcgttggatcggttacgcgacgggcttgtcggcgcccagttctggtctgcctctgtgtcttgccagagtcaggatcagaccgctgtccgactagctctggaacagatagacctgatccaccgcatgtgcgctagttactctgaactagagcttgtcaccagtgctgaaggcctgaattcatctcagaagcttgcatgcctaattggcgtggagggcggtcacagcctggactccagtttatccgtcttgcgctctttttatgtgcttggggtgagatatttaacacttaccttcacatgtagcactccttgggctgaatcatctacgaaattccgacaccacatgtataccaatgtgagcggcctgacctccttcggagaaaaagtagtggaggagctcaataggctggggatgatgatagacctgtcttacgccagtgatacactgattaggagggtgcttgaggtgagccaggccccggtcatatttagtcacagcgcagctcgggcggtttgcgataacctgctgaatgtgcccgatgacatcttgcagctcctgaaaaagaacggcgggatcgtcatggtgaccttgagtatgggggtcctgcaatgtaatctccttgcgaacgtcagcaccgtcgccgatcattttgatcacatacgagccgtgatcggaagcgagtttattgggatcggcggcaactacgatggtacagggagattcccccaagggctggaggatgtgtctacttatccagttctgatcgaggagctcctgtcgcggtcttggagcgaggaggaactccaaggcgtcctgcgcggaaacctgctgagagtattcaggcaagttgagaaggtgcgcgaggaaagcagagcccagtcacccgttgaggctgaattcccctacggacagctgagcactagctgccactcacacttagttcctcagaacgggcaccaggctacccatctcgaagtaacaaaacagcctacaaatagggtgccttggagaagttctaacgcgtccccttatctggtccccggacttgtagccgccgctaccattccgacgttcacccaatggctgtgttag

SEQ ID NO: 211954 - DNA, 1542 bp, Artificial Sequence
  derived and/or modified sequence
atgattcgtaccccgctctcagcctcagcccatcggctcttactacctggatccagaggcagaccgccacgcaatatgcagccgacagggcgagagggaagcagggcgctcagccgaagatatttgagacgcctcctgctgcttttgctcctgctcctcctaaggcagcctgtaaccagggcggagactactccaggagcgcctcgtgcactgagcacgcttggaagtccaagcctgttcacgacccctggcgtcccaagcgcgcttactacaccagggttaaccacacccggtacacctaagacgttggatctgcggggtcgggcacaggctttaatgcggtccttcccattggtggacggacataatgatctcccccaagtgttacgccagcgctacaagaacgtgctgcaggatgttaacctgaggaactttagtcacggtcagaccagtcttgatagactgcgagacggacttgttggagctcagttctggagtgccagcgtgtcatgtcagtcacaggaccagaccgccgtgcggctcgccctagagcagatcgacctcatccatcggatgtgcgcctcctactctgagctggaattagtgacatccgctgagggcctgaacagctcccagaagttggcttgccttattggcgtggagggaggtcactcattggacagcagtctgagcgtgctgcgctccttctatgtcctgggggtgagatatctcacactcacatttacctgctcaacaccgtgggcagagagctccacgaaattcaggcatcatatgtacaccaacgtgagtggtttgaccagcttcggggaaaaggtggttgaagagctgaaccgtctgggcatgatgatcgacttgagctacgcatccgacaccttaattcgccgtgtgctggaagtgtcacaggcgcctgttattttttctcactctgccgcacgggcagtctgtgataacctgctgaatgtacccgacgatatactgcagttgttgaaaaagaatggcggaatagtaatggtgactctatcaatgggagtgctccaatgtaacttgttagctaatgtgagtacagtggcagaccactttgatcatattcgcgctgtaattggtagtgaatttatcggaattggcggaaattacgatggtaccgggaggtttccgcagggactggaagacgtgtcaacctaccctgtcctcattgaagagctgctatcgcggtcatggtccgaggaagagcttcagggggtgctccgcggaaatctactaagggtcttcaggcaggttgagaaagtccgggaggagtcaagagcacagtccccagtggaggccgagttcccttatggccagctgagtacttcctgccactctcacttggtcccccaaaatgggcatcaagccacacaccttgaagtgaccaaacagcctaccaacagagtgccatggcggagtagcaatgccagcccttatcttgtcccgggactggtggctgcagcgactattccaacattcacgcagtggctgtgctag

SEQ ID NO: 211955 - DNA, 1542 bp, Artificial Sequence
  derived and/or modified sequence
atgatcagaacccccctgagcgccagcgcccacagactgctgctgcccggcagcagaggcagaccccccagaaacatgcagcccaccggcagagagggcagcagagccctgagcagaagatacctgagaagactgctgctgctgctgctgctgctgctgctgagacagcccgtgaccagagccgagaccacccccggcgcccccagagccctgagcaccctgggcagccccagcctgttcaccacccccggcgtgcccagcgccctgaccacccccggcctgaccacccccggcacccccaagaccctggacctgagaggcagagcccaggccctgatgagaagcttccccctggtggacggccacaacgacctgccccaggtgctgagacagagatacaagaacgtgctgcaggacgtgaacctgagaaacttcagccacggccagaccagcctggacagactgagagacggcctggtgggcgcccagttctggagcgccagcgtgagctgccagagccaggaccagaccgccgtgagactggccctggagcagatcgacctgatccacagaatgtgcgccagctacagcgagctggagctggtgaccagcgccgagggcctgaacagcagccagaagctggcctgcctgatcggcgtggagggcggccacagcctggacagcagcctgagcgtgctgagaagcttctacgtgctgggcgtgagatacctgaccctgaccttcacctgcagcaccccctgggccgagagcagcaccaagttcagacaccacatgtacaccaacgtgagcggcctgaccagcttcggcgagaaggtggtggaggagctgaacagactgggcatgatgatcgacctgagctacgccagcgacaccctgatcagaagagtgctggaggtgagccaggcccccgtgatcttcagccacagcgccgccagagccgtgtgcgacaacctgctgaacgtgcccgacgacatcctgcagctgctgaagaagaacggcggcatcgtgatggtgaccctgagcatgggcgtgctgcagtgcaacctgctggccaacgtgagcaccgtggccgaccacttcgaccacatcagagccgtgatcggcagcgagttcatcggcatcggcggcaactacgacggcaccggcagattcccccagggcctggaggacgtgagcacctaccccgtgctgatcgaggagctgctgagcagaagctggagcgaggaggagctgcagggcgtgctgagaggcaacctgctgagagtgttcagacaggtggagaaggtgagagaggagagcagagcccagagccccgtggaggccgagttcccctacggccagctgagcaccagctgccacagccacctggtgccccagaacggccaccaggccacccacctggaggtgaccaagcagcccaccaacagagtgccctggagaagcagcaacgccagcccctacctggtgcccggcctggtggccgccgccaccatccccaccttcacccagtggctgtgctag

SEQ ID NO: 211956 - DNA, 1999 bp, Artificial Sequence
  derived and/or modified sequence
aaaccagacagaccgaattaactcttctgagtcgcagcttagaatatttgacctgcctaggagctgggcacaagccggcagctaaccgccacgtgggcctgggtaggaggtgagatcaggaagatccctgggcccctactagttccctgcctggcctcctcccccactcgtgtgggggtctacggagccagcgctgggggtggaagggcgaggagtcctcgacgctgcagcggcggttccggcccatgggggcgctctcctgcttgggggcggaaaagccgtggcgcccccttgcgtggcgcgtcggtctcagagtcgcgtgacttcaaccccctcttcgggaggctgggtcgtcatgatccggaccccattgtcggcctctgcccatcgcctgctcctcccaggctcccgcggccgacccccgcgcaacatgcagcccacgggccgcgagggttcccgcgcgctcagccggcggtatctgcggcgtctgctgctcctgctactgctgctgctgctgcggcagcccgtaacccgcgcggagaccacgccgggcgcccccagagccctctccacgctgggctcccccagcctcttcaccacgccgggtgtccccagcgccctcactaccccaggcctcactacgccaggcacccccaaaaccctggaccttcggggtcgcgcgcaggccctgatgcggagtttcccactcgtggacggccacaatgacctgccccaggtcctgagacagcgttacaagaatgtgcttcaggatgttaacctgcgaaatttcagccatggtcagaccagcctggacaggcttagagacggcctcgtgggtgcccagttctggtcagcctccgtctcatgccagtcccaggaccagactgccgtgcgcctcgccctggagcagattgacctcattcaccgcatgtgtgcctcctactctgaactcgagcttgtgacctcagctgaaggtctgaacagctctcaaaagctggcctgcctcattggcgtggagggtggtcactcactggacagcagcctctctgtgctgcgcagtttctatgtgctgggggtgcgctacctgacacttaccttcacctgcagtacaccatgggcagagagttccaccaagttcagacaccacatgtacaccaacgtcagcggattgacaagctttggtgagaaagtagtagaggagttgaaccgcctgggcatgatgatagatttgtcctatgcatcggacaccttgataagaagggtcctggaagtgtctcaggctcctgtgatcttctcccactcagctgccagagctgtgtgtgacaatttgttgaatgttcccgatgatatcctgcagcttctgaagaagaacggtggcatcgtgatggtgacactgtccatgggggtgctgcagtgcaacctgcttgctaacgtgtccactgtggcagatcactttgaccacatcagggcagtcattggatctgagttcatcgggattggtggaaattatgacgggactggccggttccctcaggggctggaggatgtgtccacatacccagtcctgatagaggagttgctgagtcgtagctggagcgaggaagagcttcaaggtgtccttcgtggaaacctgctgcgggtcttcagacaagtggaaaaggtgagagaggagagcagggcgcagagccccgtggaggctgagtttccatatgggcaactgagcacatcctgccactcccacctcgtgcctcagaatggacaccaggctactcatctggaggtgaccaagcagccaaccaatcgggtcccctggaggtcctcaaatgcctccccataccttgttccaggccttgtggctgctgccaccatcccaaccttcacccagtggctctgctgacacagtcggtccccgcagaggtcactgtggcaaagcctcacaaagccccctctcctagttcattcacaagcatatgctgagaataaacatgttacacatgga

SEQ ID NO: 211957 - protein, 291 aa, Artificial Sequence
  derived and/or modified sequence
MERNSSLWKNLIDEHPVCTTWKQEAEGAIYHLASILFVVGFMGGSGFFGLLYVFSLLGLGFLCSAVWAWVDVCAADIFSWNFVLFVICFMQFVHIAYQVRSITFAREFQVLYSSLFQPLGISLPVFRTIALSSEVVTLEKEHCYAMQGKTSIDKLSLLVSGRIRVTVDGEFLHYIFPLQFLDSPEWDSLRPTEEGIFQVTLTAETDCRYVSWRRKKLYLLFAQHRYISRLFSVLIGSDIADKLYALNDRVYIGKRYHYDIRLPNFYQMSTPEIRRSPLTQHFQNSRRYCDK

SEQ ID NO: 211958 - protein, 101 aa, Artificial Sequence
  derived and/or modified sequence
MLFLCFDRIRVTVDGEFLHYIFPLQFLDSPEWDSLRPTEEGIFQVTLTAETDCRYVSWRRKKLYLLFAQHRYISRLFSVLIGSDIADKLYALNDRVYIGKR

SEQ ID NO: 211959 - DNA, 876 bp, Artificial Sequence
  derived and/or modified sequence
atggagagaaactccagcttgtggaagaatctgattgacgaacaccctgtgtgtactacttggaaacaggaagcagagggtgcgatttaccacctggccagcattctgttcgttgtaggctttatgggtggctccggcttttttggccttttatacgtcttcagcctgctcggcctcggattcctgtgctctgcggtctgggcttgggtcgacgtatgcgcggctgacatcttcagctggaatttcgtgctttttgttatatgcttcatgcagttcgtgcatattgcgtatcaggtgagatccattacttttgcgcgggagtttcaggtgttatacagctccctgtttcagccgttaggtatctccttgccagtgttccgcaccatagctctgagttctgaggtggtgaccctggaaaaggagcattgctacgccatgcagggcaagacctcgatcgataagctgtcactcctcgtatccgggcggatacgggtaacagtagatggggaattcctgcactatatctttccgttgcagtttctcgactctccagagtgggacagtctgagaccaacagaggagggcatttttcaggtgactctgaccgccgaaaccgattgcagatacgtgtcatggcgaagaaagaagctgtatttactgtttgctcagcacaggtacatctctcgccttttctccgtgttgatcggaagcgatatagcagataagctgtacgccttgaacgaccgggtgtacatagggaaaaggtaccattacgacatccgtctccctaacttctatcaaatgtcgacgcctgagattagaaggagcccattgactcagcactttcagaatagtcggcgatattgtgacaagtag

SEQ ID NO: 211960 - DNA, 306 bp, Artificial Sequence
  derived and/or modified sequence
atgctcttcctatgctttgataggatccgggtaactgtagacggcgaatttctgcactatatttttcctctccagttcttggattcccctgagtgggatagcctgcgtccaactgaggaagggatttttcaggtgactctcactgcagagaccgattgccgttatgtgtcgtggagacgaaagaaactgtatctcctgtttgctcaacatcggtacattagcagactattcagcgttcttatcggatctgatatagcggataagctctatgccctgaacgaccgagtgtacatcggtaaacggtag

SEQ ID NO: 211961 - DNA, 876 bp, Artificial Sequence
  derived and/or modified sequence
atggagaggaacagcagcctgtggaagaacctgattgatgagcaccctgtgtgcaccacctggaagcaggaggccgagggcgccatctaccacctggccagcatcctgtttgtggtgggcttcatgggcggcagcggcttcttcggcctgctgtatgtgttcagcctgctgggcctgggcttcctgtgcagcgctgtgtgggcctgggtggatgtgtgtgccgctgacatcttctcctggaactttgtgctgtttgtgatctgcttcatgcagtttgtgcacatcgcctaccaggtgcgcagcatcacctttgcccgggagttccaggtgctgtacagcagcctcttccagcccctgggcatcagcctgcccgtcttccgcaccatcgccctgagcagcgaggtggtgaccctggagaaggagcactgctacgccatgcagggcaagaccagcattgacaagctgagcctgctggtgtctggccgcatccgggtgacagtggatggagagttcctgcactacatcttccccctgcagttcctggacagccctgagtgggacagcctgcggcccacagaggagggcatcttccaggtgaccctgacagctgagacagactgccgctacgtgtcctggaggaggaagaagctgtacctgctgtttgcccagcaccgctacatcagccgcctcttctctgtgctgattggaagtgacattgctgacaagctgtatgccctgaatgacagagtgtacatcggcaagcgctaccactatgacatccggctgcccaacttctaccagatgagcaccccagagatccgccgcagccccctgacccagcacttccagaacagccgccgctactgtgacaagtag

SEQ ID NO: 211962 - DNA, 306 bp, Artificial Sequence
  derived and/or modified sequence
atgctgttcctgtgctttgaccgcatccgggtgacagtggatggagagttcctgcactacatcttccccctgcagttcctggacagccctgagtgggacagcctgcggcccacagaggagggcatcttccaggtgaccctgacagctgagacagactgccgctacgtgtcctggaggaggaagaagctgtacctgctgtttgcccagcaccgctacatcagccgcctcttctctgtgctgattggaagtgacattgctgacaagctgtatgccctgaatgacagagtgtacatcggcaagaggtag

SEQ ID NO: 211963 - DNA, 876 bp, Artificial Sequence
  derived and/or modified sequence
atggagcggaacagcagcctgtggaagaacctgatcgacgagcaccccgtttgcacaacttggaagcaggaggcagagggagcgatttatcatctagcctcaatcctctttgtagtgggctttatggggggatccgggtttttcggcctgttatacgtgttctcgttactgggcttgggctttctctgcagtgccgtgtgggcgtgggtcgatgtgtgtgctgctgacatattcagttggaattttgtacttttcgtaatttgtttcatgcaatttgttcatatcgcctatcaggtgagatcaattaccttcgcacgagagttccaagtgctgtattccagcttgttccagccgctgggcatctcccttcccgtgttccgcactatagcactgagcagcgaagtagtcacactggagaaagaacattgctacgctatgcaggggaagacctccatcgacaagctcagcttgctggtttctgggcgcataagagttaccgtagacggagaattcctccactacatctttcccctgcaattcctggacagtcctgaatgggactccctgcgccccaccgaagaagggatttttcaggttacgctaacagctgagacagactgtcggtatgtatcctggagaagaaagaagctataccttttgttcgcccagcatcggtatatatcccggctgtttagcgtgcttatcggtagcgatatcgcggacaaactatacgccttgaatgatcgagtctacatcggaaaacgctatcactacgatatccgccttcccaacttctaccagatgtccacaccggagattcgtagaagtcctctaactcaacatttccaaaatagtcgccggtattgcgataagtag

SEQ ID NO: 211964 - DNA, 306 bp, Artificial Sequence
  derived and/or modified sequence
atgctgttcctgtgcttcgaccggatccgggtgaccgtggacggcgagtttttgcactatatctttcctttgcagtttctagactctcccgaatgggacagtctgcgtcctactgaagaggggatattccaggtgacactgaccgctgagaccgactgcaggtatgtgtcctggagaaggaaaaagctatatctgttgtttgctcaacatcgatacatctcccggctttttagcgtgctgatcggatcagacatcgccgataagctgtacgccttaaatgatagagtgtacattggcaaaaggtag

SEQ ID NO: 211965 - DNA, 1345 bp, Artificial Sequence
  derived and/or modified sequence
aagctccgggcagggctgggaaggaaaggaaataccaaaatatttgcagactggatccaaatcaggagcccagatgaacttaaagaagcgagcatgggattcttagtttttcaagatccgtacacacgaagcctttaatcagcatcaactccagtgtccgttttctctggttttgtgaagactgcacaaaactctcatgatggagaaccaaaggacttagttacctgtttcagtgtcatctaaagtcaactgaaaagtgaagcaggcagtaatacagccatggaaagaaattcaagtttatggaagaacctaatagatgaacacccagtctgcacaacctggaagcaagaggccgaaggagccatttatcatcttgccagtattttatttgtagtaggtttcatgggtggcagtggattcttcgggctcctttatgtcttcagtttgctggggttgggttttctctgttctgctgtctgggcttgggtagatgtctgtgcagctgacatattttcctggaattttgtactgtttgtcatctgcttcatgcaatttgttcatattgcatatcaagttcgcagcataacctttgcccgagaattccaagtgttgtacagctcccttttccagcccctggggatctctttgcctgtcttcagaacgattgctttgagctctgaagtggttactttggaaaaggaacactgttatgccatgcaggggaaaacttccattgataaactctccttgcttgtttcaggaaggatcagagtgacagttgatggcgaatttctgcattacattttcccccttcagttcctggattctcctgagtgggattcactgagacccacagaggaaggcatttttcaggtaaccctcactgcagaaactgattgtcgatatgtgtcttggaggagaaagaaattatatctgctctttgctcagcatcgctacatctcccgccttttttcagtgctaattggcagtgacattgcagataaactctatgccttgaatgacagggtatatataggaaaaagatatcactatgatattcggctacccaacttctatcaaatgtcaactccagaaatacgcagatcacccctgacacaacattttcagaattccagacgatactgtgataaatgacatcaaagtctgaaatttataagtataaaaaaagactctctcttcatcattccccagtgaaatagcaaaatacaaaaaaagagctccctaatgtttttataaatcaaattcagaagcgagatgccattgccaactgttttattcctttcaacaactgcattgtgaataaactttacaaatttttcttgta

SEQ ID NO: 211966 - DNA, 582 bp, Artificial Sequence
  derived and/or modified sequence
gttttattgaagtataatatgcacacataaatggacatatataaatgtacaacttgatgaattttctgatgaatttcactcaatattccagaatcctgactgtataaggaacatgataacatgaatcttacaggacattatgtcacttattataatgtatgaatttaatattttgcctttcaaaatcataaagggcaagagtcatcagggatctgaaatacacttcctctaccccccacccctccccaattatgtgctctctttctccttcccttataaatgttgttcttgtgttttgataggatcagagtgacagttgatggcgaatttctgcattacattttcccccttcagttcctggattctcctgagtgggattcactgagacccacagaggaaggcatttttcaggtaaccctcactgcagaaactgattgtcgatatgtgtcttggaggagaaagaaattatatctgctctttgctcagcatcgctacatctcccgccttttttcagtgctaattggcagtgacattgcagataaactctatgccttgaatgacagggtatatataggaaaaaga

SEQ ID NO: 211967 - DNA, 876 bp, Artificial Sequence
  derived and/or modified sequence
atggaaagaaatagctcactttggaaaaatctcatagacgaacatcctgtgtgcactacgtggaaacaagaggccgaaggggcaatctatcacctggctagcatcctattcgtggtgggattcatggggggtagtggtttctttgggctgctttacgtgttctcgctcctgggcctgggctttctttgttccgccgtttgggcttgggttgatgtgtgtgccgctgatatctttagctggaattttgtgctgttcgttatctgctttatgcagtttgtgcatattgcttaccaagtgcgatctattacattcgcaagagaatttcaggtgctgtatagcagcctgtttcagcctcttgggatctccctccctgttttccgcaccatcgccctgtcatcagaggtcgtaactctcgaaaaagaacattgctatgcaatgcaggggaagacgtctattgacaagcttagtctgctcgtttccggaagaatccgtgtaacggtggacggagagttccttcactatatctttccgctccagtttctcgacagccccgaatgggactcccttaggcctacagaggaggggatctttcaggtcacactcacggccgagaccgactgtcgatatgtcagttggagaaggaaaaagttgtacctgctgttcgctcagcatcgctatatctctcggctgttctccgtgctgattgggtcagacatcgcagataaactgtatgctttgaacgatagagtgtacataggcaaacggtatcattatgatatcaggctgccaaacttttaccaaatgtctactccagaaatacgcaggagccctctgactcagcatttccagaattccaggaggtactgcgataaatag

SEQ ID NO: 211968 - DNA, 306 bp, Artificial Sequence
  derived and/or modified sequence
atgctttttctttgcttcgacaggatcagggtaactgtagatggtgaattcctccattacatattccctttgcagtttctggatagcccagaatgggactcccttcgccctaccgaagagggaatatttcaggtcacacttacggccgagactgactgccgctacgtgagttggagacgaaagaaactctaccttttgttcgcacaacacaggtacatatcaagactgttcagtgttttgattggcagcgatatcgcggataaattgtatgctctcaatgatcgggtgtacattggcaagcgttag

SEQ ID NO: 211969 - DNA, 876 bp, Artificial Sequence
  derived and/or modified sequence
atggagagaaacagcagcctgtggaagaacctgatcgacgagcaccccgtgtgcaccacctggaagcaggaggccgagggcgccatctaccacctggccagcatcctgttcgtggtgggcttcatgggcggcagcggcttcttcggcctgctgtacgtgttcagcctgctgggcctgggcttcctgtgcagcgccgtgtgggcctgggtggacgtgtgcgccgccgacatcttcagctggaacttcgtgctgttcgtgatctgcttcatgcagttcgtgcacatcgcctaccaggtgagaagcatcaccttcgccagagagttccaggtgctgtacagcagcctgttccagcccctgggcatcagcctgcccgtgttcagaaccatcgccctgagcagcgaggtggtgaccctggagaaggagcactgctacgccatgcagggcaagaccagcatcgacaagctgagcctgctggtgagcggcagaatcagagtgaccgtggacggcgagttcctgcactacatcttccccctgcagttcctggacagccccgagtgggacagcctgagacccaccgaggagggcatcttccaggtgaccctgaccgccgagaccgactgcagatacgtgagctggagaagaaagaagctgtacctgctgttcgcccagcacagatacatcagcagactgttcagcgtgctgatcggcagcgacatcgccgacaagctgtacgccctgaacgacagagtgtacatcggcaagagataccactacgacatcagactgcccaacttctaccagatgagcacccccgagatcagaagaagccccctgacccagcacttccagaacagcagaagatactgcgacaagtag

SEQ ID NO: 211970 - DNA, 306 bp, Artificial Sequence
  derived and/or modified sequence
atgctgttcctgtgcttcgacagaatcagagtgaccgtggacggcgagttcctgcactacatcttccccctgcagttcctggacagccccgagtgggacagcctgagacccaccgaggagggcatcttccaggtgaccctgaccgccgagaccgactgcagatacgtgagctggagaagaaagaagctgtacctgctgttcgcccagcacagatacatcagcagactgttcagcgtgctgatcggcagcgacatcgccgacaagctgtacgccctgaacgacagagtgtacatcggcaagagatag

SEQ ID NO: 211971 - protein, 402 aa, Artificial Sequence
  derived and/or modified sequence
MMVHCAGCERPILDRFLLNVLDRAWHIKCVQCCECKTNLSEKCFSREGKLYCKNDFFRRFGTKCAGCAQGISPSDLVRKARSKVFHLNCFTCMVCNKQLSTGEELYVIDENKFVCKDDYLSSSSLKEGSLNSVSSCTDRSLSPDLQDALQDDPKETDNSTSSDKETANNENEEQNSGTKRRGPRTTIKAKQLETLKAAFAATPKPTRHIREQLAQETGLNMRVIQVWFQNRRSKERRMKQLSALGARRHAFFRSPRRMRPLGGRLDESEMLGSTPYTYYGDYQGDYYAPGSNYDFFAHGPPSQAQSPADSSFLAASGPGSTPLGALEPPLAGPHAADNPRFTDMISHPDTPSPEPGLPGTLHPMPGEVFSGGPSPPFPMSGTSGYSGPLSHPNPELNEAAVW

SEQ ID NO: 211972 - DNA, 2084 bp, Artificial Sequence
  derived and/or modified sequence
aaccaggtacaagctaatactcaacaatactgatgccttgttttttttgctctgtccggacagcaacgctgtagccaatttagatatgctataaatttaagaggttgccatggccacggtgcgcccattggccgctgggccccctacgtgcagcgccacgtcaccaaatctgaataaggatgcgcgaattacgcggcgaccagacaaagatgaggatccggaccgcttgaaagtgggggaaagtgccggcgcctccgccaccggggaaagccgctccgcagcgccgaggccagcagccacccgagatacctggggaagcccggaacaggcgccggggcgtgcggcccgtggcatgaggttgtgaacgccacccgccccccaccaccccactccgggcagcccagcgccaggccagagattgcccaaggactggaccggctgagtcttggtccggaccagactcgccctgcagctgctgagacaagaggcgaagggcagcggagggcccggcaggcccgagggccaggggcccaaagggagggcaaggcggccgaagccgccggggcgcggggctatgatggtgcactgcgccggttgcgagcggcccatcctcgaccgctttctgctgaacgtgctggaccgcgcgtggcacatcaaatgtgttcagtgctgcgagtgcaaaaccaacctctcggagaagtgcttctcgcgcgagggcaagctctactgcaaaaatgactttttcaggcgctttggcacgaaatgcgccggctgcgcgcaaggcatctcgcccagcgacctggtgcgcaaggcccggagcaaagtctttcacctcaactgtttcacctgcatggtgtgtaacaagcagctgtccaccggcgaggagctctacgtcatcgacgagaacaagttcgtgtgcaaagacgactacctgagctcatccagcctcaaggagggcagcctcaactcagtgtcatcctgtacggaccgcagtttgtccccggacctccaggacgcactgcaggacgaccccaaagagacggacaactcgacctcgtcggacaaggagacggccaacaacgagaacgaggagcagaactcgggcaccaagcggcgcggcccccgcaccaccatcaaggccaagcagctggagacgctcaaggctgccttcgccgccacgcccaagcccacgcgccacatccgcgagcagctggcgcaggagaccggcctcaacatgcgcgtcatccaggtgtggtttcagaaccgacggtccaaagaacgccggatgaaacagctgagcgccctaggcgcccggaggcacgccttcttccggagtccgcggcgcatgcgtccgctgggcggccgcttggacgagtctgagatgttggggtccaccccgtacacctactacggagactaccaaggcgactactacgcgccgggaagcaactacgacttcttcgcgcacggcccgccttcgcaggcgcagtccccggccgactccagcttcctggcggcctctggccccggctcgacgccgctgggagcgctggaaccgccgctcgccggcccgcacgccgcggacaaccccaggttcaccgacatgatctcgcacccggacacaccgagccccgagccaggcctgccgggcacgctgcaccccatgcccggcgaggtattcagcggcgggcccagcccgcccttcccaatgagcggcaccagcggctacagcggacccctgtcgcatcccaaccccgagctcaacgaagccgccgtgtggtaaggccgccgggccgccccccgcgctcggcccccgggggccccgccccgaagcagcctcctgaaaccaaaacgcccgacgcagacgcggtgggagacgtgggtgtccctcgggggttctctctcgggtccgcactcaactggcagctgctcctcggctgggcgccgagggggggccgacccccatctccaccccgcgggctctccaggagcctcagcccaccgccagtactctcccagcaaccgcgagcaatttcttgggaccaaagtcaatactccggagggtcaagagatttcgagcacgc

SEQ ID NO: 211973 - DNA, 1209 bp, Artificial Sequence
  derived and/or modified sequence
atgatggtgcattgcgccggatgtgaacggcctattttggatagattcctcttgaatgtactggatcgcgcctggcacattaagtgtgtgcagtgttgtgagtgcaaaacgaacttaagtgagaagtgcttcagccgcgagggcaaactctactgcaaaaatgatttctttagacgatttggaaccaagtgtgctggctgtgcgcaaggcatttcgcccagtgacctcgtccggaaagcgcgctcgaaggtgttccacttgaattgcttcacttgcatggtgtgtaacaaacagttaagtactggcgaggaactatacgttatcgacgagaataagttcgtctgtaaggacgactacctgagcagctcttccctgaaggaaggctctctgaacagcgttagctcctgcactgacaggagcttgtctcctgacctgcaggacgctctgcaggatgaccctaaggagactgacaatagtacctcgagcgacaaagagaccgcgaacaatgagaacgaagaacagaactcggggacaaagcggagaggaccacgcacgaccatcaaagccaagcagctcgagacactgaaagccgctttcgcagctacccctaagcccacacggcatatccgtgagcagttggcccaggaaactgggctgaatatgagggtcattcaggtctggttccagaataggagaagcaaggagcgccgcatgaagcagctgagcgccctcggagccaggcggcatgccttcttccggtccccccgtcggatgagacccctcggcggtcggctcgatgaaagtgaaatgctgggctcaaccccttacacatactatggcgactatcaaggcgattattacgcccctgggtcaaattacgatttcttcgcccatggcccgcctagtcaagctcagagtccagccgactcctcgtttctggcggcgtcaggtcccggctcaacccctttgggagccctggaaccacctcttgctggcccacacgctgctgacaacccaagattcactgatatgatcagccacccagacacgcctagccccgaaccaggcctacctggcactttgcatcccatgcccggcgaggtcttctcaggaggcccttccccacccttccccatgagtggaacttctggctattccgggccgctctcccatcccaaccccgaactcaacgaggccgcagtgtggtag

SEQ ID NO: 211974 - DNA, 1209 bp, Artificial Sequence
  derived and/or modified sequence
atgatggtgcactgtgccggctgtgagcggcccatcctggaccgcttcctgctgaatgtgctggaccgggcctggcacatcaagtgtgtgcagtgctgtgagtgcaagaccaacctgtctgagaagtgcttcagccgggagggcaagctgtactgcaagaatgacttcttccgccgcttcggcaccaagtgtgccggctgtgcccagggcatcagccccagcgacctggtgaggaaggcccggagcaaggtgttccacctgaactgcttcacctgcatggtgtgcaacaagcagctgagcactggagaggagctgtatgtgattgatgagaacaagtttgtgtgcaaggatgactacctgagcagcagcagcctgaaggagggcagcctgaacagcgtgagcagctgcacagacaggagcctgagcccagacctgcaggatgccctgcaggatgaccccaaggagacagacaacagcaccagcagtgacaaggagacagccaacaatgaaaatgaggagcagaacagcggcaccaagaggcggggccccaggaccaccatcaaggccaagcagctggagaccctgaaggccgcctttgctgccacccccaagcccaccaggcacatccgggagcagctggcccaggagaccggcctgaacatgagggtcatccaggtgtggttccagaacagaagaagcaaggagaggaggatgaagcagctgagcgccctgggcgccaggagacatgccttcttccgcagccccaggaggatgaggcccctgggcggccgcctggatgagagcgagatgctgggcagcaccccctacacctactatggagactaccagggcgactactatgcccctggcagcaactatgacttctttgcccacggcccccccagccaggcccagagccctgctgacagcagcttcctggccgccagcggccctggcagcacccccctgggcgccctggagccccccctggccggcccccatgctgctgacaacccccgcttcacagacatgatcagccacccagacacccccagccctgagcccggcctgcccggcaccctgcaccccatgcctggagaggtgttcagcggcggccccagcccccccttccccatgagcggcaccagcggctacagcggccccctgagccaccccaaccctgagctgaatgaagctgctgtgtggtag

SEQ ID NO: 211975 - DNA, 2940 bp, Artificial Sequence
  derived and/or modified sequence
aaccaggtacaagctaatactcaacaatactgatgccttgttttttttgctctgtccggacagcaacgctgtagccaatttagatatgctataaatttaagaggttgccatggccacggtgcgcccattggccgctgggccccctacgtgcagcgccacgtcaccaaatctgaataaggatgcgcgaattacgcggcgaccagacaaagatgaggatccggaccgcttgaaagtgggggaaagtgccggcgcctccgccaccggggaaagccgctccgcagcgccgaggccagcagccacccgagatacctggggaagcccggaacaggcgccggggcgtgcggcccgtggcatgaggttgtgaacgccacccgccccccaccaccccactccgggcagcccagcgccaggccagagattgcccaaggactggaccggctgagtcttggtccggaccagactcgccctgcagctgctgagacaagaggcgaagggcagcggagggcccggcaggcccgagggccaggggcccaaagggagggcaaggcggccgaagccgccggggcgcggggctatgatggtgcactgcgccggttgcgagcggcccatcctcgaccgctttctgctgaacgtgctggaccgcgcgtggcacatcaaatgtgttcagtgctgcgagtgcaaaaccaacctctcggagaagtgcttctcgcgcgagggcaagctctactgcaaaaatgactttttcaggcgctttggcacgaaatgcgccggctgcgcgcaaggcatctcgcccagcgacctggtgcgcaaggcccggagcaaagtctttcacctcaactgtttcacctgcatggtgtgtaacaagcagctgtccaccggcgaggagctctacgtcatcgacgagaacaagttcgtgtgcaaagacgactacctgagctcatccagcctcaaggagggcagcctcaactcagtgtcatcctgtacggaccgcagtttgtccccggacctccaggacgcactgcaggacgaccccaaagagacggacaactcgacctcgtcggacaaggagacggccaacaacgagaacgaggagcagaactcgggcaccaagcggcgcggcccccgcaccaccatcaaggccaagcagctggagacgctcaaggctgccttcgccgccacgcccaagcccacgcgccacatccgcgagcagctggcgcaggagaccggcctcaacatgcgcgtcatccaggtgtggtttcagaaccgacggtccaaagaacgccggatgaaacagctgagcgccctaggcgcccggaggcacgccttcttccggagtccgcggcgcatgcgtccgctgggcggccgcttggacgagtctgagatgttggggtccaccccgtacacctactacggagactaccaaggcgactactacgcgccgggaagcaactacgacttcttcgcgcacggcccgccttcgcaggcgcagtccccggccgactccagcttcctggcggcctctggccccggctcgacgccgctgggagcgctggaaccgccgctcgccggcccgcacgccgcggacaaccccaggttcaccgacatgatctcgcacccggacacaccgagccccgagccaggcctgccgggcacgctgcaccccatgcccggcgaggtattcagcggcgggcccagcccgcccttcccaatgagcggcaccagcggctacagcggacccctgtcgcatcccaaccccgagctcaacgaagccgccgtgtggtaaggccgccgggccgccccccgcgctcggcccccgggggccccgccccgaagcagcctcctgaaaccaaaacgcccgacgcagacgcggtgggagacgtgggtgtccctcgggggttctctctcgggtccgcactcaactggcagctgctcctcggctgggcgccgagggggggccgacccccatctccaccccgcgggctctccaggagcctcagcccaccgccagtactctcccagcaaccgcgagcaatttcttgggaccaaagtcaatactccggagggtcaagagatttcgagcacgctctagactttccccgggcccccacccacccacccagccaccgccacctctttggactgagagagggtgaggccaaggggcggagacggtgtttttccctctctctgcaatccgagtggcattttgtaatcttatttctcgctgtgctttccccgtctttaaaaaaaaagatgataagaaaaggagagagattgaaagagagggagaggaaagggggcaagatgaggaggagatggagagacagcgtcagccagagggagaagacggagagcgagcgaggaactcgcgtgaaccgggagccaccgagagggagaccgagccacctgcacgctggcgctccctggtggccaatcttgaggctcaaggtcagcttctctaggaatagggctgtgggtcaggaagtggccagccgggtccagctcccgctcttccttactttgacgtttatgttgagcccgagggagcaggccggactcgaacacgcacacatcctgctctccccctgggtggggcgccaggattgctgggctcagacccacagaccaccctccctgcccagggcctggaggctgggccgtcaggatgtacaatattatacttttttggaagttgaacgcttctagtttccttattttgtataaagaagaaacaaataaagtatgtttttgtgtttactgtttatttattgtactctagttatccggggttggacatttttatatttttaagaggaggtagggcagagtgacggaggggaagcagaaagaggtttacctaaaaaaaacaaaaaacaaaaacaaaaaaaatcaactttttttaaagagaaagattaataaaaaaaaatcttttttccctca

SEQ ID NO: 211976 - DNA, 1209 bp, Artificial Sequence
  derived and/or modified sequence
atgatggtgcactgcgccggctgcgagcggcccatcctggaccggttcttgcttaacgttctcgacagggcctggcacatcaaatgcgtccagtgttgtgaatgtaagactaatttgtcagagaaatgtttttcgagggaagggaagctctattgtaaaaacgattttttcaggcgcttcgggaccaagtgtgcggggtgtgcacagggcatctccccatccgacctggtacgcaaagcacgcagtaaggtgttccacctgaattgtttcacctgcatggtgtgcaacaaacagctgtctacaggtgaggagctgtatgtgattgacgagaataagtttgtgtgcaaggatgattatctgtctagttccagcctgaaagaaggctccttaaatagtgtgtcatcctgcaccgacaggagcttgtctcccgatcttcaggatgcgctgcaggacgacccaaaagagactgacaactccacttcttctgataaggaaacagccaataacgagaatgaggagcagaattccgggacaaaaaggagaggtccccgtacaactatcaaggccaaacagcttgagactcttaaggctgcctttgctgctacacccaaaccaacccgacatatccgggagcagctggcacaggagacaggtctgaacatgagggtaattcaggtgtggttccagaatcggagatctaaagaacgacggatgaagcagttatctgctctcggggcacggcgacatgccttcttccgctccccaagaaggatgaggccattgggtgggcggctcgacgagtccgaaatgctgggttctaccccttacacttattatggggattatcagggggactactatgcacccggcagcaattacgattttttcgcccacggccccccctctcaggcccaaagtccagccgactctagcttcttggctgcttccggcccaggaagcacgcctctgggggcattggagcctccattagctgggcctcatgccgcagataaccctcgattcacggatatgatcagccatccggacacaccatcccccgaacccggtctacccggtaccctgcatcccatgcctggggaggtattttccgggggacccagccccccatttccaatgagtgggacatctggctattccggcccactttctcatccaaatccagagctaaacgaggcagcagtttggtag

SEQ ID NO: 211977 - DNA, 1209 bp, Artificial Sequence
  derived and/or modified sequence
atgatggtccactgtgccggatgcgagcggcctatccttgacaggttcctgctgaacgttctcgatagagcctggcacattaagtgcgtgcagtgctgcgaatgcaagactaatttgagcgagaagtgtttctctcgcgagggcaagctgtattgcaagaatgacttctttcgcagattcgggactaaatgcgccggttgtgcccaggggatatcaccatctgacctagtgcggaaagcgagatctaaagtctttcacctgaactgttttacatgtatggtgtgtaacaagcagctctccaccggcgaagaattgtacgtcatagacgaaaacaagttcgtctgtaaggacgactacctgtcatcatcatcactgaaggagggtagtctgaacagtgtgtcatcctgtaccgaccgtagtctgagcccggatctgcaggacgccctccaagatgaccccaaggaaactgataattcaacttcctcagataaagaaactgctaacaatgagaacgaggaacagaactccggcaccaaaaggcgaggccctcggaccacaatcaaggctaagcagcttgagaccctgaaggccgctttcgcagctacccccaagcccactcgacacatcagagagcagctcgcacaagagactggcttgaatatgcgagtgattcaggtgtggttccagaatcgcagaagcaaggaacgccgaatgaaacagttgtctgccctcggtgcgagaaggcatgccttttttcggagcccccgtcgcatgcgtcccctcgggggacggttggacgaatctgaaatgctgggaagcaccccatacacttattacggggactatcagggggactattacgcacctgggagcaactatgacttcttcgcccatggacccccatcccaagcacagagtccagccgatagctcttttttagcagcctccggtccagggtctacccctctgggtgctctcgagcctccgctggctggacctcatgctgccgacaatcccagattcacagacatgatctcgcatcctgatacaccttcccccgagccaggtctacctggcaccctgcaccccatgccaggggaagtgttcagcggagggcctagtccacccttcccgatgtccggaactagtgggtacagcggcccactctcacacccaaaccctgaactaaatgaagctgcagtgtggtag

SEQ ID NO: 211978 - DNA, 1209 bp, Artificial Sequence
  derived and/or modified sequence
atgatggtgcactgcgccggctgcgagagacccatcctggacagattcctgctgaacgtgctggacagagcctggcacatcaagtgcgtgcagtgctgcgagtgcaagaccaacctgagcgagaagtgcttcagcagagagggcaagctgtactgcaagaacgacttcttcagaagattcggcaccaagtgcgccggctgcgcccagggcatcagccccagcgacctggtgagaaaggccagaagcaaggtgttccacctgaactgcttcacctgcatggtgtgcaacaagcagctgagcaccggcgaggagctgtacgtgatcgacgagaacaagttcgtgtgcaaggacgactacctgagcagcagcagcctgaaggagggcagcctgaacagcgtgagcagctgcaccgacagaagcctgagccccgacctgcaggacgccctgcaggacgaccccaaggagaccgacaacagcaccagcagcgacaaggagaccgccaacaacgagaacgaggagcagaacagcggcaccaagagaagaggccccagaaccaccatcaaggccaagcagctggagaccctgaaggccgccttcgccgccacccccaagcccaccagacacatcagagagcagctggcccaggagaccggcctgaacatgagagtgatccaggtgtggttccagaacagaagaagcaaggagagaagaatgaagcagctgagcgccctgggcgccagaagacacgccttcttcagaagccccagaagaatgagacccctgggcggcagactggacgagagcgagatgctgggcagcaccccctacacctactacggcgactaccagggcgactactacgcccccggcagcaactacgacttcttcgcccacggcccccccagccaggcccagagccccgccgacagcagcttcctggccgccagcggccccggcagcacccccctgggcgccctggagccccccctggccggcccccacgccgccgacaaccccagattcaccgacatgatcagccaccccgacacccccagccccgagcccggcctgcccggcaccctgcaccccatgcccggcgaggtgttcagcggcggccccagcccccccttccccatgagcggcaccagcggctacagcggccccctgagccaccccaaccccgagctgaacgaggccgccgtgtggtag

SEQ ID NO: 211979 - protein, 109 aa, Artificial Sequence
  derived and/or modified sequence
MTAPCSQPAQLPGRRQLGLVPFPPPPPRTPLLWLLLLLLAAVAPARGWESGDLELFDLVEEVQLNFYQFLGVQQDASSADIRKAYRKLSLTLHPDKNKDENAETQFRQV

SEQ ID NO: 211980 - protein, 554 aa, Artificial Sequence
  derived and/or modified sequence
MTAPCSQPAQLPGRRQLGLVPFPPPPPRTPLLWLLLLLLAAVAPARGWESGDLELFDLVEEVQLNFYQFLGVQQDASSADIRKAYRKLSLTLHPDKNKDENAETQFRQLVAIYEVLKDDERRQRYDDILINGLPDWRQPVFYYRRVRKMSNAELALLLFIILTVGHYAVVWSIYLEKQLDELLSRKKREKKKKTGSKSVDVSKLGASEKNERLLMKPQWHDLLPCKLGIWFCLTLKALPHLIQDAGQFYAKYKETRLKEKEDALTRTELETLQKQKKVKKPKPEFPVYTPLETTYIQSYDHGTSIEEIEEQMDDWLENRNRTQKKQAPEWTEEDLSQLTRSMVKFPGGTPGRWEKIAHELGRSVTDVTTKAKQLKDSVTCSPGMVRLSELKSTVQNSRPIKTATTLPDDMITQREDAEGVAAEEEQEGDSGEQETGATDARPRRRKPARLLEATAKPEPEEKSRAKRQKDFDIAEQNESSDEESLRKERARSAEEPWTQNQQKLLELALQQYPRGSSDRWDKIARCVPSKSKEDCIARYKLLVELVQKKKQAKS

SEQ ID NO: 211981 - protein, 116 aa, Artificial Sequence
  derived and/or modified sequence
  misc_feature (1)..(1): Xaa can be any naturally occurring amino acid
XGRRQLGLVPFPPPPPRTPLLWLLLLLLAAVAPARGWESGDLELFDLVEEVQLNFYQFLGVQQDASSADIRKAYRKLSLTLHPDKNKDENAETQFRQLVAIYEVLKDDERRQRMNY

SEQ ID NO: 211982 - DNA, 1665 bp, Artificial Sequence
  derived and/or modified sequence
atgaccgccccctgcagccagcccgcccagctgcccggcagaagacagctgggcctggtgcccttccccccccccccccccagaacccccctgctgtggctgctgctgctgctgctggccgccgtggcccccgccagaggctgggagagcggcgacctggagctgttcgacctggtggaggaggtgcagctgaacttctaccagttcctgggcgtgcagcaggacgccagcagcgccgacatcagaaaggcctacagaaagctgagcctgaccctgcaccccgacaagaacaaggacgagaacgccgagacccagttcagacagctggtggccatctacgaggtgctgaaggacgacgagagaagacagagatacgacgacatcctgatcaacggcctgcccgactggagacagcccgtgttctactacagaagagtgagaaagatgagcaacgccgagctggccctgctgctgttcatcatcctgaccgtgggccactacgccgtggtgtggagcatctacctggagaagcagctggacgagctgctgagcagaaagaagagagagaagaagaagaagaccggcagcaagagcgtggacgtgagcaagctgggcgccagcgagaagaacgagagactgctgatgaagccccagtggcacgacctgctgccctgcaagctgggcatctggttctgcctgaccctgaaggccctgccccacctgatccaggacgccggccagttctacgccaagtacaaggagaccagactgaaggagaaggaggacgccctgaccagaaccgagctggagaccctgcagaagcagaagaaggtgaagaagcccaagcccgagttccccgtgtacacccccctggagaccacctacatccagagctacgaccacggcaccagcatcgaggagatcgaggagcagatggacgactggctggagaacagaaacagaacccagaagaagcaggcccccgagtggaccgaggaggacctgagccagctgaccagaagcatggtgaagttccccggcggcacccccggcagatgggagaagatcgcccacgagctgggcagaagcgtgaccgacgtgaccaccaaggccaagcagctgaaggacagcgtgacctgcagccccggcatggtgagactgagcgagctgaagagcaccgtgcagaacagcagacccatcaagaccgccaccaccctgcccgacgacatgatcacccagagagaggacgccgagggcgtggccgccgaggaggagcaggagggcgacagcggcgagcaggagaccggcgccaccgacgccagacccagaagaagaaagcccgccagactgctggaggccaccgccaagcccgagcccgaggagaagagcagagccaagagacagaaggacttcgacatcgccgagcagaacgagagcagcgacgaggagagcctgagaaaggagagagccagaagcgccgaggagccctggacccagaaccagcagaagctgctggagctggccctgcagcagtaccccagaggcagcagcgacagatgggacaagatcgccagatgcgtgcccagcaagagcaaggaggactgcatcgccagatacaagctgctggtggagctggtgcagaagaagaagcaggccaagagctag

SEQ ID NO: 211983 - DNA, 1013 bp, Artificial Sequence
  derived and/or modified sequence
gaggcctgggataggctgaggcgaagggaagcctcacccactgtgcagcccaggcgccgggcgctgcctctacagctgtgtgtaggcctgggggcgagggtcttcggaacgtagcgctggctgcggccccgcccgcctacccacccgcccgtccggcagccggctcccgccgcctccgcgctctgtctggggccagccacctggcgggccgctccggtgcgcctgcccgcgcttttcactgacaggcgctgttccccacagccagcgccgcccgccacgtcccagctctcggccaacggagctgcgcggcgggtgacctttccgagcccagcgcgatgacggctccttgctcccagccggcgcagcttcctggacgccgccagctcgggctggtgccgttcccgccgccgccgccgcggacgccgctgctgtggctgctgctgctgctgctggccgccgtggcgccggcgcgcggctgggagagcggagacctggagttgtttgacttagtggaggaggtgcagctcaacttctaccagttcctcggggtgcagcaggatgcatcatctgcagacatcagaaaagcatatcgtaagctttcactaactttacatccagacaagaataaagatgaaaatgcagaaactcagtttagacaagtatgatgatattctgatcaatggacttccagattggcgacagcctgtattctactacaggcgggtgagaaaaatgagcaatgctgagctggcattactcttgttcattattctcacagtgggtcattatgctgtggtttggtcaatctacctggaaaaacaactggtaagtgttagtaataaatcaaatgaactagcctccttaattttatatggaattttggacatttatttttcaactgatgaaaatttctgtttctctctgtatacttctcattctaatagttttatactcaatgtttgacatatttctaagtcaagaagaacccatgaaataagaaaatattcttcttt

SEQ ID NO: 211984 - DNA, 2106 bp, Artificial Sequence
  derived and/or modified sequence
gcagcccaggcgccgggcgctgcctctacagctgtgtgtaggcctgggggcgagggtcttcggaacgtagcgctggctgcggccccgcccgcctacccacccgcccgtccggcagccggctcccgccgcctccgcgctctgtctggggccagccacctggcgggccgctccggtgcgcctgcccgcgcttttcactgacaggcgctgttccccacagccagcgccgcccgccacgtcccagctctcggccaacggagctgcgcggcgggtgacctttccgagcccagcgcgatgacggctccttgctcccagccggcgcagcttcctggacgccgccagctcgggctggtgccgttcccgccgccgccgccgcggacgccgctgctgtggctgctgctgctgctgctggccgccgtggcgccggcgcgcggctgggagagcggagacctggagttgtttgacttagtggaggaggtgcagctcaacttctaccagttcctcggggtgcagcaggatgcatcatctgcagacatcagaaaagcatatcgtaagctttcactaactttacatccagacaagaataaagatgaaaatgcagaaactcagtttagacaattggtggccatttatgaagttttaaaggatgatgaacgaaggcagaggtatgatgatattctgatcaatggacttccagattggcgacagcctgtattctactacaggcgggtgagaaaaatgagcaatgctgagctggcattactcttgttcattattctcacagtgggtcattatgctgtggtttggtcaatctacctggaaaaacaactggatgaactactaagtagaaaaaagagagaaaagaaaaaaaagactggcagcaagagtgtggatgtatcaaaactcggtgcttcagaaaaaaatgaaagattgctgatgaaaccacagtggcatgatttgcttccatgcaaactggggatttggttttgccttacactaaaagcattacctcacctcatccaggatgctgggcagttttatgctaaatataaagaaacaagattgaaggaaaaggaagatgcactgactagaactgaacttgaaacacttcaaaaacagaagaaagttaaaaaaccaaaacctgaatttcctgtatacacacctttagaaactacatatattcagtcttatgatcatggaacttccatagaagaaattgaggaacaaatggatgattggttggaaaacaggaaccgaacacagaaaaaacaggcacctgaatggacagaagaggacctcagccaactgacaagaagtatggttaagttcccaggagggactccaggtcgatgggaaaagattgcccacgaattgggtcgatctgtgacagatgtgacaaccaaagccaagcaactgaaggattcagtgacctgctccccaggaatggttagactctccgaactcaaatcgacagttcagaattccaggcccatcaaaacggccaccaccttgcccgatgacatgatcacccagcgagaggacgcagagggggtggcagcggaggaggagcaggagggagactccggtgagcaggagaccggggccactgatgcccggcctcggaggcggaagccagccaggctgctggaggctacagcgaagccggagccagaggagaagtccagagccaagcggcagaaggactttgacatagcagaacaaaacgagtccagcgacgaggagagcctgagaaaagagagagctcggtctgcagaggagccgtggactcaaaatcaacagaaacttctggaactggcgttgcagcagtacccaaggggatcctctgaccgctgggacaaaatagccagatgtgtcccgtccaagagcaaggaagactgtatcgctaggtacaagttgctggttgaactggtccaaaagaaaaaacaagctaaaagctgaatattctgggagatgatgttcaccttcattttccaaaatgaatatcttaaaaatcttatgcagaaatttgcattttgtacctcaatatttctacgtcatgtgccttagtaaaaaaaaataataaataaataaaagatgagtgttgtgcta

SEQ ID NO: 211985 - DNA, 1665 bp, Artificial Sequence
  derived and/or modified sequence
atgaccgccccatgctcacaacccgcccaattgccaggaaggcggcagctgggccttgtccccttccctccacccccaccccgcactcccctactctggctgctgctgctcctgttagccgcggtggcacccgcccgtgggtgggagtccggcgatctcgagctgtttgacctggtggaggaggtgcagctgaatttctatcagttcctcggcgtgcagcaggatgcctcgtctgcggatattagaaaagcttaccgcaaactctccctgactttgcatcctgataagaacaaggacgaaaatgccgagacgcaatttcgccagctggttgccatttacgaggtgctgaaggacgatgagcggcgacagcgttatgacgatattctgatcaacggcctccccgactggaggcaacccgtgttctattacaggagggtccgcaagatgagcaatgctgagctcgccttacttctgtttataattctgaccgtgggccattacgctgtggtatggtctatatatttagagaagcagttggatgagctcctgtccagaaaaaaaagagaaaagaaaaagaagaccggcagtaagtctgtggatgtgtcaaagctcggagccagtgaaaaaaatgagagactccttatgaagcctcaatggcatgatctgctcccctgcaaattgggcatttggttctgtctcactcttaaagcactgccccatcttatccaagacgccggacagttttatgccaagtacaaagagacacgtctgaaggagaaggaggacgctttgacaaggacggagctcgagaccctgcagaagcagaagaaagttaagaagcctaagcccgaatttccagtgtacaccccattagagacaacatatattcagtcttacgatcacggtactagcattgaggaaattgaggagcagatggatgattggctcgagaatcgcaaccgcacccagaagaagcaggctcccgagtggacggaagaggacctgagtcagctcaccagatccatggttaaattcccaggcggcacccctggtcgatgggagaaaatagcccacgaattgggtagatctgtgactgatgtgaccacaaaggcgaagcagctgaaggacagcgtaacatgttctcctggcatggtgagactgtcagagcttaaatcaactgttcagaactctcgtcctataaagactgcaacaaccctgccagatgacatgatcacacagcgtgaggacgccgaaggggtcgccgctgaagaagagcaggagggggacagtggcgagcaggagaccggggcgaccgacgctaggccaagaagacggaaacccgccaggctcctcgaagcaaccgctaagcccgaaccagaggaaaagtcacgcgccaagaggcaaaaagatttcgatatagctgagcagaacgaaagcagcgatgaggaaagcctgcggaaagagcgggctcggtccgccgaagagccttggacccagaaccagcaaaagctgctggagcttgcactccagcagtatcctcggggttcttcggatcgctgggacaagatcgcacggtgcgtgccctctaaatctaaggaggactgcatagccaggtacaagctactagtggagctggttcagaagaagaagcaagccaaatcttag

SEQ ID NO: 211986 - DNA, 1665 bp, Artificial Sequence
  derived and/or modified sequence
atgacagccccctgcagccagcctgcccagctgcccggccggcggcagctgggcctggtgcccttccccccacctccacccaggacccccctgctgtggctgctgctgctgctgctggccgctgtggccccagcccggggctgggagagcggggacctggagctgtttgacctggtggaggaggtgcagctgaacttctaccagttcctgggcgtgcagcaggatgccagcagcgctgacatcaggaaggcctacaggaagctgagcctgaccctgcacccagacaagaacaaggatgaaaatgctgagacccagttccggcagctggtggccatctatgaggtgctgaaggatgatgaaagacggcagagatatgatgacatcctgatcaatggcctgcctgactggaggcagcctgtgttctactaccgccgggtgaggaagatgagcaatgctgagctggccctgctgctcttcatcatcctgactgtgggccactatgctgtggtgtggagcatctacctggagaagcagctggatgagctgctgagcaggaagaagcgggagaagaagaagaagacaggcagcaagtctgtggatgtgtccaagctgggcgccagcgagaagaatgaaaggctgctgatgaagccccagtggcatgacctgctgccctgcaagctgggcatctggttctgcctgaccctgaaggccctgccccacctgatccaggatgctggccagttctacgccaagtacaaggagacccggctgaaggagaaggaggatgccctgaccaggacagagctggagaccctgcagaagcagaagaaggtgaagaagcccaagccagagttccctgtgtacacccccctggagaccacctacatccagagctatgaccacggcaccagcattgaggagattgaggagcagatggatgactggctggagaacagaaacagaacccagaagaagcaggcccctgagtggacagaggaggacctgagccagctgaccaggtccatggtgaagtttcctgggggcaccccaggccgctgggagaagatcgcccacgagctgggccgctctgtgacagatgtgaccaccaaggccaagcagctgaaggacagcgtgacctgcagccctggcatggtgcggctgtctgagctgaagagcacagtgcagaacagccggcccatcaagacagccaccaccctgcctgatgacatgatcacccagagagaagatgctgagggcgtggccgctgaggaggagcaggagggggacagcggggagcaggagactggagccacagatgcccggcccaggaggaggaagccagcccggctgctggaggccacagccaagccagagcctgaggagaagagccgggccaagaggcagaaggactttgatattgctgagcagaatgaaagcagtgatgaggagagcctgaggaaggagcgggcccggtctgctgaggagccctggacccagaaccagcagaagctgctggagctggccctgcagcagtacccccggggcagcagtgaccgctgggacaagatcgcccgctgtgtgcccagcaagagcaaagaagactgcatcgcccgctacaagctgctggtggagctggtgcagaagaagaagcaggccaagagctag

SEQ ID NO: 211987 - DNA, 1665 bp, Artificial Sequence
  derived and/or modified sequence
atgaccgccccctgcagccagcccgcccagctgcccggccggcggcaattaggcctcgttccttttcctccaccacctcccaggaccccactactgtggctgctgctcctcctgcttgccgccgttgcacctgcccggggctgggagtccggagatctcgagctctttgacctggtggaggaggtacagttgaacttctatcagttcctcggcgtccagcaagatgctagttccgccgatattcgcaaggcttaccggaagctgtccttaactctgcatcccgacaagaacaaggatgagaacgctgaaacacagtttcgtcagctggtcgccatctatgaagtgctgaaagatgacgagaggcgacaacggtacgatgatatcttgatcaacggcttgcctgactggaggcagccggttttctattaccgtagagtacggaaaatgagcaatgctgagttggccctccttctgttcattattctgacggtcgggcattacgctgtggtctggagtatctatctagagaaacaactagacgagttgttgagccgcaagaaaagagaaaaaaaaaaaaaaacaggaagcaagagtgtggacgtgagcaaactgggggcctctgaaaaaaacgagcggctcctgatgaagcctcagtggcacgatctgctcccatgtaagctaggaatctggttttgtctgacactgaaggccctgccacacttgatccaggatgcagggcaattttacgccaagtataaggagacaagactcaaggagaaagaagacgcactgacaaggactgagctagaaacccttcagaagcagaagaaggtgaagaaacctaagcctgaatttccagtctacaccccgcttgagactacctacatccaatcctatgatcatggaacgagtattgaggaaatagaagaacaaatggacgattggttggaaaatcgcaataggacacagaagaaacaggctcctgaatggaccgaggaggatctcagccagcttacaagaagcatggtgaagtttccgggggggacccccggacgctgggagaaaatcgcccacgaactggggagaagtgtgaccgacgtcacaaccaaagccaagcaactgaaggattccgtgacgtgcagccccggcatggtccgactgtcagagctgaagtctacggtgcagaactctaggcctatcaagactgccacaacactgccagatgacatgataacgcagcgcgaggatgccgaaggcgttgcggccgaggaagagcaggagggggacagcggcgagcaagagactggagctacagatgcccgaccccgccgcagaaagccagcccgccttctcgaagcgacagctaaaccagaacccgaagagaaatcccgcgcgaaaaggcagaaggacttcgatattgcagaacagaatgagtcttctgacgaagagtcgctgcgaaaagagcgcgcccgcagtgctgaagaaccctggacccagaaccagcagaaactactggagctggcactgcagcagtatccccgcggttcctcagacagatgggataaaatcgctcggtgcgtgcctagtaagtccaaggaggactgcatcgcacgatacaaactcctggtggaacttgtgcaaaagaaaaagcaggctaaatcatag

SEQ ID NO: 211988 - DNA, 1665 bp, Artificial Sequence
  derived and/or modified sequence
atgactgcgccttgcagccagcccgcacaactgcctggtcggcgacagctgggacttgtgcccttcccccctccgccacccagaacaccccttttgtggctgctacttttgctactcgccgctgtggccccagcacgaggatgggaatccggtgacctggagctattcgacctggtagaagaggtgcagttgaacttctaccagttcttgggcgtgcagcaggacgcctccagtgctgacatccgcaaagcgtaccgcaagctgtctctgactctgcaccctgacaagaataaggatgagaacgccgagacccagttcaggcaactggtagctatctatgaagtgttgaaggacgatgagagacgacaacgttacgacgacattctcataaatgggcttcctgactggagacagcctgtattctactacagacgcgtgagaaagatgtctaacgcggagctggctcttctactttttattattttgactgtgggccactacgctgtggtttggtctatttaccttgagaaacaattggatgagctgcttagtcggaagaagagggaaaagaagaagaaaaccggatctaaatccgtcgatgtcagtaagttgggcgcatcggagaaaaatgaaaggctgcttatgaagccccagtggcacgacctgctgccatgcaaactgggcatatggttttgcttgacactcaaggccctgccccacctcatccaagatgccggtcagttttatgcaaagtacaaagaaaccaggttaaaagagaaggaggacgccttgacacggactgagctcgagactttgcagaagcagaaaaaagtcaaaaaacccaagcccgagttccccgtgtacactccccttgaaaccacctacattcagagctacgaccacggtactagcatcgaagagattgaagagcagatggacgactggttggagaaccgcaatcgaacccagaagaaacaggccccagaatggacagaggaggatctgtcgcagctgaccaggtctatggtcaagttcccaggaggcacacccggaagatgggaaaagatcgcacatgagcttgggaggtccgtcactgacgtgaccacaaaagctaagcagcttaaggactcagtcacttgctcgccaggtatggtccgtctgtcagagctgaagagcaccgtgcagaatagccggcctattaagaccgcaaccactttacctgacgatatgattacacagcgggaagacgccgagggggttgccgctgaggaggagcaggagggcgattctggcgaacaggagaccggtgccactgatgctcggcctcggaggcggaaacccgcacgactgttggaggccacagccaaacccgagccggaggaaaagagtagagctaagcggcagaaggactttgacatcgcagagcaaaacgagtctagcgatgaggagagcctgcggaaggagagggccagatctgcagaagaaccttggacacagaatcagcagaagctgttggaactcgccctccagcagtacccccgtggctcctccgaccggtgggataagatagctagatgcgttccatcaaaatctaaagaagactgtatcgcgcgatacaagctgctggtcgagcttgtacagaagaaaaagcaagcaaaaagttag

SEQ ID NO: 211989 - protein, 396 aa, Artificial Sequence
  derived and/or modified sequence
MWIPVVGLPRRLRLSALAGAGRFCILGSEAATRKHLPARNHCGLSDSSPQLWPEPDFRNPPRKASKASLDFKRYVTDRRLAETLAQIYLGKPSRPPHLLLECNPGPGILTQALLEAGAKVVALESDKTFIPHLESLGKNLDGKLRVIHCDFFKLDPRSGGVIKPPAMSSRGLFKNLGIEAVPWTADIPLKVVGMFPSRGEKRALWKLAYDLYSCTSIYKFGRIEVNMFIGEKEFQKLMADPGNPDLYHVLSVIWQLACEIKVLHMEPWSSFDIYTRKGPLENPKRRELLDQLQQKLYLIQMIPRQNLFTKNLTPMNYNIFFHLLKHCFGRRSATVIDHLRSLTPLDARDILMQIGKQEDEKVVNMHPQDFKTLFETIERSKDCAYKWLYDETLEDR

SEQ ID NO: 211990 - protein, 137 aa, Artificial Sequence
  derived and/or modified sequence
MWIPVVGLPRRLRLSALAGAGRFCILGSEAATRKHLPARNHCGLSDSSPQLWPEPDFRNPPRKASKASLDFKRYVTDRRLAETLAQIYLGKPSRPPHLLLECNPGPGILTQALLEAGAKVVALESDKTFIPHLETSL

SEQ ID NO: 211991 - DNA, 1799 bp, Artificial Sequence
  derived and/or modified sequence
ctagtgtttacttccgcttgacctggcccggacgccagaaaatgttccacgtgggataccctgcgtggggttcactgtagtagctgcactaggtgattcttggagcgggcctgagagacaaggacatgtggatcccagtggtcgggcttcctcggcggctgaggctctccgccttggcgggcgctggtcgcttttgcattttagggtctgaagcggcgacgcgaaagcatttgccggcgaggaaccactgtgggctctctgactcctctccgcagctgtggcccgaaccggatttcaggaatccgccaaggaaggcgtctaaggccagcttagactttaagcgttacgtaaccgatcggagattggctgagaccctggcgcaaatctatttgggaaaaccaagtagacctccacacctactgctggagtgcaatccaggtcctggaatcctgactcaggcattacttgaagctggtgccaaagtggttgcgctcgaaagtgacaaaacttttattccacatttggagtccttaggaaaaaatctggatggaaaactacgagtgattcactgtgacttctttaaactagatcctagaagtggtggagtaataaaaccacctgctatgtcttctcgagggctctttaagaatttgggaatagaagcagttccttggacagcagacatccctttaaaagtagttggaatgttcccaagtagaggtgagaaaagggcactttggaaactcgcatatgacttgtattcctgtacttctatatataaatttggacgaatagaagtaaatatgtttattggtgaaaaagaattccagaaactaatggcagatcccggaaatccagacttgtatcatgtattaagtgttatctggcaattagcttgtgagattaaggttctgcacatggagccttggtcatcatttgatatatacacccggaaagggccgctggaaaacccaaagcgtagggaattattagaccaattacaacaaaagctgtatcttattcaaatgattcctcgtcaaaatttatttaccaagaacttaacacctatgaactataatatattttttcacttgttaaagcactgttttgggaggcgcagcgccactgtaatagaccacttacgttcattgactccacttgatgcgagagatatattgatgcaaataggaaaacaggaggatgagaaagtagttaacatgcaccctcaagacttcaaaacactttttgaaactatagagcgttccaaagattgtgcttataaatggctgtatgatgaaaccctggaagataggtagcaactagactgtcgtttttggtggagcggttcatttatttggaaactatgacatgaaaaccaaatttgaaaactcacatcctttcagcagaaggtaactgttcttgtcttgcacaagccaggcagatcatttctcctaagctgatatcattggcttattggatgaaacagtgtctgctattttattcacaattgaataaaatgaaaacttcaattaattgtggatttgatcagattgaattcgttttgtttcagattcctatttaaatatttcacttgtactgttgctgatttttgcatcttcttgaagagcaagagtctgtacattattaagcttagaaagtaagcaaaactgatttactggtttgcctttcagtttgttgaaatgtattgtcaagtactgtacaatgaaattgtttaaattttaatatgatttaagctttttagaaattaaaatattttaaataagaaaaaaaaaaaaaaa

SEQ ID NO: 211992 - DNA, 1191 bp, Artificial Sequence
  derived and/or modified sequence
atgtggatccccgtggtgggcctgcccagaagactgagactgagcgccctggccggcgccggcagattctgcatcctgggcagcgaggccgccaccagaaagcacctgcccgccagaaaccactgcggcctgagcgacagcagcccccagctgtggcccgagcccgacttcagaaacccccccagaaaggccagcaaggccagcctggacttcaagagatacgtgaccgacagaagactggccgagaccctggcccagatctacctgggcaagcccagcagacccccccacctgctgctggagtgcaaccccggccccggcatcctgacccaggccctgctggaggccggcgccaaggtggtggccctggagagcgacaagaccttcatcccccacctggagagcctgggcaagaacctggacggcaagctgagagtgatccactgcgacttcttcaagctggaccccagaagcggcggcgtgatcaagccccccgccatgagcagcagaggcctgttcaagaacctgggcatcgaggccgtgccctggaccgccgacatccccctgaaggtggtgggcatgttccccagcagaggcgagaagagagccctgtggaagctggcctacgacctgtacagctgcaccagcatctacaagttcggcagaatcgaggtgaacatgttcatcggcgagaaggagttccagaagctgatggccgaccccggcaaccccgacctgtaccacgtgctgagcgtgatctggcagctggcctgcgagatcaaggtgctgcacatggagccctggagcagcttcgacatctacaccagaaagggccccctggagaaccccaagagaagagagctgctggaccagctgcagcagaagctgtacctgatccagatgatccccagacagaacctgttcaccaagaacctgacccccatgaactacaacatcttcttccacctgctgaagcactgcttcggcagaagaagcgccaccgtgatcgaccacctgagaagcctgacccccctggacgccagagacatcctgatgcagatcggcaagcaggaggacgagaaggtggtgaacatgcacccccaggacttcaagaccctgttcgagaccatcgagagaagcaaggactgcgcctacaagtggctgtacgacgagaccctggaggacagatag

SEQ ID NO: 211993 - DNA, 1191 bp, Artificial Sequence
  derived and/or modified sequence
atgtggatccccgtggtagggttaccacgccggctgaggctcagcgccttagctggagccggacgattctgtattcttggatcagaggcggctactcgcaagcatctgcccgcacgcaaccattgcgggctttcagatagctccccccaactgtggccggagcccgactttcgcaacccacccaggaaggcatctaaagccagtttggacttcaaacggtatgttactgatcggagactagcagaaaccttagctcagatctatctcggaaaaccttctaggcctccccatttactgttggaatgtaaccctgggccaggaatcctgactcaggcgcttctggaagctggagcgaaggtggtcgctcttgagtctgacaaaaccttcatcccacacctggaaagtttaggaaaaaacctggatggtaagctgcgggtgatacactgcgactttttcaagctcgacccgcgcagcgggggagtcattaagcctccagctatgagctcgcggggactgtttaagaacctgggaatcgaagctgtgccatggacagccgatatcccattaaaggtggtcggcatgttcccaagtcgtggggagaagcgggcactgtggaaactggcttacgatctttattcttgtacgtctatttacaaatttggacgcattgaagtgaacatgttcatcggggagaaagaatttcagaagctgatggccgatcctgggaacccagatctttaccatgtgttgagcgttatttggcagcttgcttgtgaaattaaggtgttgcacatggagccttggtcaagtttcgacatttatacacgcaaggggcccctcgaaaatcccaagcgcagggagctgcttgaccagttgcagcagaaactctacctgatacagatgatccctaggcagaatttattcacaaaaaatcttaccccaatgaactacaacattttctttcatctgctgaaacactgcttcggaaggcggagcgctacagtgatcgatcatctccggtctttaacccctcttgacgcccgcgacattctcatgcaaataggcaaacaggaggatgagaaggtcgttaacatgcacccccaggatttcaagaccttgttcgagacaatcgaacggagcaaggattgtgcatataagtggctctatgatgagacattggaagacaggtag

SEQ ID NO: 211994 - DNA, 1191 bp, Artificial Sequence
  derived and/or modified sequence
atgtggatccctgtggtgggcctgccccggcggctgcggctgagcgccctggccggggccggccgcttctgcatcctgggcagcgaggccgccaccaggaagcacctgcctgccaggaaccactgcggcctgagtgacagcagcccccagctgtggccagagccagacttcaggaacccccccaggaaggccagcaaggccagcctggacttcaagcgctacgtgacagaccggcggctggccgagaccctggcccagatctacctgggcaagcccagcaggcctccccacctgctgctggagtgcaaccctggccctggcatcctgacccaggccctgctggaggccggggccaaggtggtggccctggagagtgacaagaccttcatcccccacctggagagcctgggcaagaacctggatggcaagctgcgggtcatccactgtgacttcttcaagctggaccccaggtctgggggcgtcatcaagcccccagccatgagcagccggggcctcttcaagaacctgggcatcgaggccgtgccctggacagctgacatccccctgaaggtggtgggcatgttccccagcagaggagagaagagggccctgtggaagctggcctatgacctgtacagctgcaccagcatctacaagtttggaagaattgaggtgaacatgtttattggagagaaggagttccagaagctgatggctgaccccggcaacccagacctgtaccacgtgctgagcgtcatctggcagctggcctgtgagatcaaggtgctgcacatggagccctggagcagctttgacatctacaccaggaagggccccctggagaaccccaagagaagagagctgctggaccagctgcagcagaagctgtacctgatccagatgatcccccggcagaacctcttcaccaagaacctgacccccatgaactacaacatcttcttccacctgctgaagcactgcttcggccgccgcagcgccaccgtcatcgaccacctgcggagcctgacccccctggatgcccgggacatcctgatgcagatcggcaagcaggaggatgagaaggtggtgaacatgcacccccaggacttcaagaccctgtttgagaccatcgagaggagcaaggactgtgcctacaagtggctgtatgatgagaccctggaggacagatag

SEQ ID NO: 211995 - DNA, 1191 bp, Artificial Sequence
  derived and/or modified sequence
atgtggatccccgtggtgggcctgccccggcggctgcggctgagcgctctggctggagccgggagattttgtatcttaggcagcgaggctgctacaagaaaacatctccctgccaggaatcattgcggcctttccgactcctccccccagctttggcctgagccagacttccgcaatcctccccggaaggccagtaaagcttctctggattttaagaggtacgttaccgatcgccgtcttgccgagaccttagcccagatctacctgggaaagccttccagacctccccatttactccttgaatgcaacccagggccggggattctgacgcaggccctcctggaggcgggtgccaaggtggtggctctggaaagtgacaagacattcatccctcaccttgagtctctgggaaagaaccttgatggaaaacttagggttatacactgcgacttctttaaactcgatccaagatccggaggagtaattaagcctcccgccatgtccagccgcggtctctttaaaaatctggggattgaagcagtcccatggaccgccgacattccactgaaagtggtcgggatgttcccttctcgaggagaaaaaagggcgctttggaagctagcctacgatctgtatagctgcaccagcatctataagttcggaaggatcgaggttaatatgttcatcggcgaaaaggaatttcaaaaattaatggcggaccctggaaacccagacctctatcatgtgctgagcgtcatctggcagctggcttgtgagataaaagttcttcacatggaaccctggtctagctttgatatatacactcgaaaaggtccgctcgagaacccgaaaaggcgggagctcctggaccagttgcagcagaaattatacctgatacagatgatcccgaggcagaatctctttaccaagaacttgacaccaatgaattataatatttttttccacctcctgaagcactgcttcggtcgccggagcgctactgtgatagatcacctgagatccctaacaccactggatgcacgagacatactgatgcagatcggaaagcaggaagacgaaaaggtcgtgaatatgcacccgcaggattttaagaccctgttcgagactatcgagcggagtaaagactgcgcttacaagtggctatacgacgagacactcgaagaccgttag

SEQ ID NO: 211996 - DNA, 1191 bp, Artificial Sequence
  derived and/or modified sequence
atgtggataccagtggtaggactgccaagaaggcttcgccttagtgccctcgccggagctgggcgtttctgtatactcggcagcgaggcagcgacacggaaacatcttcctgcaagaaaccattgcggcctcagcgactcatcgccccaattgtggcctgagccagatttccgtaatccacctagaaaagcctccaaggcttcattggacttcaagcgctacgttaccgataggcgcttggcggagacactggcccagatctacctgggcaagccttctcgacctccgcaccttctgctggaatgcaatcccggaccagggatcctgactcaggccctgttagaagctggtgccaaggttgtggcattggaatctgacaaaacatttataccccacctggagtcactcgggaaaaatctcgacgggaaactgcgggtgatccactgcgattttttcaaactcgatcctcgcagcggaggagttatcaaaccacccgcaatgtcctctaggggcctgttcaagaatctgggcatcgaggcggtcccttggactgccgatattcccttgaaggtggtgggaatgttccccagcaggggagagaagcgggctttgtggaaattggcttacgatttatatagctgcacgtccatatataaatttgggcgaatcgaggtcaatatgttcatcggcgaaaaggagttccagaagctcatggcggatcccggaaacccagatctttatcacgtgctgagcgtcatctggcaactggcatgcgaaattaaggtcctgcacatggagccctggtcctcctttgacatctacactcgtaagggcccattggagaaccctaagcggagagagctgctggatcagttacaacagaaactgtatctaatccagatgattccacgacagaatctcttcacaaagaacctgacccccatgaattacaacatcttctttcacttactgaagcactgtttcggcaggagatccgccacagtcattgaccatctgaggtcgctgaccccccttgacgcgcgtgatatcttaatgcaaatcgggaagcaggaggatgaaaaggtggtgaacatgcacccccaagattttaaaaccctgtttgagactatcgagaggagcaaagactgcgcatataaatggctctacgatgagaccctggaagatcggtag

SEQ ID NO: 211997 - DNA, 1848 bp, Artificial Sequence
  derived and/or modified sequence
gaggcggaagcggaagtgagggagaaaagcaggaaggctccgctgttcgcatgcgcaggctctagtgtttacttccgcttgacctggcccggacgccagaaaatgttccacgtgggataccctgcgtggggttcactgtagtagctgcactaggtgattcttggagcgggcctgagagacaaggacatgtggatcccagtggtcgggcttcctcggcggctgaggctctccgccttggcgggcgctggtcgcttttgcattttagggtctgaagcggcgacgcgaaagcatttgccggcgaggaaccactgtgggctctctgactcctctccgcagctgtggcccgaaccggatttcaggaatccgccaaggaaggcgtctaaggccagcttagactttaagcgttacgtaaccgatcggagattggctgagaccctggcgcaaatctatttgggaaaaccaagtagacctccacacctactgctggagtgcaatccaggtcctggaatcctgactcaggcattacttgaagctggtgccaaagtggttgcgctcgaaagtgacaaaacttttattccacatttggagtccttaggaaaaaatctggatggaaaactacgagtgatccactgtgacttctttaaactagatcctagaagtggtggagtaataaaaccacctgctatgtcttctcgagggctctttaagaatttgggaatagaagcagttccttggacagcagacatccctttaaaagtagttggaatgttcccaagtagaggtgagaaaagggcactttggaaactcgcatatgacttgtattcctgtacttctatatataaatttggacgaatagaagtaaatatgtttattggtgaaaaagaattccagaaactaatggcagatcccggaaatccagacttgtatcatgtattaagtgttatctggcaattagcttgtgagattaaggttctgcacatggagccttggtcatcatttgatatatacacccggaaagggccgctggaaaacccaaagcgtagggaattattagaccaattacaacaaaagctgtatcttattcaaatgattcctcgtcaaaatttatttaccaagaacttaacacctatgaactataatatattttttcacttgttaaagcactgttttgggaggcgcagcgccactgtaatagaccacttacgttcattgactccacttgatgcgagagatatattgatgcaaataggaaaacaggaggatgagaaagtagttaacatgcaccctcaagacttcaaaacactttttgaaactatagagcgttccaaagattgtgcttataaatggctgtatgatgaaaccctggaagataggtagcaactagactgtcgtttttggtggagcggttcatttatttggaaactatgacatgaaaaccaaatttgaaaactcacatcctttcagcagaaggtaactgttcttgtcttgcacaagccaggcagatcatttctcctaagctgatatcattggcttattggatgaaacagtgtctgctattttattcacaattgaataaaatgaaaacttcaattaattgtggatttgatcagattgaattcgttttgtttcagattcctatttaaatatttcacttgtactgttgctgatttttgcatcttcttgaagagcaagagtctgtacattattaagcttagaaagtaagcaaaactgatttactggtttgcctttcagtttgttgaaatgtattgtcaagtactgtacaatgaaattgtttaaattttaatatgatttaagctttttagaaattaaaatattttaaataagaag

SEQ ID NO: 211998 - protein, 455 aa, Artificial Sequence
  derived and/or modified sequence
MGQESSKPVWPNPTGGYQSNTGRRYGRRHAYVSFRPPTSQRERIASQRKTNSEVPMHRSAPSQTTKRSRSPFSTTRRSWDDSESSGTNLNIDNEDYSSTSRWRDTANDNEGHSDGLARRGRGESSSGYPEPKYPEDKREARSDQVKPEKVPRRRRTMADPDFWTHSDDYYKYCDEDSDSDKEWIAALRRKYRSREQTLSSSGESWETLPGKEEREPPQAKVSASTGTSPGPGASASAGAGAGASAGSNGSNYLEEVREPSLQEEQASLEEGEIPWLQYHENDSSSEGDNDSGHELMQPGVFMLDGNNNLEDDSSVSEDLEVDWSLFDGFADGLGVAEAISYVDPQFLTYMALEERLAQAMETALAHLESLAVDVEVANPPASKESIDALPEILVTEDHGAVGQEMCCPICCSEYVKGEVATELPCHHYFHKPCVSIWLQKSGTCPVCRCMFPPPL

SEQ ID NO: 211999 - DNA, 1368 bp, Artificial Sequence
  derived and/or modified sequence
atgggccaggagagcagcaagcccgtgtggcccaaccccaccggcggctaccagagcaacaccggcagaagatacggcagaagacacgcctacgtgagcttcagaccccccaccagccagagagagagaatcgccagccagagaaagaccaacagcgaggtgcccatgcacagaagcgcccccagccagaccaccaagagaagcagaagccccttcagcaccaccagaagaagctgggacgacagcgagagcagcggcaccaacctgaacatcgacaacgaggactacagcagcaccagcagatggagagacaccgccaacgacaacgagggccacagcgacggcctggccagaagaggcagaggcgagagcagcagcggctaccccgagcccaagtaccccgaggacaagagagaggccagaagcgaccaggtgaagcccgagaaggtgcccagaagaagaagaaccatggccgaccccgacttctggacccacagcgacgactactacaagtactgcgacgaggacagcgacagcgacaaggagtggatcgccgccctgagaagaaagtacagaagcagagagcagaccctgagcagcagcggcgagagctgggagaccctgcccggcaaggaggagagagagcccccccaggccaaggtgagcgccagcaccggcaccagccccggccccggcgccagcgccagcgccggcgccggcgccggcgccagcgccggcagcaacggcagcaactacctggaggaggtgagagagcccagcctgcaggaggagcaggccagcctggaggagggcgagatcccctggctgcagtaccacgagaacgacagcagcagcgagggcgacaacgacagcggccacgagctgatgcagcccggcgtgttcatgctggacggcaacaacaacctggaggacgacagcagcgtgagcgaggacctggaggtggactggagcctgttcgacggcttcgccgacggcctgggcgtggccgaggccatcagctacgtggacccccagttcctgacctacatggccctggaggagagactggcccaggccatggagaccgccctggcccacctggagagcctggccgtggacgtggaggtggccaacccccccgccagcaaggagagcatcgacgccctgcccgagatcctggtgaccgaggaccacggcgccgtgggccaggagatgtgctgccccatctgctgcagcgagtacgtgaagggcgaggtggccaccgagctgccctgccaccactacttccacaagccctgcgtgagcatctggctgcagaagagcggcacctgccccgtgtgcagatgcatgttccccccccccctgtag

SEQ ID NO: 212000 - DNA, 1368 bp, Artificial Sequence
  derived and/or modified sequence
atgggccaggaaagtagcaagcccgtgtggccaaaccccactggcgggtatcaatccaataccgggaggcgctatgggcggaggcacgcttatgtttcgttcagaccacccacctctcagcgcgagcgaattgcgagtcagcgcaaaacaaattctgaggtgcccatgcatcgctcagcgccctctcagaccacgaagcgttcacgctcaccattctcaaccactagacgctcctgggacgattccgagtctagtggtactaacctgaatattgataacgaagactacagtagcaccagccgctggcgcgacacagccaacgacaacgaaggtcattccgacgggctcgcaagaagggggcggggagagtctagcagcggctatcccgagcccaagtaccccgaagataagcgggaggcacgcagcgaccaggtcaagcccgagaaagtaccacggcgcaggcgcacgatggcagatcctgatttttggacacactccgacgattattacaaatattgcgatgaagatagcgacagcgataaagagtggatcgcagccctgagacgcaaatatagaagcagagagcaaacgttaagttcctctggagaatcctgggaaacactgcccggcaaggaggaaagagaacccccccaggcaaaagtgtctgccagtacagggacatcacccgggccaggggcatccgcctccgcgggcgcgggcgcaggagccagtgccggatctaatgggtctaattatcttgaggaagtgcgcgagccttctctccaggaggagcaggccagtttggaggagggtgaaatcccatggctgcagtaccacgaaaatgactcatccagtgaaggggacaatgactccggtcacgagctgatgcagccaggggtgttcatgctcgacgggaataataacttagaggacgattccagtgtttctgaggatctcgaggtcgactggtcgctgttcgacgggtttgccgacggcctaggcgttgcagaggccattagctatgtcgatccccaattccttacttacatggcactggaagaaaggctcgctcaagcaatggaaaccgccctggctcatctagagagtctggcagtggatgtggaggtggccaacccacccgcttcgaaagaaagtatcgatgcattacccgagatcctggtaaccgaagaccacggcgcagtgggacaggaaatgtgttgtcccatttgttgctctgagtatgtcaagggagaagtcgctacagaacttccctgccaccactatttccacaagccatgcgtttcaatttggctccagaagtctgggacgtgtccggtgtgcagatgcatgtttccaccccctctgtag

SEQ ID NO: 212001 - DNA, 2115 bp, Artificial Sequence
  derived and/or modified sequence
gcggtcgtggcggtcggagatccgagagctctgcttctctgaaaagcgtgtggctttctggacttggtctacacctgacagtcactggaatgctactccaggccttagaagaaagtgaaactaattttaaaggccccttattctttctgttacctgcctgctgaagtgaaaataaatctccctgctcctttattctaaactgattttactttcccatctcaaaaacgtgtgcagggagcaggagccctcctacccgagccccagctgtattggaaaccctcctaagtcagagtgatgggtcaggaatctagcaagcctgtatggcccaatccaacaggagggtatcagtccaatacaggtaggaggtatggaagaaggcatgcttatgtcagtttcaggccacccacgagccagcgggaaaggattgccagccagagaaagacgaactccgaagtcccaatgcacagatcagcccccagtcaaaccaccaagaggagccgatcgccattttccactactcgtcgtagttgggacgacagcgagagttcgggaaccaacctgaatattgataatgaggactattccagtacttccaggtggagggataccgccaatgacaatgagggccactcggatggcctggcaagaagagggagaggcgagagttcaagtggctatcccgagccaaagtaccctgaagacaaacgggaagcgaggagtgaccaagtgaaaccagaaaaggtgccgagacgacgacgcaccatggccgaccctgacttctggacgcacagtgatgattactacaaatactgcgacgaagactctgacagtgacaaagagtggattgctgctctgcgtcggaaatatcgaagccgagagcaaaccctgtcctccagtggcgaaagctgggagactctgccggggaaagaagagcgggaacctccacaggctaaggtgagtgccagcactggcaccagccctggccccggtgctagtgccagtgccggggctggcgccggggccagtgctggcagcaatggcagcaattaccttgaagaagttcgagaaccatctcttcaggaagagcaggcatccctggaagaaggagaaattccttggctccagtaccatgagaatgacagtagcagtgagggggataatgattctggtcacgagttgatgcaacctggggtattcatgctggatggaaacaacaaccttgaagatgactccagtgtgagcgaagacctagaagtggattggagcctctttgatggatttgcagatgggttaggagtggctgaagccatttcctatgtggaccctcagttcctcacctacatggcacttgaagaacgcctggcccaggcaatggaaactgcccttgcgcacttggagtctctcgcagtggatgtagaggtggccaatccaccagcaagcaaggagagcattgacgctcttcccgagatcctggtcactgaagatcatggcgcagttggtcaggagatgtgctgccccatctgctgtagcgaatatgtgaagggggaggtggcaactgagctgccgtgccaccactatttccacaagccgtgtgtgtccatctggcttcagaagtcaggcacctgccccgtgtgccgctgcatgttccctcccccactctaaagaccaaggccgtttactcctggtctgattattttccccatctgaaatccacaatactgcaggagccctcttgaaattaacaatggaaataaaaccaatcagtcagttagcctaaacctattgattcctcgtgattatttccaatgtgaaaacagttgtgtatgattgcattaaaaatcatatcatcttttagaggttagaaaagggaaaactaaactttctaaatgctacttgagattgcagtaagaagatacgttttctaacctgaaagttaaatcgcatttgttttcttcagtagaatgggaatgtgttgctgttacttgtaatgtcaagtttatctgttaaatatgtccaaaaggcaaaatcatttttgttgcatgttatgggtcgatgttcctgtaattgcagtgccgtaaaagcttattaaagttgttcttttggttttacatggta

SEQ ID NO: 212002 - DNA, 1368 bp, Artificial Sequence
  derived and/or modified sequence
atgggccaggagagcagcaagcctgtgtggcccaaccccaccggcggctaccagagcaacacaggaagaagatatggaagaagacatgcctacgtgtccttccggccccccaccagccagcgggagcgcatcgccagccagaggaagaccaacagcgaggtgcccatgcacaggtctgcccccagccagaccaccaagaggagccgcagccccttcagcaccacccggcgctcctgggatgacagcgagagcagcggcaccaacctgaacatcgacaatgaagactacagcagcaccagccgctggagggacacagccaatgacaatgaaggccacagtgatggcctggcccggcggggccgcggggagagcagcagcggctacccagagcccaagtacccagaggacaagcgggaggcccggagtgaccaggtgaagccagagaaggtgcccaggagaagaaggaccatggctgaccctgacttctggacccacagtgatgactactacaagtactgtgatgaagattctgacagcgacaaggagtggattgctgccctgcggaggaagtaccgcagccgggagcagaccctgagcagcagtggagagagctgggagaccctgcccgggaaggaggagcgggagcccccccaggccaaggtgtctgccagcacaggcaccagccctggccctggggccagcgccagcgctggagctggagctggggccagcgctggcagcaatggcagcaactacctggaggaggtgcgggagcccagcctgcaggaggagcaggccagcctggaggagggggagatcccctggctgcagtaccatgaaaatgacagcagcagcgagggggacaatgattctggccacgagctgatgcagcccggggtcttcatgctggatggcaacaacaacctggaggatgacagctctgtgtctgaggacctggaggtggactggagcctgtttgatggctttgctgatggcctgggcgtggccgaggccatctcctatgtggacccccagttcctgacctacatggccctggaggagcggctggcccaggccatggagacagccctggcccacctggagagcctggccgtggatgtggaggtggccaaccccccagccagcaaggagagcattgatgccctgcctgagatcctggtgacagaggaccacggggctgtgggccaggagatgtgctgccccatctgctgcagtgaatatgtgaagggggaggtggccacagagctgccctgccaccactacttccacaagccctgtgtgtccatctggctgcagaagagcggcacctgccctgtgtgccgctgcatgttccccccacccctgtag

SEQ ID NO: 212003 - DNA, 1368 bp, Artificial Sequence
  derived and/or modified sequence
atgggccaggagagcagcaagcccgtgtggcccaaccccaccggcgggtaccagtcaaatactgggcgtcgctatggccggcggcatgcgtacgttagttttaggccgcccacatcacagagagagcgaattgcatctcaaaggaaaaccaactctgaagtgccaatgcaccgctcggctccaagccagacgacaaagagaagccgaagcccattttcaaccactagaagaagctgggacgattctgaaagcagtgggactaatttgaatatcgacaatgaagattacagtagtacaagtaggtggcgggacaccgccaacgacaacgagggtcactcagatggcttggcgcggcgtggccgaggcgagagctcaagcgggtaccccgaacctaaatacccggaagataaacgagaggctaggtccgaccaggttaagccggagaaggtgcctcggaggagacgcactatggcagaccccgacttttggacgcactccgacgactattacaagtattgtgatgaggatagtgacagcgataaggagtggatcgccgcactgagacggaagtaccggagcagggaacagactttgagcagctcaggggaatcctgggaaaccctgccaggtaaggaagaacgggagcctccccaagccaaagtctcagcttcaactgggacctcacctggacctggcgcatcagccagcgccggcgctggtgcaggggcgtcggccggtagcaacggcagcaattacctggaagaagtgagagagccaagcttgcaagaggaacaggcctctttggaggagggagagatcccctggctgcaatatcacgagaatgattcgagcagcgagggggacaacgactcaggtcatgaactgatgcaacccggtgtctttatgctggacgggaataacaatctggaagatgattcctcagtttctgaagaccttgaggtggattggagcttgtttgatggttttgctgatggacttggcgtggccgaagctatcagctacgtggaccctcagtttttaacctacatggccttggaggagcggttagcccaggcaatggagacggcgcttgcacacctggaaagcttggctgtggacgtggaggtggctaaccctcccgcgagtaaagaatccattgacgccttacccgagatcctcgttaccgaggatcatggggcggttggacaggagatgtgctgtcccatttgctgcagcgaatacgtgaaaggagaggttgcaacagaactgccatgtcaccactacttccacaagccctgcgtgtcaatttggttacagaagtcggggacctgccctgtatgccggtgcatgtttcctcctccgctctag

SEQ ID NO: 212004 - DNA, 1368 bp, Artificial Sequence
  derived and/or modified sequence
atgggacaggagtcctctaaacccgtgtggcctaatccaaccggtggctatcaatccaacactggacgtaggtacggcagaagacatgcctacgtgtcttttcggcctcctacatcacagcgtgaacgcatcgcaagccagaggaaaacaaacagcgaggtgcccatgcaccgatccgccccttcccaaacaactaaaagatcaagatctcccttttccactacacgtaggagctgggatgattctgagagttctggtacaaatctcaatatcgacaacgaagattacagcagcacaagccgctggcgtgacacagctaacgacaatgaaggtcactccgacggcctagcccgtcgtgggcgaggcgaatccagttctggctatcctgagcccaagtatccagaggacaaacgggaagcaagatccgatcaggtgaaacccgagaaagtgccacgacgtcggcgaaccatggctgaccccgatttttggacacactcagacgactactacaaatattgtgatgaagactctgactcggacaaggaatggattgctgcccttcgcaggaaatatagaagccgggagcagacgctgagcagctctggagaaagctgggagaccctgcctggcaaggaggagagggagcctccacaggccaaagtgtccgcatctacagggacttctcctggacctggggcatcagccagtgcgggagccggtgccggtgcttcagccggatccaacggctccaattacctggaagaggtgcgggaaccaagcttgcaggaggaacaggcatctctggaagagggtgaaattccctggcttcagtaccatgaaaatgacagcagtagtgagggagacaatgacagcgggcatgaactaatgcagccgggtgtcttcatgctggatggtaacaataatttagaagacgactcaagcgtgagtgaagacctggaagttgactggtctctgttcgatggcttcgccgatggcctaggggtagccgaggcaatttcgtacgtcgatccacagttcttgacttacatggctctggaagaacggctggcccaggccatggagacagccctagcccaccttgagtccctggccgtggatgtggaggtggccaatcctcccgcatctaaggaaagtattgacgctctcccagaaatcctggtgactgaagaccatggggcagtgggtcaagagatgtgctgccctatctgctgcagtgaatacgttaagggggaggtcgcgacagagctgccttgtcatcactacttccacaagccttgtgtgagcatctggcttcaaaagtccggcacctgccccgtgtgcaggtgcatgttcccccctccattatag

SEQ ID NO: 212005 - protein, 1386 aa, Artificial Sequence
  derived and/or modified sequence
MLRYLLKTLLQMNLFADSLAGDISNSSELLLGFNSSLAALNHTLLPPGDPSLNGSRVGPEDAMPRIVEQPPDLLVSRGEPATLPCRAEGRPRPNIEWYKNGARVATVREDPRAHRLLLPSGALFFPRIVHGRRARPDEGVYTCVARNYLGAAASRNASLEVAVLRDDFRQSPGNVVVAVGEPAVLECVPPRGHPEPSVSWRKDGARLKEEEGRITIRGGKLMMSHTLKSDAGMYVCVASNMAGERESAAAEVMVLERPSFLRRPVNQVVLADAPVTFLCEVKGDPPPRLRWRKEDGELPTGRYEIRSDHSLWIGHVSAEDEGTYTCVAENSVGRAEASGSLSVHVPPQLVTQPQDQMAAPGESVAFQCETKGNPPPAIFWQKEGSQVLLFPSQSLQPTGRFSVSPRGQLNITAVQRGDAGYYVCQAVSVAGSILAKALLEIKGASLDGLPPVILQGPANQTLVLGSSVWLPCRVTGNPQPSVRWKKDGQWLQGDDLQFKTMANGTLYIANVQEMDMGFYSCVAKSSTGEATWSGWLKMREDWGVSPDPPTEPSSPPGAPSQPVVTEITKNSITLTWKPNPQTGAAVTSYVIEAFSPAAGNTWRTVADGVQLETHTVSGLQPNTIYLFLVRAVGAWGLSEPSPVSEPVRTQDSSPSRPVEDPWRGQQGLAEVAVRLQEPIVLGPRTLQVSWTVDGPVQLVQGFRVSWRVAGPEGGSWTMLDLQSPSQQSTVLRGLPPGTQIQIKVQAQGQEGLGAESLSVTRSIPEEAPSGPPQGVAVALGGDGNSSITVSWEPPLPSQQNGVITEYQIWCLGNESRFHLNRSAAGWARSAMLRGLVPGLLYRTLVAAATSAGVGVPSAPVLVQLPSPPDLEPGLEVGAGLAVRLARVLREPAFLAGSGAACGALLLGLCAALYWRRKQRKELSHYTASFAYTPAVSFPHSEGLSGASSRPPMGLGPAPYSWLADSWPHPSRSPSAQEPRGSCCPSNPDPDDRYYNEAGISLYLAQTARGTAAPGEGPVYSTIDPAGEELQTFHGGFPQHPSGDLGPWSQYAPPEWSQGDSGAKGGKVKLLGKPVQMPSLNWPEALPPPPPSCELSCLEGPEEELEGSSEPEEWCPPMPERSHLTEPSSSGGCLVTPSRRETPSPTPSYGQQSTATLTPSPPDPPQPPTDMPHLHQMPRRVPLGPSSPLSVSQPMLGIREARPAGLGAGPAASPHLSPSPAPSTASSAPGRTWQGNGEMTPPLQGPRARFRKKPKALPYRRENSPGDLPPPPLPPPEEEASWALELRAAGSMSSLERERSGERKAVQAVPLAAQRVLHPDEEAWLPYSRPSFLSRGQGTSTCSTAGSNSSRGSSSSRGSRGPGRSRSRSQSRSQSQRPGQKRREEPR

SEQ ID NO: 212006 - protein, 149 aa, Artificial Sequence
  derived and/or modified sequence
MTPPLQGPRARFRKKPKALPYRRENSPGDLPPPPLPPPEEEASWALELRAAGSMSSLERERSGERKAVQAVPLAAQRVLHPDEEAWLPYSRPSFLSRGQGTSTCSTAGSNSSRGSSSSRGSRGPGRSRSRSQSRSQSQRPGQKRREEPR

SEQ ID NO: 212007 - DNA, 795 bp, Artificial Sequence
  derived and/or modified sequence
atgcccaggagcctgaagagggcccagctgcggagcctgctgcccaggcctcctgctgtgagccacacccagccctggtacagagctgcccaccccaccaccagccccacagctgccagcagagatgtgcacccagccagcggggctgtgcccggcccctggctggtggagggcacagctgtgcgggagggcccccagctgcaggatgctgtgccccagaggcccacccggcccagcaaggccctgtggccagcccagatgtctgctgccccagccatccggctgggccagatggtgcctggggacacccggggcctgtggggcccccagggcaccctgctgacctggacctaccggggcggccagggcggccgctggacccggcgggcagagggcccccgggagggcacctttgctgagcagaggccccacttccagagcagcggggcccagcaggagagccggctggccatgggccccccacccctgggcctgggagatgctgctggagatggccggggccagacaggccaggagaagggccgggcagagggccggcaggccaggaagagcgcctgcaagtgccccaggaagggccccaaccctggcccctggaccagggctgctgcctggtggggccgcctggagggcgccaaggccagcgccaagggggagcaggtgcgggaccccggcggccacctgtgggagcagggccacgtgagcccctgtgcccgcttcaaccagggccacagctgtggcagccccaaggtgagccacaccacctgggtgtcctag

SEQ ID NO: 212008 - DNA, 795 bp, Artificial Sequence
  derived and/or modified sequence
atgccaaggagcctgaagcgcgctcaactgaggtcccttttgcccagaccgccagccgtctcacatacgcagccatggtaccgtgccgctcatcccacaactagccccaccgcagccagccgggacgtgcatccagcttctggcgctgtccccggtccatggctggtggaggggactgcagtcagggagggtccacagctgcaggacgcagtgcctcagaggccaaccagacctagcaaggctctttggcccgcacagatgagcgcggctccggctatccgattggggcaaatggtccctggtgacactcggggactgtggggcccacagggaacccttctcacatggacatatcgcggtggtcagggaggcagatggacacggagagctgaaggaccacgggaagggaccttcgccgaacaacggcctcactttcagagttctggtgcgcagcaggagagccgtttagccatggggcctccacctctcgggctcggcgacgccgctggcgatggcaggggccagaccgggcaggaaaaaggccgagcagagggcagacaggcacggaagtccgcctgtaaatgccccaggaagggtccaaacccgggaccttggaccagagcggctgcttggtggggaagactagagggggcaaaagctagcgccaagggcgaacaggtcagagacccgggagggcacctgtgggaacagggtcatgtctctccctgtgctcgatttaaccagggtcactcatgtggcagcccaaaagtctctcacactacttgggttagctag

SEQ ID NO: 212009 - DNA, 4161 bp, Artificial Sequence
  derived and/or modified sequence
atgttacgctacttgctcaaaacactgctgcagatgaatttgttcgccgacagcctcgccggagatatttccaattctagcgaacttctgcttggtttcaacagtagcctggcggctcttaaccacactctgctgccacccggagaccctagcctcaatgggagccgggtcggccccgaagatgcaatgccccgaatagttgagcagcccccagatctgctggtgtctcgcggggaacccgcaacactgccatgcagggctgagggccgcccaagacccaacattgaatggtataagaatggagcccgcgtagcgactgttagagaggatcctagggctcacagactgcttctgccaagcggtgctctgtttttccctaggatcgtacacggccggcgcgctagaccggatgaaggagtgtatacatgcgtggcgaggaactacctcggagctgccgcctccaggaatgctagtttggaggttgccgtattgagggatgacttcagacagagcccaggcaatgttgtggtggccgtgggcgagccggccgtcctggagtgtgtgcccccccgcggacaccccgagccttccgtgtcatggaggaaggacggggccagactgaaggaggaggaaggtcgcattactatacgtggaggaaagttaatgatgtcgcataccctgaagtcagatgccggcatgtatgtgtgtgtcgcctctaacatggccggcgaaagagaaagcgccgccgcggaagttatggtacttgaaaggccatcattcctgcgtcgacccgttaatcaagttgtcctggccgacgcccccgtgactttcctgtgtgaagtaaagggagatccgccacctcggttgaggtggaggaaggaagatggcgaacttcctactggccggtacgagatcaggtcagatcactccctttggatcgggcacgtatcagctgaggatgagggaacgtatacgtgcgttgctgagaattcagttggtcgagccgaggcctcgggctctctgtccgttcatgtccccccccaattggttacacagccccaagatcagatggcagccccgggcgagagcgtggctttccagtgcgagacaaaaggtaaccccccacccgcgattttctggcagaaggaaggttctcaagtcctcttgttcccatcccagagtcttcaacctacaggcagattttctgtgagccctcggggtcagctgaacatcacagccgtgcagcgcggcgacgccgggtattatgtttgtcaggccgtgtccgtagcaggatctatcctcgccaaagctcttctggaaattaagggagcttcactcgacgggctgccgcccgtcattctccagggtccagctaatcagacactggtgctgggctcaagcgtttggttaccatgcagagtgacagggaatccccagccctcggtgagatggaaaaaagatggccagtggttacaaggagatgacctccaatttaagacgatggccaatgggaccctgtacatcgctaatgtgcaggaaatggacatgggattctactcctgtgttgcaaagtcctcaaccggagaggcgacatggtctggctggctcaagatgcgggaggactggggagtttctccagatccccctactgagccgtccagcccacccggagcccccagccaacctgtcgtgacagagataaccaagaatagcatcaccctgacttggaagcccaatccccagacgggggccgccgtgacatcatatgtgatcgaggccttttcgccagctgcagggaacacctggcgcactgtcgccgacggcgtccagctcgaaacccacaccgtttccggcctgcagcccaatacaatttacctctttctggtgcgggcagtcggtgcatggggtctgtcagagccttcacccgtctccgagcctgtgagaactcaagacagctccccatctaggccagtagaggatccctggcgcggccagcagggccttgcagaggtggctgtgcgactccaggagcctatcgtccttggccccaggacgttgcaggtctcttggacagtggatggaccggtccagctggtccagggattccgggtctcctggcgcgtcgccgggcctgagggcggatcctggacaatgctggatctgcagagtcctagccaacagagtaccgtcctacgaggtctccccccagggacacagatacagatcaaggtgcaggctcaggggcaggaagggctaggagctgagtcgctatcagtcacccgatccattcccgaggaagcacccagcggaccgccccagggcgtcgcagtggcgttggggggcgacggcaacagcagcattaccgttagctgggagccccctctgccttctcagcagaacggcgttatcacagaatatcaaatatggtgtttaggtaacgagagtcggttccatctgaatcggagcgcagctggatgggcgcgaagtgcaatgctgcgaggtttagtgcccggcctcctgtacaggactctggtggcggctgccacatcagccggggtaggtgttccatccgcccccgtgcttgtccagcttcctagcccgcccgacctggagccggggctcgaggtgggggcaggcctggccgtgaggttggcgagggtactgagagaaccagcctttttggccggatccggtgcagcatgtggggccttgctcctgggcctgtgcgctgccctgtattggaggagaaaacaaagaaaagaactgtcccattacactgctagctttgcatatactccggctgtgagctttccccattctgaaggcctgagtggtgccagttctcggccacctatggggctgggacccgcaccctactcctggctcgcggatagctggccccacccaagccgatccccatcggcccaggagcccagggggtcttgttgcccgtctaatccggacccggatgacagatattacaacgaagcggggattagtctttacctggcacagacagctagaggtacagccgctcccggtgagggacctgtgtattctactatcgatcccgcaggggaagagcttcaaaccttccatgggggttttccccaacaccctagcggagatcttggaccttggtctcagtatgctccccctgagtggtcccagggggattctggcgcaaaggggggaaaggttaaattgcttggtaagcccgtccagatgccttctctcaactggcccgaggcgcttccgccccctcccccttcatgcgagctgagttgtctcgaggggcccgaagaggagttagagggtagttccgagcccgaggaatggtgcccccctatgccggagcgatctcatttgaccgaaccaagttcctccggaggctgtctggtcacccccagccgccgtgaaaccccatcccctactccttcttatgggcagcagagcactgcgacactgacgccgtcgccccccgacccaccacaaccacccacagatatgcctcatctccaccaaatgcccagaagagttccactgggcccatcttcaccccttagcgtgtcacaacccatgttaggtatccgggaagctaggcccgcagggttgggcgcaggtcccgcggcgtcaccacacctgagcccctcccctgcccccagtactgcctcctcagcgcccggacggacgtggcaggggaatggggagatgaccccaccccttcagggccctcgagccaggtttcggaaaaaacctaaagcgctgccgtaccggagagaaaactcccctggcgatctgccccctcctccactcccacctccagaagaggaggcgagctgggctctggaactcagggcggcaggctctatgtcatcactcgagcgcgagcggagcggcgagcgcaaggccgttcaggcagtgccattggctgcgcaaagagtgctgcacccagatgaagaagcctggctgccttactctcgcccaagctttctgtcacgtggccagggaacatctacctgttccaccgctggttccaattctagtagaggatcttcgagttccagggggtctaggggccccgggagaagtcgtagccggagccagtcacgatcacagagccaaagacccggacagaagagacgtgaggagccccgatag

SEQ ID NO: 212010 - DNA, 4095 bp, Artificial Sequence
  derived and/or modified sequence
atggaaagacctgaggacagtctgtctttatggtcactgaatctttctccacagtttccttgtctcaatgcattgcggcacccactgagtcccggcagtagggtcggacctgaagatgctatgcccagaatcgtggagcaaccgcccgacttgctggtgtcacgcggggagccagcaacgcttccctgtcgggccgaggggcgaccccgccccaatattgaatggtataaaaatggagctcgtgtcgccactgtgcgggaggaccctcgggcacatagacttctcctgcccagcggcgcacttttctttccccggatagtgcatggcagaagagcacgaccagatgagggagtgtatacgtgcgtggcccgaaattatctgggagctgctgcttctcggaatgcctcactcgaggtggccgtgctcagggacgactttaggcagagtcctggcaacgttgtggtggcagtgggggaacccgccgtgctcgagtgcgttccaccccgcggccatcctgaaccaagcgtgagttggagaaaagacggtgcaagattgaaggaggaagagggtaggataaccataagggggggcaagctcatgatgtctcataccctgaagagcgatgccgggatgtacgtttgcgtggctagcaatatggctggcgagagggaatccgcagcagccgaggtgatggtcctcgagagaccttctttcctcaggcggccggtgaatcaggtcgtactggccgacgcccctgtgacctttctgtgcgaagttaaaggtgatcccccacccaggctgcgctggcggaaagaggatggcgaactcccaactgggcgctacgagatacgcagcgatcatagtttatggatcggtcatgtgagtgccgaggatgagggaacctatacttgcgttgctgaaaactccgtagggagagcagaggccagtggttcgcttagcgtccatgtgccaccgcagctggtgacacaaccacaggatcaaatggcggcgcccggcgaatcagtagcgttccagtgcgagaccaagggaaatccccctcccgccatcttttggcagaaggaagggtcacaagtgctcctgtttccaagccagtcactgcaaccaactggaagattttctgtttcacctcgtggacagttgaatatcaccgccgtgcagagaggagatgccggctattacgtatgccaggctgttagcgtggcagggtccatcctggccaaggccctattggagatcaaaggcgcctctttggacgggctgccacctgtgattttacagggccctgctaaccagacactggtacttggctccagcgtttggctcccttgtagggtgaccggtaatccccagccctctgtgaggtggaagaaggacggacagtggctgcaaggagacgatctgcagtttaagacaatggccaacggcactctatacatcgccaacgtccaagaaatggacatggggttctattcctgtgttgccaaatccagtactggagaggctacttggtccggctggctgaagatgagagaggactggggagtttctcctgatccacctaccgagcccagctctcctcctggggcaccctcccagcccgtcgttaccgagatcacgaagaattccatcactctgacttggaaacccaacccacagacaggggcggcggtgacgtcctacgtgattgaggccttcagccctgctgctggaaacacttggaggaccgtcgccgatggggtccaacttgagacacacactgtttcaggcctccaaccaaatacaatctacctatttttagtgcgagcagtgggcgcctggggcttgagtgagccctccccggtctcggagccagtcagaacccaagattcttcccccagccgaccagttgaggacccttggcggggacagcagggcctcgccgaggttgccgtcaggctccaggaacctattgttctgggaccacggaccctgcaggtctcctggaccgtggatgggccagtccagttggtccaaggattccgagtctcctggcgtgtcgcaggacccgaaggtggaagttggaccatgctcgacctccagtccccttcccaacaatcgacagtactgaggggtcttccgcccggcacacagattcagattaaggtccaagcccaagggcaggaaggtctcggggccgagtccctttctgtcacccgcagtattcccgaagaagccccttcagggcccccacagggggttgctgtcgcccttggaggggatggcaattccagcattacggtgtcatgggaaccacctctcccctcccagcaaaacggagtaattaccgagtatcagatctggtgcctggggaatgaaagccgtttccacctgaaccgtagtgccgcaggatgggcacggtcagctatgcttagagggctggttccaggcctcctataccggaccctcgtcgctgccgcgactagcgcgggcgttggcgtgcctagcgcacccgttctcgtccagttaccgtctccacctgacttggagccgggcctggaagttggcgccggtctggccgtgcggctggccagagtgctgcgggaacctgcttttcttgccgggagcggtgccgcatgcggtgccctgcttctcgggctgtgcgctgctctgtactggcggaggaaacagaggaaagagctgtcccattatacagcttcctttgcttatacccccgctgtgagctttcctcacagtgaaggcctaagcggggcaagtagtcggcccccaatgggactgggtcctgctccttatagttggctggctgattcttggccccacccttcaaggagcccctcagcccaagaacccagaggctcatgctgcccatcaaatccagaccccgacgataggtattataatgaggcgggaatctccctgtacctggcccagactgcccggggcacagctgcccccggagagggtcctgtgtactctacgatcgatccagcaggagaagagctgcagacattccacggggggtttcctcaacatccctcaggtgacttaggaccttggagccaatacgccccccctgagtggagccagggcgattcaggcgctaagggggggaaggtaaagctgctcggcaaacccgttcagatgccatcacttaactggccagaggccttgcctccgccacctccgtcctgtgagctgagttgtctcgagggcccggaggaagagctggaagggagctcagagcccgaggagtggtgcccacccatgcccgaacggtcacatctgaccgagccctcctcatctgggggatgcctcgtgaccccaagcaggcgcgagacaccttcacctaccccttcttatggccagcagagcacagccactctaactccgtcgcctcctgatcccccacaaccgccaacagatatgccccatctgcaccagatgcctagacgggtgccactcgggccctctagtccactgagtgtttctcaaccgatgctgggcattagagaagccaggccagctggtctgggcgctggcccggccgcttctccgcatctgtctccgtcgcccgctccctccactgcctcttccgccccaggccgtacctggcaggggaatggagaaatgaccccacctctgcagggaccccgcgctcgatttcgtaagaaacccaaggccctgccctatcgccgggaaaatagccctggtgacctgccccctccaccactgccacccccggaagaagaggcttcctgggccctcgagctccgggctgcgggctccatgagtagtttggagagggaaaggagcggcgagaggaaagctgttcaagcggtccctctcgcagcccagcgggtcttgcaccccgatgaggaggcctggttgccttattctcgaccgtcatttctatcccgcggtcagggaacaagcacttgtagtacagctgggtcgaatagctctagaggctcttcatccagccgtggttctagggggcccggacgttctcgtagccggagccagtcccgatcgcaatcccaacggcccggccagaagcgcagagaggagccccggtag

SEQ ID NO: 212011 - DNA, 4161 bp, Artificial Sequence
  derived and/or modified sequence
atgctgcgctacctgctgaagaccctgctgcagatgaacctgtttgctgacagcctggccggggacatcagcaacagcagcgagctgctgctgggcttcaacagcagcctggccgccctgaaccacaccctgctgcccccaggggaccccagcctgaatggcagccgggtgggcccagaagatgccatgccccgcatcgtggagcagcccccagacctgctggtgtccagaggagagcccgccaccctgccctgcagagctgagggccggccccggcccaacatcgagtggtacaagaatggagcccgggtggccaccgtgcgggaggacccccgggcccaccggctgctgctgcccagcggggccctcttcttcccccgcatcgtgcacggccggcgggcccggccagatgaaggagtgtacacctgtgtggccaggaactacctgggcgccgccgccagcagaaatgccagcctggaggtggccgtgctgagagatgacttccggcagagccctggaaatgtggtggtggccgtgggggagcctgctgtgctggagtgtgtgcccccccggggccaccctgagcccagcgtgtcctggaggaaggatggagcccggctgaaggaggaggagggccgcatcaccatccggggcggcaagctgatgatgagccacaccctgaagagtgatgctggcatgtatgtgtgtgtggccagcaacatggccggggagcgggagagcgctgctgctgaggtgatggtgctggagcggcccagcttcctgcggcggcctgtgaaccaggtggtgctggctgatgcccctgtgaccttcctgtgtgaggtgaagggggaccccccaccccggctgcgctggaggaaggaggatggagagctgcccaccggccgctatgagatccgcagtgaccacagcctgtggattggacatgtgtctgcagaagatgagggcacctacacctgtgtggctgaaaattctgtgggccgggcagaggccagcggcagcctgtctgtgcacgtgcccccccagctggtgacccagccccaggaccagatggccgcccctggagagagcgtggccttccagtgtgagaccaagggcaaccccccaccagccatcttctggcagaaggagggcagccaggtgctgctcttccccagccagagcctgcagcccaccggccgcttctctgtgagcccccggggccagctgaacatcacagctgtgcagagaggagatgctggctactacgtgtgccaggccgtgtctgtggccggcagcatcctggccaaggccctgctggagatcaagggggccagcctggatggcctgccccctgtgatcctgcagggccctgccaaccagaccctggtgctgggcagctctgtgtggctgccctgccgggtgactggaaacccccagcccagcgtgcgctggaagaaggatggccagtggctgcagggagatgacctgcagttcaagaccatggccaacggcaccctgtacatcgccaacgtgcaggagatggacatgggcttctacagctgtgtggccaagagcagcactggagaggccacctggagcggctggctgaagatgagggaggactggggcgtgtccccagaccccccaacagagcccagcagccccccaggggcccccagccagcctgtggtgacagagatcaccaagaacagcatcaccctgacctggaagcccaacccccagacaggagctgctgtgaccagctatgtgattgaggccttcagccctgctgctggcaacacctggaggacagtggctgatggagtgcagctggagacccacacagtgtctggcctgcagcccaacaccatctacctgttcctggtgcgggctgtgggcgcctggggcctgtctgagcccagccctgtgtctgagcctgtgaggacccaggacagcagccccagcaggcctgtggaggacccctggaggggccagcagggcctggccgaggtggccgtgcggctgcaggagcccatcgtgctgggccccaggaccctgcaggtgtcctggacagtggatggccctgtgcagctggtgcagggcttccgggtgtcctggagggtggccggccctgagggcggctcctggaccatgctggacctgcagagccccagccagcagagcacagtgctgcggggcctgcccccaggcacccagatccagatcaaggtgcaggcccagggccaggagggcctgggcgctgagagcctgtctgtgaccaggagcatccctgaggaggcccccagcggccccccccagggcgtggccgtggccctgggcggagatggcaacagcagcatcaccgtgtcctgggagccccccctgcccagccagcagaatggagtcatcacagagtaccagatctggtgcctgggcaatgaaagccgcttccacctgaacagatctgctgctggctgggcccggagcgccatgctgcggggcctggtgcccggcctgctgtaccgcaccctggtggccgccgccaccagcgctggggtgggcgtgcccagcgcccctgtgctggtgcagctgcccagccccccagacctggagcccggcctggaggtgggcgccggcctggccgtgcggctggcccgggtgctgcgggagcccgccttcctggccggcagcggggccgcctgtggggccctgctgctgggcctgtgtgccgccctgtactggaggaggaagcagaggaaggagctgagccactacacagccagctttgcctacaccccagctgtgtccttcccccacagcgagggcctgagcggggccagcagccggccccccatgggcctgggccctgccccctacagctggctggccgacagctggccccaccccagccgcagccccagcgcccaggagccccggggcagctgctgccccagcaacccagaccctgatgaccgctactacaatgaagctggcatcagcctgtacctggcccagacagcccggggcacagctgcccctggagagggccctgtgtacagcaccatcgaccctgctggggaggagctgcagaccttccatggaggcttcccccagcaccccagcggggacctgggcccctggagccagtatgcccctcctgagtggagccagggcgacagcggggccaagggcggcaaggtgaagctgctgggcaagcctgtgcagatgcccagcctgaactggccagaggccctgcccccacctccacccagctgtgagctgagctgcctggagggccctgaggaggagctggagggcagcagcgagcctgaggagtggtgcccccccatgcctgagaggagccacctgacagagcccagcagcagcggcggctgcctggtgacccccagccggcgggagacccccagccccacccccagctatggccagcagagcacagccaccctgacccccagccccccagaccccccccagcccccaacagacatgccccacctgcaccagatgccccggcgggtgcccctgggccccagcagccccctgtctgtgtcccagcccatgctgggcatccgggaggcccggcctgctggcctgggcgccggccctgctgccagcccccacctgagccccagccctgcccccagcacagccagcagcgcccctggccgcacctggcagggcaatggagagatgaccccacccctgcagggcccccgggcccgcttcaggaagaagcccaaggccctgccctacagaagagagaacagccctggggacctgcccccaccacccctgcccccacctgaggaggaggcctcctgggccctggagctgcgggccgccggctccatgagcagcctggagcgggagaggtctggagagaggaaggctgtgcaggccgtgcccctggccgcccagagggtgctgcacccagatgaggaggcctggctgccctacagccggcccagcttcctgagccggggccagggcaccagcacctgcagcacagctggcagcaacagcagccggggcagcagcagcagccggggcagccggggccctggccgcagccgcagccgcagccagagccgcagccagagccagaggcctggccagaagagaagagaggagcccaggtag

SEQ ID NO: 212012 - DNA, 4095 bp, Artificial Sequence
  derived and/or modified sequence
atggagaggcctgaggacagcctgagcctgtggagcctgaacctgagcccccagttcccctgcctgaatgccctgcggcaccccctgagccctggcagccgggtgggcccagaagatgccatgccccgcatcgtggagcagcccccagacctgctggtgtccagaggagagcccgccaccctgccctgcagagctgagggccggccccggcccaacatcgagtggtacaagaatggagcccgggtggccaccgtgcgggaggacccccgggcccaccggctgctgctgcccagcggggccctcttcttcccccgcatcgtgcacggccggcgggcccggccagatgaaggagtgtacacctgtgtggccaggaactacctgggcgccgccgccagcagaaatgccagcctggaggtggccgtgctgagagatgacttccggcagagccctggaaatgtggtggtggccgtgggggagcctgctgtgctggagtgtgtgcccccccggggccaccctgagcccagcgtgtcctggaggaaggatggagcccggctgaaggaggaggagggccgcatcaccatccggggcggcaagctgatgatgagccacaccctgaagagtgatgctggcatgtatgtgtgtgtggccagcaacatggccggggagcgggagagcgctgctgctgaggtgatggtgctggagcggcccagcttcctgcggcggcctgtgaaccaggtggtgctggctgatgcccctgtgaccttcctgtgtgaggtgaagggggaccccccaccccggctgcgctggaggaaggaggatggagagctgcccaccggccgctatgagatccgcagtgaccacagcctgtggattggacatgtgtctgcagaagatgagggcacctacacctgtgtggctgaaaattctgtgggccgggcagaggccagcggcagcctgtctgtgcacgtgcccccccagctggtgacccagccccaggaccagatggccgcccctggagagagcgtggccttccagtgtgagaccaagggcaaccccccaccagccatcttctggcagaaggagggcagccaggtgctgctcttccccagccagagcctgcagcccaccggccgcttctctgtgagcccccggggccagctgaacatcacagctgtgcagagaggagatgctggctactacgtgtgccaggccgtgtctgtggccggcagcatcctggccaaggccctgctggagatcaagggggccagcctggatggcctgccccctgtgatcctgcagggccctgccaaccagaccctggtgctgggcagctctgtgtggctgccctgccgggtgactggaaacccccagcccagcgtgcgctggaagaaggatggccagtggctgcagggagatgacctgcagttcaagaccatggccaacggcaccctgtacatcgccaacgtgcaggagatggacatgggcttctacagctgtgtggccaagagcagcactggagaggccacctggagcggctggctgaagatgagggaggactggggcgtgtccccagaccccccaacagagcccagcagccccccaggggcccccagccagcctgtggtgacagagatcaccaagaacagcatcaccctgacctggaagcccaacccccagacaggagctgctgtgaccagctatgtgattgaggccttcagccctgctgctggcaacacctggaggacagtggctgatggagtgcagctggagacccacacagtgtctggcctgcagcccaacaccatctacctgttcctggtgcgggctgtgggcgcctggggcctgtctgagcccagccctgtgtctgagcctgtgaggacccaggacagcagccccagcaggcctgtggaggacccctggaggggccagcagggcctggccgaggtggccgtgcggctgcaggagcccatcgtgctgggccccaggaccctgcaggtgtcctggacagtggatggccctgtgcagctggtgcagggcttccgggtgtcctggagggtggccggccctgagggcggctcctggaccatgctggacctgcagagccccagccagcagagcacagtgctgcggggcctgcccccaggcacccagatccagatcaaggtgcaggcccagggccaggagggcctgggcgctgagagcctgtctgtgaccaggagcatccctgaggaggcccccagcggccccccccagggcgtggccgtggccctgggcggagatggcaacagcagcatcaccgtgtcctgggagccccccctgcccagccagcagaatggagtcatcacagagtaccagatctggtgcctgggcaatgaaagccgcttccacctgaacagatctgctgctggctgggcccggagcgccatgctgcggggcctggtgcccggcctgctgtaccgcaccctggtggccgccgccaccagcgctggggtgggcgtgcccagcgcccctgtgctggtgcagctgcccagccccccagacctggagcccggcctggaggtgggcgccggcctggccgtgcggctggcccgggtgctgcgggagcccgccttcctggccggcagcggggccgcctgtggggccctgctgctgggcctgtgtgccgccctgtactggaggaggaagcagaggaaggagctgagccactacacagccagctttgcctacaccccagctgtgtccttcccccacagcgagggcctgagcggggccagcagccggccccccatgggcctgggccctgccccctacagctggctggccgacagctggccccaccccagccgcagccccagcgcccaggagccccggggcagctgctgccccagcaacccagaccctgatgaccgctactacaatgaagctggcatcagcctgtacctggcccagacagcccggggcacagctgcccctggagagggccctgtgtacagcaccatcgaccctgctggggaggagctgcagaccttccatggaggcttcccccagcaccccagcggggacctgggcccctggagccagtatgcccctcctgagtggagccagggcgacagcggggccaagggcggcaaggtgaagctgctgggcaagcctgtgcagatgcccagcctgaactggccagaggccctgcccccacctccacccagctgtgagctgagctgcctggagggccctgaggaggagctggagggcagcagcgagcctgaggagtggtgcccccccatgcctgagaggagccacctgacagagcccagcagcagcggcggctgcctggtgacccccagccggcgggagacccccagccccacccccagctatggccagcagagcacagccaccctgacccccagccccccagaccccccccagcccccaacagacatgccccacctgcaccagatgccccggcgggtgcccctgggccccagcagccccctgtctgtgtcccagcccatgctgggcatccgggaggcccggcctgctggcctgggcgccggccctgctgccagcccccacctgagccccagccctgcccccagcacagccagcagcgcccctggccgcacctggcagggcaatggagagatgaccccacccctgcagggcccccgggcccgcttcaggaagaagcccaaggccctgccctacagaagagagaacagccctggggacctgcccccaccacccctgcccccacctgaggaggaggcctcctgggccctggagctgcgggccgccggctccatgagcagcctggagcgggagaggtctggagagaggaaggctgtgcaggccgtgcccctggccgcccagagggtgctgcacccagatgaggaggcctggctgccctacagccggcccagcttcctgagccggggccagggcaccagcacctgcagcacagctggcagcaacagcagccggggcagcagcagcagccggggcagccggggccctggccgcagccgcagccgcagccagagccgcagccagagccagaggcctggccagaagagaagagaggagcccaggtag

SEQ ID NO: 212013 - DNA, 4161 bp, Artificial Sequence
  derived and/or modified sequence
atgctgcggtacctgctgaagaccctgctgcagatgaacctgttcgctgactcacttgccggtgacatttccaactcctcagagctgctgctaggtttcaacagcagcctagcagcgctgaaccacactctgctaccacctggcgatcccagtttgaatggcagtagggtagggccagaggacgccatgccccggatcgtggagcagcctccggacctactggtaagtcggggggagccggcgaccctcccttgcagggccgaaggccgtcctaggcccaacatcgaatggtataagaacggcgcaagggtagcgactgttagggaagatcctcgagctcatcggctactgctgccctcaggtgcactgttcttcccacgcatagtgcatgggcggagggccagacctgacgaaggggtgtacacctgtgtggccagaaactacctgggagcagctgcgtcacgtaatgcatccctggaggtcgcagtgctgcgagatgacttcagacaatctccgggtaatgtggtcgtcgcagttggggaacccgccgtccttgagtgcgtgccgccgcgaggccacccagaaccatcggtttcctggagaaaagatggtgctcggttaaaagaggaagagggccggatcactatcagaggagggaaacttatgatgtctcacacgctaaagtccgatgccggaatgtacgtgtgtgtggcttcgaatatggctggcgaacgcgaaagtgctgccgctgaagtcatggtcctcgaaaggccttcctttttgcgacggcccgtgaaccaggtggtactggccgatgcccctgttacatttctttgcgaagtaaagggtgaccctccgccaagattaaggtggagaaaggaagacggcgaattaccaaccggacggtatgagattagaagcgaccattccctgtggatcggtcatgtctcagcggaggatgaaggaacttatacctgtgttgccgaaaactctgtcggcagagccgaagcgtccggtagtctttcagtgcatgtgcccccgcagctggtgacgcaaccgcaggaccagatggctgccccgggggagtctgtggcctttcagtgcgaaaccaaaggaaatcctcctccagcaatcttttggcagaaggaggggtctcaagtcctgctttttccgtctcaatctctgcagccaaccggcaggttttctgtctcacccaggggccagctgaatataaccgccgtgcaaagaggcgacgccggctactacgtatgccaggccgttagcgtggcggggtccatactggcgaaggccctgctggaaatcaagggagccagtttggatggactgccgcctgtgatcctgcaggggcccgctaaccaaacgctcgtcctggggagttccgtgtggctgccctgcagggttaccgggaacccccagccctcagtgcggtggaaaaaagacgggcagtggctccagggagacgatctccagttcaagactatggctaacggcactctgtacattgcgaacgtgcaagagatggacatgggattctactcctgtgtcgccaaaagctctacgggtgaggccacttggtccggatggcttaagatgagggaggactggggtgtatctcccgatccaccaacggaaccctcttcgccacccggagcaccatcacagcccgtcgtcacagaaatcacgaagaactcaataactctgacctggaagcctaatccacaaaccggggctgccgtgacgtcctacgttattgaagcgtttagccccgccgcaggaaacacatggcggaccgtggccgacggcgtccagctagaaacccacaccgtgagcggccttcagcccaacacaatctacttgtttctggtgcgagccgtcggggcatggggactatctgaaccgtctcctgttagcgaacctgtccgaacacaggacagcagtccctctaggcccgttgaagatccatggcgtggccaacagggcctagcagaggtggcggtaaggctgcaggaacctattgtgctcggacccaggaccttgcaggtaagctggacggtggatggacccgtccaattggttcagggattcagggtgtcgtggcgcgtggctgggcctgaaggagggagctggaccatgctcgatctacagtccccatcccagcagagtaccgtgttgagaggattaccacctgggacgcaaatacagatcaaagtgcaggctcaagggcaagagggactcggtgcagaaagcctgtctgtcacgagaagcattcccgaggaggccccatcggggcccccacaaggagttgctgtggcactcgggggagacgggaatagctctatcacagtgtcctgggagcccccgcttccaagtcaacagaatggcgtcatcaccgaataccaaatttggtgtcttgggaatgagagccggttccatcttaaccgtagcgccgcagggtgggcaagaagcgctatgctccgcgggctagtgcccggactcctgtatcgcactcttgtcgcggctgccacgagtgccggagtgggtgtaccctccgcccccgttttagtgcaacttccatctcccccagatctcgagccagggcttgaggtcggcgccggactcgcagtccgtctagccagggtgctgcgcgaaccagccttcctcgcaggatccggagcggcgtgcggcgctctgctgctcggcctgtgcgccgctctctactggcggcgcaagcaacgcaaggagctgagtcattacactgccagtttcgcctatacccctgcagtatcttttccccactcagaaggcctttctggggctagtagcagaccaccaatgggacttgggcccgcaccctactcttggctagccgattcttggccccacccctctagatcaccttctgcccaggagcctagaggtagctgctgcccaagcaatcccgatccagacgatagatactataatgaggctggtatctccctgtacctggcgcagacagcccgcggtacggccgcgcccggcgaaggcccagtgtacagcacgatcgaccctgctggcgaggaacttcaaacgtttcacggcgggttcccacaacatccctctggagatctgggcccttggagtcagtacgcaccacccgagtggtctcaaggggacagtggagccaagggtggcaaggtgaaactgctcggcaagcctgtgcagatgccctcccttaattggcccgaagcactgcccccacctccaccctcctgcgaactgtcctgtctcgagggaccagaagaggagctggaggggtcctctgaacctgaggagtggtgcccaccaatgcccgagagatcccatcttacagagccatcaagttctggaggctgtttggtaacccctagccggagggagaccccctcccctactcccagctatggccagcagtctactgccactctaaccccgagtccccctgatcctccacagccccccaccgatatgcctcatctgcatcagatgccgcgcagagtgcccctgggcccgtcttctcccctctccgtctcccaaccaatgttaggtattagagaagcacggcctgctggcctcggagccggccccgccgcatctccccatctgagtccatcaccagctccgtcaacagcatcctctgcaccaggtcggacctggcagggtaacggtgagatgactcctcctctgcagggtcctcgggccagatttaggaagaagcctaaagcactgccgtataggcgcgagaattcacccggggaccttccaccgcctccactgccccccccagaggaggaggctagctgggctctggaattgcgggctgcaggctccatgtctagtttggagcgagagaggagcggtgagagaaaggccgtccaggcagtgccgctagcggcccaacgagtgctacatccagatgaggaggcatggttgccctacagtagaccgagtttcctaagcagaggacagggcaccagtacatgcagcacagcaggtagtaacagttcaagaggcagcagtagttcccgaggttctcgcggcccgggccgttcccggagtaggtcccagagtaggagtcagagtcaaagacccggtcagaaaagaagagaagaaccccgatag

SEQ ID NO: 212014 - DNA, 4095 bp, Artificial Sequence
  derived and/or modified sequence
atggagcggcccgaggacagcctgagcctgtggagcctgaacctgtcgccccagttcccttgccttaacgccctgagacacccgctctcacctggctcaagagtcgggccagaagacgctatgccccgcattgtggagcagcctcctgatctattagtttctcgcggcgagcctgcaacactgccctgtcgagctgaaggtcggccccgtccaaatatcgagtggtacaagaatggggcccgggtggccactgtaagagaggacccaagagcccacaggctgctgctgccaagtggggctctcttctttcccaggatcgttcacgggaggcgggcacgacctgatgagggagtttacacttgcgtcgcacggaattatctaggtgccgccgcatctaggaacgcatccctggaggtggctgtacttagagatgacttcaggcaaagtcctggaaatgtggtggtggccgtgggggaaccggccgtgcttgaatgtgtcccccccagggggcatccagagccttcggttagttggcggaaggatggagctagactgaaggaagaggagggacggattacaattcggggcggaaaactgatgatgtcacacactctcaaaagcgatgccggcatgtacgtctgcgtggcatccaacatggccggtgaacgagagagtgccgcagcggaggtgatggtattggagcgaccttcatttcttcgcaggccggttaaccaggtggttctggcagatgcaccagttacctttctttgtgaggtgaagggggacccaccccctcgcctgcgctggcgaaaggaagatggtgagctgccaaccggacgctacgaaattcgctcggatcacagtttgtggataggtcacgtttcagccgaggatgagggaacttatacttgcgtggcggaaaactcggtgggccgcgcggaggcctctggcagccttagcgttcacgtgcctccacaactcgtgacgcagcctcaggaccaaatggccgcccccggagagtctgtcgcttttcaatgcgagactaagggcaatccaccacccgcgatcttttggcaaaaggaggggtcccaggtgctgctgtttccatctcagagccttcagccgaccggacgctttagcgtaagcccgcggggccagctaaacattaccgccgttcagcgcggggacgctggctactacgtctgccaggcggtgtctgttgccgggtcaatattggccaaagccctgctagaaattaagggggccagtctcgacggactgcccccagtgatcctgcagggccctgcaaatcagacactggtactcggcagcagcgtgtggctcccatgcagggttactggcaacccacaaccatctgtacgctggaaaaaagacgggcagtggcttcagggcgatgacctgcagtttaagaccatggccaacgggaccctttatattgccaatgtgcaggagatggacatgggattctactcttgtgtcgctaagagttctacaggcgaagcgacatggtctggatggctgaagatgagggaggactggggggtatcgcccgaccctcccactgagccatcaagtccccccggtgccccctctcaacctgttgtgaccgaaatcacaaaaaactctatcaccctaacctggaaacctaatccccagacgggagctgccgtgaccagttacgttattgaagccttctcccctgccgccgggaatacttggcgaaccgttgccgacggggtccagctggaaacgcatacagtgagcggtctccagcctaatactatctatctgtttcttgtccgcgccgtcggcgcgtggggtctgtcagaaccttcgcctgtgtccgagccggtccgtacacaggactcaagcccctcccgtcccgtcgaggacccgtggagggggcagcagggactggctgaggtcgctgtccgattgcaggaaccaatcgttctgggacccagaacactgcaggtcagctggaccgtagacggtcctgtgcagctagtgcaggggttcagagtgagttggcgggtggccgggcctgaggggggaagttggaccatgctggacctccagtcaccatctcaacagtctacggtgctgcgcggcctgcctccaggcactcagatccagataaaagtacaggcacagggccaagagggcttgggggctgagtccctgtctgtgacccggtcaattcctgaagaggcaccaagtggaccacctcagggagtcgccgtcgctttgggcggcgacggaaacagttctattacagtgtcatgggagcccccattaccttcccagcagaacggcgttatcactgagtatcagatctggtgtctgggaaacgaatcgaggtttcatctgaaccgatccgccgctggttgggcgcgctccgcaatgttaagaggtctcgtgccgggattgctgtaccgcactctggtggctgcagccacctctgctggggtgggggttccaagcgctccggtactggtgcagctgccgtctccacctgacctggagccagggctggaagtgggagctgggttggcagtccgcctggcccgagtgttgagggaaccagccttcttggcagggtcaggggcagcctgcggcgcacttctgctgggtctgtgcgccgccctgtactggagaaggaaacagcggaaagagctaagccactacacagcaagtttcgcgtacacacctgcagtcagtttcccccactccgaagggctgtcgggagccagctcccgcccaccgatgggcttgggaccggccccatactcctggctggctgactcctggccacatccatcacgttccccatctgcacaggagcccaggggctcttgctgcccttcaaaccccgatccagacgacagatactacaatgaagcaggaatctcattgtatttggctcaaacagctaggggtaccgctgcccccggagaaggcccggtgtattcaacaatcgatcctgccggagaggagctccagacattccatggtgggtttccccagcacccgtcaggggacctgggcccctggagtcagtatgcccctccagagtggagccagggggacagcggggctaaaggtgggaaggtcaagttgcttggcaaacccgtccagatgccctcacttaattggcccgaggcactgccgcctcctccaccgagctgtgagctgtcttgcctagagggaccagaggaggagcttgaggggtccagtgagccagaggagtggtgtccaccaatgcctgagaggagccacctcactgaaccctctagtagtggcgggtgcctggtcacgccatctagaagagaaacaccctcaccaaccccatcatatggacagcagagtaccgccacactgacacctagtcctcctgacccgcctcagccccctacggatatgcctcatctgcaccagatgccccggagagtaccccttggcccctcctctccactcagcgtgtcgcagcctatgttgggcattcgagaagctcgccccgctggcctaggcgcgggccccgcggcaagtccacatctgtcgccaagccctgcaccaagtacggcctcaagtgctcccggcaggacctggcaaggaaatggagagatgacgcccccactccagggaccgcgggcccgcttccgcaagaagccgaaagccctgccctatcgccgagagaactcgccaggagacctgcccccaccccccctccctccacccgaagaggaagctagctgggcactggagctcagagcggccgggtccatgtcctcgctggaacgagagcgaagtggggaaaggaaagcagtccaagcagttcctctagcggcccagcgggtgctccaccccgacgaagaggcgtggttgccctatagtagaccaagttttctgagtcggggacagggcacttccacttgctcaactgctggttcaaatagtagccgcgggagcagttctagccgaggaagtcgcggcccgggccgtagcagatcgcgcagtcagtcacgcagccaatcacagagaccaggacagaagaggcgagaggagccccgttag

SEQ ID NO: 212015 - DNA, 4161 bp, Artificial Sequence
  derived and/or modified sequence
atgttgcgctaccttctgaaaacactgttgcagatgaacttgttcgcagattcactggctggcgacatctccaacagcagtgaactgctgctggggtttaactcatccttagccgcactgaatcatacacttctccctcccggtgacccttcactcaatgggtccagagtgggacctgaggatgccatgccgcgaatcgtggagcagccacccgatttattggtttctaggggagagccagccactctcccatgtcgagcagaagggaggcctcgacctaacatcgaatggtacaaaaatggcgcacgcgtagctactgtacgagaggaccccagggcacacaggctccttctgccttccggagcactgtttttcccgagaatagtgcacggccgaagagccaggcctgatgagggcgtttatacttgtgtggctaggaactatctcggagcagccgcttctcgaaatgcctctctcgaagtcgcagttttgcgcgacgattttaggcagagcccgggtaacgtcgttgtggcggtgggagagccggcagtgctggagtgcgtgccgccacgcggacaccctgagcccagcgttagctggcgcaaggacggagccagattaaaggaggaggagggacggatcactattcgcggagggaaactgatgatgagtcacacgctcaaatcagacgcgggaatgtatgtgtgtgtagcttctaacatggccggagagcgtgaaagcgctgctgcagaggtgatggtactcgaaaggccctcattcctacgcagacccgttaaccaagtcgtgctcgcagacgccccagtgacatttctgtgtgaggtcaagggcgaccctcctccgagacttcggtggcgaaaagaggacggagagctgccaacaggaagatatgagatccgaagtgaccattcgctgtggattggccatgtgtcagcggaggatgaaggtacttacacgtgtgtggctgaaaacagcgtcggcagagctgaagcctcgggatcattgagcgtgcatgtgcccccacagctggtcacacagccgcaagaccaaatggcagctccaggagagagcgtggcctttcagtgtgagacaaagggaaatccccctcctgccatcttttggcagaaggaggggagtcaggtgctattgttccctagtcagtccctgcagcctactggccgtttctctgtgagtccaagggggcagctcaacatcacggcagtccaacgtggggatgcgggatactacgtttgccaagctgttagcgtcgccggtagtatactggctaaggcactgctggaaataaagggggcaagtctcgacggtctgccaccagtgatactccagggccctgccaaccagactcttgtactgggtagctcagtgtggcttccctgcagggtcaccggaaacccacagcccagtgtcagatggaagaaagacggccagtggcttcaaggggatgacctgcagttcaaaaccatggcgaacggaaccctgtacattgctaatgtacaagagatggatatgggtttttactcctgcgtcgctaaaagcagcaccggagaagcaacctggtcaggatggctgaaaatgcgtgaagattggggagtgtcacctgacccaccaacagagccatcttcacccccaggcgctccaagtcagccagtcgtgaccgagataactaaaaatagcattaccctaacttggaagcccaacccccagaccggtgcagccgtgacatcctacgttatcgaagcattttctccagctgccggtaatacctggagaacggtggcagacggagtccaactggagactcacactgtgagtgggcttcagcctaacacaatttacttgttcctggttcgggcagtcggcgcttggggactgagcgaaccctcaccagtgagcgagcccgtgcgtactcaggatagctccccttctcggccagttgaagatccctggcggggtcagcagggactggctgaggtggcggtcaggctgcaggaaccaattgtgttagggccacgcacactccaggtgagttggacagtagatggcccagtccagctagtgcagggtttccgcgtgtcctggcgagtagccggtccagagggcggatcgtggacgatgctggatctgcagagcccctcccagcagtctactgtgctccgagggctcccgcctggaacccagattcagatcaaagtgcaagcacagggacaagaaggactcggtgccgagagcctgtctgtcactcgcagcatccccgaggaagcacctagcggacccccacagggggtcgccgtcgctcttggaggcgatggaaacagctccatcacagtatcatgggagccccctttgccatcacaacagaacggtgtcatcacggagtaccagatctggtgcctgggcaatgaatctaggtttcacctcaaccggtctgctgctggctgggctagatcggctatgctaagagggctggtgcccggtcttttatacagaactctagtcgcagctgccacatcagctggtgtaggcgtgccaagcgctccagtgctggtccagctccccagtccgccagatctcgagccgggactggaagtcggagcaggattggccgtccgcctggccagagtgctaagggaacccgcatttttagctgggagtggagcggcatgcggagccctgttgctcgggctctgtgctgcgttgtactggagacggaaacagcgtaaggaactaagccattacactgcgagcttcgcctacacgccggctgtctctttcccccactcagaaggtctttctggtgcgtcttccaggccccctatgggccttggcccagctccctattcttggctcgccgactcttggccacatccgtctcgatctccttccgcccaggaacccagaggcagctgttgcccttcgaatccggatcctgatgatcgatactacaatgaggctgggatatctctgtaccttgcgcagactgcaaggggcaccgccgcaccgggtgaaggtcccgtttacagtaccattgatcccgcaggcgaggagctgcagacattccacggaggcttcccacagcacccatcaggcgacttgggcccatggagccagtacgccccacccgagtggtcccaaggtgactctggggcaaaagggggtaaagtaaaacttttaggaaagccggtgcagatgccaagccttaactggccagaggccctgcctccaccacctccctcatgcgagttgagctgcctggaggggccagaggaggagctcgagggctcatcagagcccgaggagtggtgcccaccaatgccagaaaggtcccacctcaccgagcctagctcctctggagggtgcctggtgaccccatcaaggcgtgaaacccctagccctacaccatcttacggacagcagtccacggcaacattgacgcccagtccacccgacccgcctcagcctcctaccgacatgcctcatctccaccagatgcctaggagggttccgctcggcccttccagtcccctttctgtgagtcagccaatgctggggattcgcgaggcccgtcccgcaggactgggggctggacccgctgcctcacctcacctcagcccatctcccgctcctagcaccgcgagctcagcccctggccgaacgtggcagggcaacggcgaaatgactccccctctccaaggacccagagcccgttttcgcaaaaaaccaaaagcactgccgtaccggcgagagaattctcccggagacttgccacccccaccactgccccctcccgaggaggaggcctcctgggcactcgaactgcgcgcagcaggatctatgtcttcactcgaacgcgagaggtctggcgagcggaaggccgtgcaggcagtgccactggctgctcaaagggtcctgcacccggatgaagaggcttggctgccctattccaggccctcttttctgagcaggggacaaggcacgagtacatgctcgaccgccggatccaacagttccagaggcagctcatcaagccggggaagtcgaggaccgggtaggagcaggtcccgatcccagagccggtctcagtcccaacgccctggtcagaaacgccgagaggagcccagatag

SEQ ID NO: 212016 - DNA, 4095 bp, Artificial Sequence
  derived and/or modified sequence
atggagcggcctgaggacagtctgtcactctggagtctcaatttgtcaccccagttcccatgcttgaatgcactgcgccatcccctgagccccggatctagagtgggcccagaggacgcgatgccccgtattgtggagcaaccaccagacctgctcgtgagcagaggtgaaccagccactctgccctgtcgcgcagagggtcgtccccgacctaatatagaatggtacaagaacggcgctcgcgttgcaaccgtgcgcgaggaccctcgggctcacaggttgttgctcccaagtggcgcactgttttttcctagaattgtgcatgggagaagagctcgccctgatgaaggagtctacacctgtgtggctagaaattacctaggagccgctgcaagcagaaatgcatcgcttgaagttgcggtgctgagagatgactttcgtcagtcacctgggaatgtggtcgtagccgtgggagagccagctgtactcgagtgcgtgcctccccgtggccaccccgagcctagcgtctcctggaggaaggatggcgcacgattaaaggaggaagaagggcgtatcacaatcagaggcggtaaactgatgatgtcccatactctgaagtctgacgccggaatgtatgtgtgtgtcgcctcaaatatggcaggcgaaagggagtctgccgctgctgaagtaatggtgttggagagacccagcttcctcagaaggccggtaaaccaagtggtattggcagacgcaccggttacatttctgtgcgaagtcaaaggtgaccctccgcctagattacggtggcgcaaagaagacggtgaactgcctactggcagatatgagattcgctcagaccactcgctgtggatcggccacgtgagtgcggaagacgagggcacgtatacatgcgtcgcagaaaactcagtgggacgagctgaggcctccggctcactctccgtgcacgtacctcctcagctggtgacccagcctcaggatcaaatggccgcacccggtgagtccgtggctttccagtgtgaaaccaaaggcaatccacctccagcgattttttggcagaaagagggctcccaggttcttctgttcccttcccagtctttgcaaccaacaggcagattctccgtgtcccccagggggcagttgaatatcaccgcggtgcagcggggagacgctggctattatgtatgccaggctgttagcgtcgccggatccatccttgctaaagccttactggaaatcaagggagcctccctcgatggtcttcctcccgtcatcctccaggggcctgcaaaccagacactcgttctcggctcgtcggtgtggctcccatgtagggtcacaggcaacccccaaccaagcgtgaggtggaagaaggacggacagtggctccagggtgacgatcttcaattcaaaactatggctaatggtaccctttacattgcaaatgtgcaggagatggacatgggtttttacagttgcgtggccaagagcagcaccggggaagccacttggtccgggtggttaaaaatgagagaggactggggggtcagccccgaccccccaacagagccaagctcaccaccaggagctccctcacagccagtagttactgagattaccaagaattcgatcacactgacttggaaacctaatccccagaccggggcagctgtcaccagttacgtcattgaggccttttctcccgctgctggaaatacctggaggaccgttgcggatggcgtgcagctggaaacccacacagtgtccggcttgcagccgaatacaatttacctcttcttggttcgggctgtgggcgcatggggtctttcagaaccgtctcccgtgtctgagccggtgagaacacaggacagctctcctagcaggcctgtggaggacccatggaggggtcagcaagggcttgccgaagtggccgtacggctgcaggagccgatagtcctgggcccacgcacactgcaggtgtcttggaccgttgatggccctgtgcagctggttcagggcttccgcgtgagctggcgcgtcgcaggtccagagggtggaagttggacaatgttggacctacaatcgcccagtcaacagtcaactgttctcaggggtctccctccgggtacacagatacagatcaaggtgcaggcacaaggccaggaggggctgggcgctgagagcctgtccgtgactcgcagtatacccgaagaagcaccctctgggcctccgcagggcgttgcagtcgcattgggtggtgacggcaattccagcattactgtgtcctgggagcccccactgcccagccaacagaacggcgtgattaccgaataccagatttggtgcctgggaaacgagtcccggttccacctcaaccgttccgccgctggctgggcacggtctgctatgctccggggactcgtccccggtttgctctatcgaaccctcgttgccgcagcaacttcggcgggagtgggggtcccctcagcgccagtcctcgtgcagcttccgagccctccagacctggagcccggactggaagtgggagccggacttgccgtccgcctggctagagtcctgagagagccagcatttctggccggtagcggcgctgcttgtggcgctttgcttcttggactctgcgccgcactttattggagacgtaaacagagaaaggagctcagtcactataccgcaagctttgcttacacacctgccgttagttttccacatagcgagggtttgagcggcgctagctcacggcctcctatgggtctcggacctgcaccatattcttggttggcagacagctggcctcacccaagccggagtccgagcgcgcaggaacctcgcggatcatgctgcccctcaaatcccgatcccgacgatcgatattataacgaagctggaattagcttgtatcttgcccagactgctcggggtaccgctgcaccaggcgagggtccggtttatagtactatcgatccagccggagaggagctgcagaccttccacggaggttttcctcagcacccctccggagatctggggccttggtctcaatatgcccctcccgaatggtcgcagggcgatagcggcgctaagggagggaaagtgaaactgcttgggaagcccgtccaaatgccaagccttaattggcctgaagctttgccgccaccaccgccttcttgtgagctgagctgcctggaagggccagaggaagagcttgaaggatcgagcgagccagaagagtggtgccctcctatgcctgaaagaagccacctgaccgagccaagtagctcgggcggatgcctcgtgacaccttccagacgcgaaacgcccagcccaactccttcttatgggcaacaatctaccgccacattaaccccctccccacctgacccacctcagccacccacagacatgccacatctgcatcaaatgccccgacgcgtacctctagggccatcttcccccttgtccgtttcacagcccatgctggggatccgcgaggctagacccgcagggctcggagctggcccagccgctagcccacacctgagcccgtcaccagcaccttccacggcctctagcgcgccaggaagaacctggcagggcaacggtgagatgacacccccactgcaagggccaagggcaaggtttcggaaaaagccaaaagccctgccatatcgcagagaaaatagcccaggggacctgcctccgcctcccctccccccaccagaggaggaggccagctgggcactcgagcttagggcagcgggaagcatgtccagcctggaaagggaacgcagtggcgagcggaaagctgtgcaggctgtccccttagccgctcagagggtgcttcaccctgacgaagaagcttggcttccgtactcccgacccagttttctgtccagaggccaagggacaagtacctgctctacagcaggctcgaatagctccagaggcagctctagtagccgcggtagccggggtcctggacgctctcgatccagaagtcagagccggtctcagagtcagcggcctggacagaagaggagggaagaaccgaggtag

SEQ ID NO: 212017 - DNA, 4569 bp, Artificial Sequence
  derived and/or modified sequence
ggagagaaggacgagggaaggaggagggcacgaagaggcaccgaccgtacccaggcgcaccggcaggagagcggcaccgtggctgccgcagcgcgcagaggctgtggaggggcttacggctcccagcccacgggtctcagacccaggggctgggcccccagcccccagtcccgatcccagctgggtcgagccatgctgcgctacctgctgaaaacgctgctgcagatgaacttgttcgcggactctctggccggggacatctccaactccagcgagctgctcttgggcttcaactcctcgctggcggcgctcaaccacaccctgctgcctcccggcgatccctctctcaacgggtcaagggtaggaccggaggacgctatgccccgcatcgtggagcagccgccagatctgctggtctcccgaggcgagcccgccacgttgccctgccgcgctgaaggccgaccccgacccaacattgagtggtacaagaacggggcgcgtgtggccactgtgcgggaggatccgcgtgcgcaccgcctgctgctgcccagcggcgccctcttcttcccgcgcatcgtgcacgggcgccgcgcgcggccggacgaaggtgtctacacttgcgtggctcgcaactacctgggggcagcagcgagcagaaacgcctcgctggaagtggcagtcctccgtgatgatttccggcagtctcctggaaacgtggtggtggcagtgggggagccagcagtactggaatgcgtgcccccccgcggccacccggagccttccgtgtcctggaggaaggacggtgcaagactcaaggaagaggaaggaaggatcacgatccgtggagggaagctgatgatgtcacatacactcaagagcgatgcaggcatgtatgtgtgcgtagcctccaacatggcgggagaacgggagagtgcggcagctgaagtcatggtactggagcgtccctcattcctgcgcagaccagtgaatcaggtggtcctggctgatgcccctgtgactttcctatgtgaggtgaagggggatcccccacctcgtctacgctggcgcaaggaggatggggaactgcccacaggcaggtatgagatccggagtgaccacagcctttggattgggcatgtgagtgccgaagatgagggaacgtacacctgtgtggcggagaacagtgtgggccgcgctgaagcatctggctccctcagtgttcacgtcccaccccagttggtgacccagccccaggaccagatggcagctcctggagagagcgtggctttccagtgcgagaccaaaggaaaccccccacctgccatcttctggcagaaggaggggagtcaggtcctgcttttccccagtcagtcacttcagccgacggggcgcttctcagtgtctccaagaggccaacttaacatcaccgcggtgcagcgtggggatgctgggtactacgtgtgccaggctgtcagtgtggctggcagcatcctggccaaggccctgctggagataaaaggagcctctttggatgggctgcctcctgtcatcctccagggaccagccaatcagacgctggtgcttggctcctccgtgtggctgccctgcagagtgactgggaaccctcaacccagtgtccgatggaagaaggatgggcagtggctgcagggggatgacctccagttcaagacaatggccaacggtaccctgtacatcgccaatgtgcaggagatggacatgggcttctacagctgcgtggccaagagttccacaggggaagccacatggagcggctggcttaagatgcgggaagactggggagtatcaccagacccccctacagaacccagttcccctccgggggctccctctcagccagtggtcactgagatcaccaagaacagcattaccctgacctggaagcccaacccacaaactggggctgcagtcacgtcttatgtgatagaggccttcagcccagcagctggcaacacatggcgtactgtggcagatggcgtgcagctggagacacacacagtcagcggtctgcagcccaataccatctacctgtttctggttcgagcagtgggagcctggggcctcagtgagcccagccccgtctctgagcctgtccgtacacaggatagcagcccctctaggccagtggaggacccatggagaggccagcagggactggcggaagtggctgtgcgcctgcaggagcccatagtcctgggaccccggaccctgcaggtgtcctggactgtggatggcccagtccagctggtgcaaggtttccgggtgtcttggagggtagcaggccctgagggaggaagctggacaatgttggacctacagtccccaagccagcaaagtactgtgctaagaggactccctccagggacccaaatccagatcaaggtgcaagcccaaggccaggaggggctgggggctgaaagcctctctgtgaccaggagcattcctgaggaggcccccagtggccccccacagggagtggcggtggccttggggggtgatggcaacagcagtatcactgtgtcctgggaacctccactcccctcccagcaaaatggggtcatcacggaataccagatctggtgcctgggcaatgagagccgctttcacctcaatcgatctgcagcaggctgggcacgctccgcaatgctccgaggactggtgcccggtctcctctatcgaaccctggtcgcggcggccaccagcgcaggcgtgggcgtgcccagtgccccagtgctggtgcagctgccgtccccgccggacctggagcccgggctggaggtgggcgcggggctggcggtgcggctggcgagggtgctgcgggagcccgccttcctcgcgggcagcggcgcagcctgcggggcgctgcttctcgggctctgcgccgccctctactggcgccggaaacagcgcaaagagctcagccactacacggcctcttttgcctacacaccggcagtgtccttcccgcactcagagggcctctctggagccagttccaggccacccatgggccttggccccgccccctactcatggctggcagattcgtggccccacccatctcgaagcccctcggcccaggaacccaggggaagctgctgccctagcaatcctgacccggacgacagatattacaacgaagcgggaatctccctgtatctagctcagacggccaggggcacggccgcccctggcgagggtcctgtctatagcaccattgacccagcgggggaggagctgcagaccttccatgggggcttcccccaacatccctcaggagatctgggtccctggagccagtacgctcctccagagtggagccagggggacagtggagccaagggaggcaaagtgaagcttctggggaaacctgtgcagatgccctctctgaactggccagaagccctgcccccacctcctccttcttgtgaactgagctgcctagaagggccggaggaggagctggagggcagctcagagccagaggagtggtgcccgccaatgcctgagagaagtcacctgacggagcccagctccagtggagggtgcctggtcaccccatcccgaagggaaaccccctctcccacaccttcctatggacagcagtccacagccactcttacaccctcacctcctgaccctccccagcccccaactgacatgccccatctccatcagatgcccaggagggtgccccttgggccgagttcccctctcagtgtatcccagcccatgctgggcatccgtgaagcgaggcctgctggcttgggtgctggccctgcagcctcaccccacctcagccccagtcctgcccctagcacagccagcagtgccccaggcagaacctggcaggggaatggggagatgactcccccacttcaaggaccccgtgctcgattccggaagaaacccaaggctcttccctacaggagggagaacagtcctggggacttgcccccaccacccttgccaccgccagaggaagaggcgagctgggccctagagctgagggcagcaggcagcatgtcctccctggagcgggagcgcagtggggagaggaaagcggtccaggccgtgcccctggcagcccagcgggtgctccacccagatgaagaggcctggctcccatacagcagaccaagcttcctgtcccggggccagggcaccagcacatgttccacggccggcagcaactcttccaggggctccagcagctctaggggctcccggggccctggccggagccggagtcggagtcagagccggagccagagccaaaggccaggacagaaacgccgagaggaaccaagatgacccttgttggggcattgagaatatcatgagtgccacggggaaggggagtagggatgtcttttcccccccagcagtgatgagtggggctagctgaagcccattggtttccacgatttcaattggctgagaaggcagagagctagctcctccctttctttctttttccacctgagacttgtttataaaaaacaaaacaataaaaagagtctgatcaga

SEQ ID NO: 212018 - DNA, 4551 bp, Artificial Sequence
  derived and/or modified sequence
tcgccaagcgtggttcagccactcccgcttaaacttggcaggagaggagacggaggtctctaggtggtccagaaagccggcctagaagtttgtgtcccgatccctctactaaccggcctgtctgtaggcatcttcctttgagacgaggaacgcggaacgtctgccaataaggacatattggatcctgcagagggagagggtaggcaggtggggactgagctccgcagagaagcataggagatggaacgaccagaggattctctttccctctggagcctcaatctctccccacaatttccctgtctgaacgctctgcgccaccccctgtccccagggtcaagggtaggaccggaggacgctatgccccgcatcgtggagcagccgccagatctgctggtctcccgaggcgagcccgccacgttgccctgccgcgctgaaggccgaccccgacccaacattgagtggtacaagaacggggcgcgtgtggccactgtgcgggaggatccgcgtgcgcaccgcctgctgctgcccagcggcgccctcttcttcccgcgcatcgtgcacgggcgccgcgcgcggccggacgaaggtgtctacacttgcgtggctcgcaactacctgggggcagcagcgagcagaaacgcctcgctggaagtggcagtcctccgtgatgatttccggcagtctcctggaaacgtggtggtggcagtgggggagccagcagtactggaatgcgtgcccccccgcggccacccggagccttccgtgtcctggaggaaggacggtgcaagactcaaggaagaggaaggaaggatcacgatccgtggagggaagctgatgatgtcacatacactcaagagcgatgcaggcatgtatgtgtgcgtagcctccaacatggcgggagaacgggagagtgcggcagctgaagtcatggtactggagcgtccctcattcctgcgcagaccagtgaatcaggtggtcctggctgatgcccctgtgactttcctatgtgaggtgaagggggatcccccacctcgtctacgctggcgcaaggaggatggggaactgcccacaggcaggtatgagatccggagtgaccacagcctttggattgggcatgtgagtgccgaagatgagggaacgtacacctgtgtggcggagaacagtgtgggccgcgctgaagcatctggctccctcagtgttcacgtcccaccccagttggtgacccagccccaggaccagatggcagctcctggagagagcgtggctttccagtgcgagaccaaaggaaaccccccacctgccatcttctggcagaaggaggggagtcaggtcctgcttttccccagtcagtcacttcagccgacggggcgcttctcagtgtctccaagaggccaacttaacatcaccgcggtgcagcgtggggatgctgggtactacgtgtgccaggctgtcagtgtggctggcagcatcctggccaaggccctgctggagataaaaggagcctctttggatgggctgcctcctgtcatcctccagggaccagccaatcagacgctggtgcttggctcctccgtgtggctgccctgcagagtgactgggaaccctcaacccagtgtccgatggaagaaggatgggcagtggctgcagggggatgacctccagttcaagacaatggccaacggtaccctgtacatcgccaatgtgcaggagatggacatgggcttctacagctgcgtggccaagagttccacaggggaagccacatggagcggctggcttaagatgcgggaagactggggagtatcaccagacccccctacagaacccagttcccctccgggggctccctctcagccagtggtcactgagatcaccaagaacagcattaccctgacctggaagcccaacccacaaactggggctgcagtcacgtcttatgtgatagaggccttcagcccagcagctggcaacacatggcgtactgtggcagatggcgtgcagctggagacacacacagtcagcggtctgcagcccaataccatctacctgtttctggttcgagcagtgggagcctggggcctcagtgagcccagccccgtctctgagcctgtccgtacacaggatagcagcccctctaggccagtggaggacccatggagaggccagcagggactggcggaagtggctgtgcgcctgcaggagcccatagtcctgggaccccggaccctgcaggtgtcctggactgtggatggcccagtccagctggtgcaaggtttccgggtgtcttggagggtagcaggccctgagggaggaagctggacaatgttggacctacagtccccaagccagcaaagtactgtgctaagaggactccctccagggacccaaatccagatcaaggtgcaagcccaaggccaggaggggctgggggctgaaagcctctctgtgaccaggagcattcctgaggaggcccccagtggccccccacagggagtggcggtggccttggggggtgatggcaacagcagtatcactgtgtcctgggaacctccactcccctcccagcaaaatggggtcatcacggaataccagatctggtgcctgggcaatgagagccgctttcacctcaatcgatctgcagcaggctgggcacgctccgcaatgctccgaggactggtgcccggtctcctctatcgaaccctggtcgcggcggccaccagcgcaggcgtgggcgtgcccagtgccccagtgctggtgcagctgccgtccccgccggacctggagcccgggctggaggtgggcgcggggctggcggtgcggctggcgagggtgctgcgggagcccgccttcctcgcgggcagcggcgcagcctgcggggcgctgcttctcgggctctgcgccgccctctactggcgccggaaacagcgcaaagagctcagccactacacggcctcttttgcctacacaccggcagtgtccttcccgcactcagagggcctctctggagccagttccaggccacccatgggccttggccccgccccctactcatggctggcagattcgtggccccacccatctcgaagcccctcggcccaggaacccaggggaagctgctgccctagcaatcctgacccggacgacagatattacaacgaagcgggaatctccctgtatctagctcagacggccaggggcacggccgcccctggcgagggtcctgtctatagcaccattgacccagcgggggaggagctgcagaccttccatgggggcttcccccaacatccctcaggagatctgggtccctggagccagtacgctcctccagagtggagccagggggacagtggagccaagggaggcaaagtgaagcttctggggaaacctgtgcagatgccctctctgaactggccagaagccctgcccccacctcctccttcttgtgaactgagctgcctagaagggccggaggaggagctggagggcagctcagagccagaggagtggtgcccgccaatgcctgagagaagtcacctgacggagcccagctccagtggagggtgcctggtcaccccatcccgaagggaaaccccctctcccacaccttcctatggacagcagtccacagccactcttacaccctcacctcctgaccctccccagcccccaactgacatgccccatctccatcagatgcccaggagggtgccccttgggccgagttcccctctcagtgtatcccagcccatgctgggcatccgtgaagcgaggcctgctggcttgggtgctggccctgcagcctcaccccacctcagccccagtcctgcccctagcacagccagcagtgccccaggcagaacctggcaggggaatggggagatgactcccccacttcaaggaccccgtgctcgattccggaagaaacccaaggctcttccctacaggagggagaacagtcctggggacttgcccccaccacccttgccaccgccagaggaagaggcgagctgggccctagagctgagggcagcaggcagcatgtcctccctggagcgggagcgcagtggggagaggaaagcggtccaggccgtgcccctggcagcccagcgggtgctccacccagatgaagaggcctggctcccatacagcagaccaagcttcctgtcccggggccagggcaccagcacatgttccacggccggcagcaactcttccaggggctccagcagctctaggggctcccggggccctggccggagccggagtcggagtcagagccggagccagagccaaaggccaggacagaaacgccgagaggaaccaagatgacccttgttggggcattgagaatatcatgagtgccacggggaaggggagtagggatgtcttttcccccccagcagtgatgagtggggctagctgaagcccattggtttccacgatttcaattggctgagaaggcagagagctagctcctccctttctttctttttccacctgagacttgtttataaaaaacaaaacaataaaaagagtctgatcaga

SEQ ID NO: 212019 - DNA, 1520 bp, Artificial Sequence
  derived and/or modified sequence
ggagggagcatggccacctcccaccccaacaccaccgccactgtcctgaaactcccgaatatcgccacctccctttcctttgctggcctcttcaggctctccgtccccaacgctcacctgctctccctcaggccacccatgggccttggccccgccccctactcatggctggcagattcgtggccccacccatctcgaagcccctcggcccaggaacccaggggaagctgctgccctagcaatcctgacccggacgacagatattacaacgaagcgggaatctccctgtatctagctcagacggccaggggcacggccgcccctggcgagggtcctgtctatagcaccattgacccagcgggggaggagctgcagaccttccatgggggcttcccccaacatccctcaggagatctgggtccctggagccagtacgctcctccagagtggagccagggggacagtgctcagagccagaggagtggtgcccgccaatgcctgagagaagtcacctgacggagcccagctccagtggagggtgcctggtcaccccatcccgaagggaaaccccctctcccacaccttcctatggacagcagtccacagccactcttacaccctcacctcctgaccctccccagcccccaactgacatgccccatctccatcagatgcccaggagggtgccccttgggccgagttcccctctcagtgtatcccagcccatgctgggcatccgtgaagcgaggcctgctggcttgggtgctggccctgcagcctcaccccacctcagccccagtcctgcccctagcacagccagcagtgccccaggcagaacctggcaggggaatggggagatgactcccccacttcaaggaccccgtgctcgattccggaagaaacccaaggctcttccctacaggagggagaacagtcctggggacttgcccccaccacccttgccaccgccagaggaagaggcgagctgggccctagagctgagggcagcaggcagcatgtcctccctggagcgggagcgcagtggggagaggaaagcggtccaggccgtgcccctggcagcccagcgggtgctccacccagatgaagaggcctggctcccatacagcagaccaagcttcctgtcccggggccagggcaccagcacatgttccacggccggcagcaactcttccaggggctccagcagctctaggggctcccggggccctggccggagccggagtcggagtcagagccggagccagagccaaaggccaggacagaaacgccgagaggaaccaagatgacccttgttggggcattgagaatatcatgagtgccacggggaaggggagtagggatgtcttttcccccccagcagtgatgagtggggctagctgaagcccattggtttccacgatttcaattggctgagaaggcagagagctagctcctccctttctttctttttccacctgagacttgtttataaaaaacaaaacaataaaaagagtctgatc

SEQ ID NO: 212020 - DNA, 4161 bp, Artificial Sequence
  derived and/or modified sequence
atgctgagatacctgctgaagaccctgctgcagatgaacctgttcgccgacagcctggccggcgacatcagcaacagcagcgagctgctgctgggcttcaacagcagcctggccgccctgaaccacaccctgctgccccccggcgaccccagcctgaacggcagcagagtgggccccgaggacgccatgcccagaatcgtggagcagccccccgacctgctggtgagcagaggcgagcccgccaccctgccctgcagagccgagggcagacccagacccaacatcgagtggtacaagaacggcgccagagtggccaccgtgagagaggaccccagagcccacagactgctgctgcccagcggcgccctgttcttccccagaatcgtgcacggcagaagagccagacccgacgagggcgtgtacacctgcgtggccagaaactacctgggcgccgccgccagcagaaacgccagcctggaggtggccgtgctgagagacgacttcagacagagccccggcaacgtggtggtggccgtgggcgagcccgccgtgctggagtgcgtgccccccagaggccaccccgagcccagcgtgagctggagaaaggacggcgccagactgaaggaggaggagggcagaatcaccatcagaggcggcaagctgatgatgagccacaccctgaagagcgacgccggcatgtacgtgtgcgtggccagcaacatggccggcgagagagagagcgccgccgccgaggtgatggtgctggagagacccagcttcctgagaagacccgtgaaccaggtggtgctggccgacgcccccgtgaccttcctgtgcgaggtgaagggcgaccccccccccagactgagatggagaaaggaggacggcgagctgcccaccggcagatacgagatcagaagcgaccacagcctgtggatcggccacgtgagcgccgaggacgagggcacctacacctgcgtggccgagaacagcgtgggcagagccgaggccagcggcagcctgagcgtgcacgtgcccccccagctggtgacccagccccaggaccagatggccgcccccggcgagagcgtggccttccagtgcgagaccaagggcaaccccccccccgccatcttctggcagaaggagggcagccaggtgctgctgttccccagccagagcctgcagcccaccggcagattcagcgtgagccccagaggccagctgaacatcaccgccgtgcagagaggcgacgccggctactacgtgtgccaggccgtgagcgtggccggcagcatcctggccaaggccctgctggagatcaagggcgccagcctggacggcctgccccccgtgatcctgcagggccccgccaaccagaccctggtgctgggcagcagcgtgtggctgccctgcagagtgaccggcaacccccagcccagcgtgagatggaagaaggacggccagtggctgcagggcgacgacctgcagttcaagaccatggccaacggcaccctgtacatcgccaacgtgcaggagatggacatgggcttctacagctgcgtggccaagagcagcaccggcgaggccacctggagcggctggctgaagatgagagaggactggggcgtgagccccgacccccccaccgagcccagcagcccccccggcgcccccagccagcccgtggtgaccgagatcaccaagaacagcatcaccctgacctggaagcccaacccccagaccggcgccgccgtgaccagctacgtgatcgaggccttcagccccgccgccggcaacacctggagaaccgtggccgacggcgtgcagctggagacccacaccgtgagcggcctgcagcccaacaccatctacctgttcctggtgagagccgtgggcgcctggggcctgagcgagcccagccccgtgagcgagcccgtgagaacccaggacagcagccccagcagacccgtggaggacccctggagaggccagcagggcctggccgaggtggccgtgagactgcaggagcccatcgtgctgggccccagaaccctgcaggtgagctggaccgtggacggccccgtgcagctggtgcagggcttcagagtgagctggagagtggccggccccgagggcggcagctggaccatgctggacctgcagagccccagccagcagagcaccgtgctgagaggcctgccccccggcacccagatccagatcaaggtgcaggcccagggccaggagggcctgggcgccgagagcctgagcgtgaccagaagcatccccgaggaggcccccagcggccccccccagggcgtggccgtggccctgggcggcgacggcaacagcagcatcaccgtgagctgggagccccccctgcccagccagcagaacggcgtgatcaccgagtaccagatctggtgcctgggcaacgagagcagattccacctgaacagaagcgccgccggctgggccagaagcgccatgctgagaggcctggtgcccggcctgctgtacagaaccctggtggccgccgccaccagcgccggcgtgggcgtgcccagcgcccccgtgctggtgcagctgcccagcccccccgacctggagcccggcctggaggtgggcgccggcctggccgtgagactggccagagtgctgagagagcccgccttcctggccggcagcggcgccgcctgcggcgccctgctgctgggcctgtgcgccgccctgtactggagaagaaagcagagaaaggagctgagccactacaccgccagcttcgcctacacccccgccgtgagcttcccccacagcgagggcctgagcggcgccagcagcagaccccccatgggcctgggccccgccccctacagctggctggccgacagctggccccaccccagcagaagccccagcgcccaggagcccagaggcagctgctgccccagcaaccccgaccccgacgacagatactacaacgaggccggcatcagcctgtacctggcccagaccgccagaggcaccgccgcccccggcgagggccccgtgtacagcaccatcgaccccgccggcgaggagctgcagaccttccacggcggcttcccccagcaccccagcggcgacctgggcccctggagccagtacgccccccccgagtggagccagggcgacagcggcgccaagggcggcaaggtgaagctgctgggcaagcccgtgcagatgcccagcctgaactggcccgaggccctgcccccccccccccccagctgcgagctgagctgcctggagggccccgaggaggagctggagggcagcagcgagcccgaggagtggtgcccccccatgcccgagagaagccacctgaccgagcccagcagcagcggcggctgcctggtgacccccagcagaagagagacccccagccccacccccagctacggccagcagagcaccgccaccctgacccccagcccccccgaccccccccagccccccaccgacatgccccacctgcaccagatgcccagaagagtgcccctgggccccagcagccccctgagcgtgagccagcccatgctgggcatcagagaggccagacccgccggcctgggcgccggccccgccgccagcccccacctgagccccagccccgcccccagcaccgccagcagcgcccccggcagaacctggcagggcaacggcgagatgaccccccccctgcagggccccagagccagattcagaaagaagcccaaggccctgccctacagaagagagaacagccccggcgacctgccccccccccccctgcccccccccgaggaggaggccagctgggccctggagctgagagccgccggcagcatgagcagcctggagagagagagaagcggcgagagaaaggccgtgcaggccgtgcccctggccgcccagagagtgctgcaccccgacgaggaggcctggctgccctacagcagacccagcttcctgagcagaggccagggcaccagcacctgcagcaccgccggcagcaacagcagcagaggcagcagcagcagcagaggcagcagaggccccggcagaagcagaagcagaagccagagcagaagccagagccagagacccggccagaagagaagagaggagcccagatag

SEQ ID NO: 212021 - DNA, 4095 bp, Artificial Sequence
  derived and/or modified sequence
atggagagacccgaggacagcctgagcctgtggagcctgaacctgagcccccagttcccctgcctgaacgccctgagacaccccctgagccccggcagcagagtgggccccgaggacgccatgcccagaatcgtggagcagccccccgacctgctggtgagcagaggcgagcccgccaccctgccctgcagagccgagggcagacccagacccaacatcgagtggtacaagaacggcgccagagtggccaccgtgagagaggaccccagagcccacagactgctgctgcccagcggcgccctgttcttccccagaatcgtgcacggcagaagagccagacccgacgagggcgtgtacacctgcgtggccagaaactacctgggcgccgccgccagcagaaacgccagcctggaggtggccgtgctgagagacgacttcagacagagccccggcaacgtggtggtggccgtgggcgagcccgccgtgctggagtgcgtgccccccagaggccaccccgagcccagcgtgagctggagaaaggacggcgccagactgaaggaggaggagggcagaatcaccatcagaggcggcaagctgatgatgagccacaccctgaagagcgacgccggcatgtacgtgtgcgtggccagcaacatggccggcgagagagagagcgccgccgccgaggtgatggtgctggagagacccagcttcctgagaagacccgtgaaccaggtggtgctggccgacgcccccgtgaccttcctgtgcgaggtgaagggcgaccccccccccagactgagatggagaaaggaggacggcgagctgcccaccggcagatacgagatcagaagcgaccacagcctgtggatcggccacgtgagcgccgaggacgagggcacctacacctgcgtggccgagaacagcgtgggcagagccgaggccagcggcagcctgagcgtgcacgtgcccccccagctggtgacccagccccaggaccagatggccgcccccggcgagagcgtggccttccagtgcgagaccaagggcaaccccccccccgccatcttctggcagaaggagggcagccaggtgctgctgttccccagccagagcctgcagcccaccggcagattcagcgtgagccccagaggccagctgaacatcaccgccgtgcagagaggcgacgccggctactacgtgtgccaggccgtgagcgtggccggcagcatcctggccaaggccctgctggagatcaagggcgccagcctggacggcctgccccccgtgatcctgcagggccccgccaaccagaccctggtgctgggcagcagcgtgtggctgccctgcagagtgaccggcaacccccagcccagcgtgagatggaagaaggacggccagtggctgcagggcgacgacctgcagttcaagaccatggccaacggcaccctgtacatcgccaacgtgcaggagatggacatgggcttctacagctgcgtggccaagagcagcaccggcgaggccacctggagcggctggctgaagatgagagaggactggggcgtgagccccgacccccccaccgagcccagcagcccccccggcgcccccagccagcccgtggtgaccgagatcaccaagaacagcatcaccctgacctggaagcccaacccccagaccggcgccgccgtgaccagctacgtgatcgaggccttcagccccgccgccggcaacacctggagaaccgtggccgacggcgtgcagctggagacccacaccgtgagcggcctgcagcccaacaccatctacctgttcctggtgagagccgtgggcgcctggggcctgagcgagcccagccccgtgagcgagcccgtgagaacccaggacagcagccccagcagacccgtggaggacccctggagaggccagcagggcctggccgaggtggccgtgagactgcaggagcccatcgtgctgggccccagaaccctgcaggtgagctggaccgtggacggccccgtgcagctggtgcagggcttcagagtgagctggagagtggccggccccgagggcggcagctggaccatgctggacctgcagagccccagccagcagagcaccgtgctgagaggcctgccccccggcacccagatccagatcaaggtgcaggcccagggccaggagggcctgggcgccgagagcctgagcgtgaccagaagcatccccgaggaggcccccagcggccccccccagggcgtggccgtggccctgggcggcgacggcaacagcagcatcaccgtgagctgggagccccccctgcccagccagcagaacggcgtgatcaccgagtaccagatctggtgcctgggcaacgagagcagattccacctgaacagaagcgccgccggctgggccagaagcgccatgctgagaggcctggtgcccggcctgctgtacagaaccctggtggccgccgccaccagcgccggcgtgggcgtgcccagcgcccccgtgctggtgcagctgcccagcccccccgacctggagcccggcctggaggtgggcgccggcctggccgtgagactggccagagtgctgagagagcccgccttcctggccggcagcggcgccgcctgcggcgccctgctgctgggcctgtgcgccgccctgtactggagaagaaagcagagaaaggagctgagccactacaccgccagcttcgcctacacccccgccgtgagcttcccccacagcgagggcctgagcggcgccagcagcagaccccccatgggcctgggccccgccccctacagctggctggccgacagctggccccaccccagcagaagccccagcgcccaggagcccagaggcagctgctgccccagcaaccccgaccccgacgacagatactacaacgaggccggcatcagcctgtacctggcccagaccgccagaggcaccgccgcccccggcgagggccccgtgtacagcaccatcgaccccgccggcgaggagctgcagaccttccacggcggcttcccccagcaccccagcggcgacctgggcccctggagccagtacgccccccccgagtggagccagggcgacagcggcgccaagggcggcaaggtgaagctgctgggcaagcccgtgcagatgcccagcctgaactggcccgaggccctgcccccccccccccccagctgcgagctgagctgcctggagggccccgaggaggagctggagggcagcagcgagcccgaggagtggtgcccccccatgcccgagagaagccacctgaccgagcccagcagcagcggcggctgcctggtgacccccagcagaagagagacccccagccccacccccagctacggccagcagagcaccgccaccctgacccccagcccccccgaccccccccagccccccaccgacatgccccacctgcaccagatgcccagaagagtgcccctgggccccagcagccccctgagcgtgagccagcccatgctgggcatcagagaggccagacccgccggcctgggcgccggccccgccgccagcccccacctgagccccagccccgcccccagcaccgccagcagcgcccccggcagaacctggcagggcaacggcgagatgaccccccccctgcagggccccagagccagattcagaaagaagcccaaggccctgccctacagaagagagaacagccccggcgacctgccccccccccccctgcccccccccgaggaggaggccagctgggccctggagctgagagccgccggcagcatgagcagcctggagagagagagaagcggcgagagaaaggccgtgcaggccgtgcccctggccgcccagagagtgctgcaccccgacgaggaggcctggctgccctacagcagacccagcttcctgagcagaggccagggcaccagcacctgcagcaccgccggcagcaacagcagcagaggcagcagcagcagcagaggcagcagaggccccggcagaagcagaagcagaagccagagcagaagccagagccagagacccggccagaagagaagagaggagcccagatag

SEQ ID NO: 212022 - protein, 579 aa, Artificial Sequence
  derived and/or modified sequence
MAEGDEAARGQQPHQGLWRRRRTSDPSAAVNHVSSTTSLGENYEDDDLVNSDEVMKKPCPVQIVLAHEDDHNFELDEEALEQILLQEHIRDLNIVVVSVAGAFRKGKSFLLDFMLRYMYNKDSQSWIGGNNEPLTGFTWRGGCERETTGIQVWNEVFVIDRPNGTKVAVLLMDTQGAFDSQSTIKDCATVFALSTMTSSVQVYNLSQNIQEDDLQHLQLFTEYGRLAMEEIYQKPFQTLMFLIRDWSYPYEHSYGLEGGKQFLEKRLQVKQNQHEELQNVRKHIHNCFSNLGCFLLPHPGLKVATNPSFDGRLKDIDEDFKRELRNLVPLLLAPENLVEKEISGSKVTCRDLVEYFKAYIKIYQGEELPHPKSMLQATAEANNLAAVAGARDTYCKSMEQVCGGDKPYIAPSDLERKHLDLKEVAIKQFRSVKKMGGDEFCRRYQDQLEAEIEETYANFIKHNDGKNIFYAARTPATLFAVMFAMYIISGLTGFIGLNSIAVLCNLVMGLALIFLCTWAYVKYSGEFREIGTVIDQIAETLWEQVFSKLFEVTRRRMVHRALSSAQRQRLSSNNNKKKN

SEQ ID NO: 212023 - DNA, 1740 bp, Artificial Sequence
  derived and/or modified sequence
atggccgagggagacgaggctgccaggggtcagcaaccccaccagggattgtggcggcgacgccgtacatccgacccttcagctgccgtcaaccatgtgtcgtcaacaaccagcctgggcgagaattacgaagatgacgatcttgtcaactctgatgaggtgatgaaaaagccttgtccggtgcaaatcgtgctggctcacgaggatgaccataattttgaattggatgaagaggccctggagcaaattctgctgcaggaacacattcgtgatttaaacatagttgtcgtgtctgtggcaggtgcgttccgcaagggaaagtctttcttgctcgacttcatgctaagatacatgtacaacaaggatagccagtcttggattggcggtaataatgagcctctgacgggattcacatggcgtggggggtgcgaaagagaaactacaggaattcaggtgtggaacgaagtgtttgtcattgaccgccctaacggtaccaaggtggccgttctgctaatggatactcagggcgccttcgatagccagagcacaatcaaggactgcgctaccgtattcgccctgtcaaccatgactagctccgttcaggtgtataacctgagccaaaacatccaggaagatgatcttcagcatctgcaactgtttactgagtatggcaggctggcgatggaagaaatctatcaaaaaccctttcagacattgatgtttcttatccgcgactggagttacccttatgagcatagctacggcctggaggggggtaagcaattcctcgaaaagcgtctccaggtgaagcagaaccagcacgaagaactgcaaaacgtcagaaagcatattcataattgcttttcaaacctgggctgttttctcttgccacacccgggtctcaaggtggccaccaatccctccttcgatggaagattaaaggacattgacgaggacttcaagcgggagctgaggaacttggtacccctcctgctcgcccctgaaaatctggtggagaaggaaatttcgggcagcaaggtcacctgcagggatctcgtagaatacttcaaagcatatatcaagatctatcaaggcgaggaattgccccaccctaaaagcatgctgcaagcgactgctgaggctaacaacctggccgctgtggctggagcccgggatacatattgtaagtctatggagcaggtctgcggaggagataagccttacatagccccaagtgatctcgagagaaagcacctggatctgaaagaagttgcgataaaacagttcaggtctgttaaaaagatgggaggcgacgaattttgtaggagataccaagatcagctggaggccgagatcgaagagacttacgctaacttcatcaaacacaacgatggaaagaacattttctatgcagctcggactccagccacattgtttgctgtgatgtttgctatgtatattattagcggtctcactgggtttatcggtctgaacagtatcgcggtcctgtgcaatctggtgatgggcctagccttaatctttctctgtacctgggcctatgttaagtactctggcgagttccgtgagatagggacagtgatagaccagatcgctgaaacattgtgggaacaggtgtttagcaaactctttgaagttactcgccggcgcatggtacaccgcgccctcagttctgctcagcgccagcgattgtcaagtaataacaacaagaagaaaaattag

SEQ ID NO: 212024 - DNA, 1740 bp, Artificial Sequence
  derived and/or modified sequence
atggccgagggagatgaagctgcccggggccagcagccccaccagggcctgtggaggagaagaaggaccagtgaccccagcgctgctgtgaaccacgtgagcagcaccaccagcctgggagaaaattatgaagatgatgacctggtgaacagtgatgaggtgatgaagaagccctgccctgtgcagatcgtgctggcccatgaagatgaccacaactttgagctggatgaggaggccctggagcagatcctgctgcaggagcacatccgggacctgaacatcgtggtggtgtctgtggccggggccttcaggaagggcaagagcttcctgctggacttcatgctgcgctacatgtacaacaaggacagccagagctggattggaggcaacaatgagcccctgaccggcttcacctggaggggcggctgtgagcgggagaccaccggcatccaggtgtggaatgaggtgtttgtgattgaccggcccaacggcaccaaggtggccgtgctgctgatggacacccagggcgcctttgacagccagagcaccatcaaggactgtgccaccgtgtttgccctgagcaccatgaccagctctgtgcaggtgtacaacctgagccagaacatccaggaggatgacctgcagcacctgcagctgttcacagaatatggccgcctggccatggaggagatctaccagaagcccttccagaccctgatgttcctgatccgggactggagctacccctatgagcacagctatggcctggagggcggcaagcagttcctggagaagaggctgcaggtgaagcagaaccagcacgaggagctgcagaatgtgaggaagcacatccacaactgcttcagcaacctgggctgcttcctgctgccccaccctggcctgaaggtggccaccaaccccagctttgatggccgcctgaaggacattgatgaggacttcaagcgggagctgaggaacctggtgcccctgctgctggcccctgagaacctggtggagaaggagatcagcggcagcaaggtgacctgccgggacctggtggagtacttcaaggcctacatcaagatctaccagggcgaggagctgccccaccccaagtccatgctgcaggccacagctgaggccaacaacctggccgctgtggccggggcccgggacacctactgcaagtccatggagcaggtgtgtggcggggacaagccctacatcgcccccagcgacctggagaggaagcacctggacctgaaggaggtggccatcaagcagttccgctctgtgaagaagatgggaggagatgagttctgccgccgctaccaggaccagctggaggccgagattgaggagacctacgccaacttcatcaagcacaatgatggcaagaacatcttctatgctgcccggaccccagccaccctgtttgctgtgatgtttgccatgtacatcatcagcggcctgaccggcttcatcggcctgaacagcattgctgtgctgtgcaacctggtgatgggcctggccctgatcttcctgtgcacctgggcctacgtgaagtacagcggggagttccgggagatcggcaccgtcatcgaccagattgctgagaccctgtgggagcaggtgttcagcaagctgtttgaggtgaccaggaggaggatggtgcaccgggccctgagcagcgcccagaggcagaggctgagcagcaacaacaacaagaagaagaactag

SEQ ID NO: 212025 - DNA, 1740 bp, Artificial Sequence
  derived and/or modified sequence
atggccgagggcgacgaggccgcccggggccagcagccccaccagggactctggcgccgtcggcggacatccgaccctagcgctgcagtaaaccatgtctcatcaacaaccagcctaggtgagaattacgaagacgatgacctggttaactccgatgaggtcatgaaaaagccttgcccagtgcagatcgtgctggcacacgaggatgatcacaatttcgaattagacgaagaagcgttggaacaaattctcctgcaggaacatatcagagatctgaacatcgtggtcgtgtctgtcgctggggccttccggaagggaaaatcatttttgttagattttatgctccgctatatgtataataaggattctcagagttggattggtggcaataacgaaccactgacaggatttacttggcggggcggttgcgaaagagagactactggaatccaggtctggaatgaagtgtttgtgattgaccgtccgaacgggacaaaggtcgcagtgttattaatggacacccaaggagcgttcgattctcagagcacaatcaaagactgtgcaaccgtgttcgccttgtccactatgacaagtagtgttcaggtgtataacctaagtcaaaacattcaagaagatgatctccagcatctgcagctgttcaccgaatacggtcggcttgcaatggaagaaatttaccagaaaccttttcaaaccttgatgttcctcatccgggactggtcatacccgtacgaacattcttacgggctcgagggcggcaagcagttcctagagaaacgattacaggtgaagcagaatcaacatgaagaactgcagaacgtccggaagcacatccacaattgttttagtaatctcggctgtttccttctgccacaccctgggctgaaggtggcaacaaatccttcatttgacggacgtctgaaagatatcgacgaagacttcaagagagaacttcgcaatttggtgccattgctgcttgcaccagagaatctcgtggagaaggaaatctctgggagcaaggtcacttgtcgcgacctggtggagtatttcaaggcctatatcaagatataccagggggaggagctgccacaccctaagagtatgcttcaggccactgctgaggcaaataacttggcagcagttgctggcgcaagagacacctattgcaagagcatggagcaagtgtgcggaggagacaagccttacatcgcccccagtgacctggaacgcaagcatctggatttaaaggaggtagctatcaagcagtttcgcagcgtgaagaaaatggggggggatgagttttgccgccgctatcaggatcagttggaagcggaaatcgaggaaacatacgccaacttcataaagcataatgacggaaaaaatattttctatgctgccaggacacccgctaccttgtttgctgttatgtttgccatgtacattatttccgggctgactggctttatcggcttgaactctattgccgtcctgtgcaacttggtcatgggactggctctgattttcctgtgcacctgggcctacgtgaagtactccggggagttcagagagatcgggactgtgatcgaccagattgcagagaccctgtgggagcaagtgttctccaaattgtttgaggtgactaggcggcgtatggtgcaccgagccctttcgtcggctcaaagacagcgcctgtcctcgaataataacaagaaaaagaattag

SEQ ID NO: 212026 - DNA, 1740 bp, Artificial Sequence
  derived and/or modified sequence
atggctgagggagatgaagctgcacgtggtcaacagccccaccagggcttgtggaggcggaggagaacctcagatccctcagcagccgtgaaccacgtgtctagtactacctctttgggggaaaactacgaagatgacgatcttgtcaattccgacgaagtcatgaagaagccctgtcctgtccagattgtgctggctcatgaagacgaccacaacttcgagctggatgaagaggcgttggagcagatcctgttgcaggaacatataagagacctgaatatagtggtggtgagtgtcgcgggagctttcagaaagggaaaaagcttcctgttggatttcatgctcaggtatatgtacaataaagattctcagagttggatcgggggtaataacgagccactgacaggtttcacgtggaggggcggatgcgagcgggagacgaccggcattcaggtgtggaacgaggtcttcgtgatcgataggcccaatggaacaaaagtcgctgtgcttttgatggatacccagggggcattcgactctcaatctaccataaaggactgtgctacggtgtttgcactatcaacgatgacctcttctgtgcaggtgtacaacttgagccagaatatccaggaagatgacctgcagcaccttcagctgttcaccgaatatgggcgactggctatggaagaaatatatcagaagccgttccaaacattgatgtttcttatccgagactggtcttacccttatgaacatagctatggccttgagggtggcaagcaatttctggagaaacgcctccaggtcaagcagaatcagcatgaggaactgcagaacgttcgaaagcatatacataactgttttagcaatctcggttgtttcctgctcccgcatcccggactgaaagtggctaccaacccaagtttcgacggcagactaaaggacatcgatgaggacttcaagcgggagttgagaaacctggttccactgctgctggctcctgagaacctggttgagaaggaaatctcaggatctaaggttacttgcagggatctggttgaatactttaaggcttatatcaagatttaccagggggaagagctcccccatcctaagtccatgctacaagccacagctgaggcaaacaatctggccgcagtggcaggcgcaagggacacctactgtaaatctatggagcaggtctgcggcggagacaagccttacattgcccctagcgacctggagaggaagcaccttgacttgaaggaagtcgcgataaaacagtttcgcagcgtcaaaaaaatgggcggtgacgaattctgtagaagatatcaggatcaactggaagctgagatcgaggagacatatgccaattttataaagcataatgatgggaaaaatattttttacgccgctagaacccccgctaccctgtttgcggttatgtttgctatgtatataattagtggtttaacaggttttattggccttaatagtatcgccgttttgtgcaacctggtgatggggctggcgctgatattcctatgtacctgggcctacgtcaaatactctggggagttcagggaaattgggaccgtcatcgaccagattgctgaaacactttgggagcaggtgttcagcaagttgttcgaggtgactaggaggcgaatggtacacagagccttatcgtctgcccagcgacagaggctctcttctaacaacaataaaaaaaagaattag

SEQ ID NO: 212027 - DNA, 2335 bp, Artificial Sequence
  derived and/or modified sequence
aaatcggtacaagatggcggagggggacgaggcagcgcgagggcagcaaccgcaccaggggctgtggcgccggcgacggaccagcgacccaagcgccgcggttaaccacgtctcgtccacgacctccctaggtgagaattatgaagatgatgacctagtaaattctgatgaggttatgaagaaaccatgtccagtacagattgttcttgctcatgaagatgaccataactttgaacttgatgaagaagctttggagcagatattgctacaggagcacatacgagatcttaacatagtagtggtatctgtggcaggagcttttcgtaaagggaagtcatttctactggacttcatgcttagatacatgtataacaaggattctcaaagttggattggtggaaacaatgaaccattgacaggctttacatggcgaggtggctgtgaaagagaaacaacaggcatacaagtttggaatgaagtatttgtgattgacagacctaatggaactaaagttgctgtgctgcttatggatacccagggtgcctttgatagccagtcaactatcaaagactgtgcaacggtgtttgctctgagcactatgactagctctgtccaggtatataatctgtctcagaatattcaagaagatgatcttcaacatttgcaattatttacagagtatggaagacttgcgatggaagaaatctaccagaaaccatttcagacattaatgtttttgattcgagattggagctatccttatgaacattcatatggtttggaaggtggaaagcaatttcttgaaaagagattacaggtaaaacaaaatcaacatgaagagcttcagaatgtaaggaagcacatacacaattgtttctcaaatcttggttgcttccttttgccacatcctggtcttaaagttgcaactaatcctagttttgatgggagattgaaagatattgatgaagactttaaacgagagcttcgaaatctggttccattgctgcttgcccctgaaaatttggtagaaaaagagataagtggatctaaagtcacttgtagagatcttgtagaatattttaaggcttacatcaaaatctatcaaggagaagaacttccacatccaaagtccatgcttcaggcaacagctgaagctaataatcttgctgcagtagcaggagcaagagatacctattgtaaaagtatggaacaggtatgtggaggggacaagccttacattgcaccttcagatctggagcgaaaacacttggatctcaaggaagtggcgataaaacaatttcgttcagtaaaaaagatgggtggagatgagttctgccgtcgttatcaggaccagcttgaagctgaaattgaagaaacctatgcaaattttataaagcacaatgatggcaaaaatatcttctatgctgctcgtaccccagccacactgtttgcggtcatgtttgctatgtatataatctcaggactgactggcttcattggcctaaactctatagctgtcttgtgtaaccttgtcatggggttagcactgatatttctttgtacttgggcatatgttaaatactctggggagttcagagaaattggaacagtgattgatcagattgctgaaacactatgggaacaggtgttttccaaactgtttgaagttactagacgtcgaatggttcaccgtgctctttcatcagcacagcgacagagactgtcatccaacaataacaagaagaaaaattagacagtatttttaacctttttctctatctgaagtgttcacacttacacatgtaggacaataagcaggaccgtctgggccggtctgcataaatgctgtatacataccagatttgatgctgcatatagggtatggaattgcacatccatctcataggaattgtaaatggtttgaataagaggaaagtaatttttgttgcattataaaatgtctagtagcatcataagtttttttgagagaagcatctttttatttcccatattcctggttattttcatcattgctttgaattgaatttttatatctatttttatatgtaactctttttttacctcatgtttttgtttgttttgcacatttctcataccacaggtattgaagcccctgggtgataatttgatggaggaaaacataaggcagtctgtaacaaactctatcaaagcaggcctgactgaccaggtgtctcatcatgccagattaaagacagactgacagttcatctcctcacggactccactctctttttttttcatgcttgctgtacaatgagaactcaaataaaaataaaccaaagtttacaatcaa

SEQ ID NO: 212028 - DNA, 1740 bp, Artificial Sequence
  derived and/or modified sequence
atggccgagggcgacgaggccgccagaggccagcagccccaccagggcctgtggagaagaagaagaaccagcgaccccagcgccgccgtgaaccacgtgagcagcaccaccagcctgggcgagaactacgaggacgacgacctggtgaacagcgacgaggtgatgaagaagccctgccccgtgcagatcgtgctggcccacgaggacgaccacaacttcgagctggacgaggaggccctggagcagatcctgctgcaggagcacatcagagacctgaacatcgtggtggtgagcgtggccggcgccttcagaaagggcaagagcttcctgctggacttcatgctgagatacatgtacaacaaggacagccagagctggatcggcggcaacaacgagcccctgaccggcttcacctggagaggcggctgcgagagagagaccaccggcatccaggtgtggaacgaggtgttcgtgatcgacagacccaacggcaccaaggtggccgtgctgctgatggacacccagggcgccttcgacagccagagcaccatcaaggactgcgccaccgtgttcgccctgagcaccatgaccagcagcgtgcaggtgtacaacctgagccagaacatccaggaggacgacctgcagcacctgcagctgttcaccgagtacggcagactggccatggaggagatctaccagaagcccttccagaccctgatgttcctgatcagagactggagctacccctacgagcacagctacggcctggagggcggcaagcagttcctggagaagagactgcaggtgaagcagaaccagcacgaggagctgcagaacgtgagaaagcacatccacaactgcttcagcaacctgggctgcttcctgctgccccaccccggcctgaaggtggccaccaaccccagcttcgacggcagactgaaggacatcgacgaggacttcaagagagagctgagaaacctggtgcccctgctgctggcccccgagaacctggtggagaaggagatcagcggcagcaaggtgacctgcagagacctggtggagtacttcaaggcctacatcaagatctaccagggcgaggagctgccccaccccaagagcatgctgcaggccaccgccgaggccaacaacctggccgccgtggccggcgccagagacacctactgcaagagcatggagcaggtgtgcggcggcgacaagccctacatcgcccccagcgacctggagagaaagcacctggacctgaaggaggtggccatcaagcagttcagaagcgtgaagaagatgggcggcgacgagttctgcagaagataccaggaccagctggaggccgagatcgaggagacctacgccaacttcatcaagcacaacgacggcaagaacatcttctacgccgccagaacccccgccaccctgttcgccgtgatgttcgccatgtacatcatcagcggcctgaccggcttcatcggcctgaacagcatcgccgtgctgtgcaacctggtgatgggcctggccctgatcttcctgtgcacctgggcctacgtgaagtacagcggcgagttcagagagatcggcaccgtgatcgaccagatcgccgagaccctgtgggagcaggtgttcagcaagctgttcgaggtgaccagaagaagaatggtgcacagagccctgagcagcgcccagagacagagactgagcagcaacaacaacaagaagaagaactag

SEQ ID NO: 212029 - protein, 44 aa, Artificial Sequence
  derived and/or modified sequence
MGMYPPLLLKIYLSRHISILFYLKILYKSGIIWLSWYSFILLVL

SEQ ID NO: 212030 - DNA, 135 bp, Artificial Sequence
  derived and/or modified sequence
atgggcatgtacccccccctgctgctgaagatctacctgagcagacacatcagcatcctgttctacctgaagatcctgtacaagagcggcatcatctggctgagctggtacagcttcatcctgctggtgctgtag

SEQ ID NO: 212031 - DNA, 135 bp, Artificial Sequence
  derived and/or modified sequence
atggggatgtatccgccccttctactgaaaatatatctgagtaggcatattagcatccttttttacctgaaaattctgtacaagagcgggattatttggctgagctggtactcattcatacttcttgtgctttag

SEQ ID NO: 212032 - DNA, 135 bp, Artificial Sequence
  derived and/or modified sequence
atgggcatgtacccacccctgctgctgaagatctacctgagccgccacatcagcatcctcttctacctgaagatcctgtacaagagcggcatcatctggctgtcctggtacagcttcatcctgctggtgctgtag

SEQ ID NO: 212033 - DNA, 135 bp, Artificial Sequence
  derived and/or modified sequence
atgggcatgtacccccccctgctgctgaagatctacctgagccggcatatctctatcctgttttacctgaagattttgtataaaagtggaattatttggttaagctggtacagcttcattttgttagtgttatag

SEQ ID NO: 212034 - DNA, 884 bp, Artificial Sequence
  derived and/or modified sequence
gcccagcccacattagcttttgaagggaatatttttatgttcataggaaaaaaagcatagctcctctatataaccaacttcttttagtactactgatagctagtatgttaagtttgatggactaattataatcttttttttatattcctagtatgctggattctatgattggcagatttaacatttatccttctcgtaattcacaaccctaaagttccatttactaataatttataattttgctggaacatgaatttgaatcttacatgcaacaattggattgagagttttgggagggcagtatgtgggacctgttcacatagtccatcagtctagcagccccatctcagtgtggctttgtttttgcaatttgactttgagtttgtggtaactcctgtggtgtaaatcattgcttcaggttctgagcaacagtgtatattatagctgcattgcaggtttcaggatttgcagggtatggggatgtatccaccattattgttaaagatttaccttagcagacacattagtatactcttctatttaaaaatcctttataaaagtggtattatatggctatcctggtattctttcatattgttagtactttgaaatttttgctgatgttcaattagtaaaattaatggcccctaacagcagttgtactgtttgtatgttaaacttgatacatttagaagttaatgttaaagcctaatcctaaatttttaaaaggtgaaaaagtttttactggcaattgggtggccttgggacctgtgtgaagagcatagactgtagtttggtggaaagagcaaagactttgaagttctcggattctgtgtgtattctgctcctagcagagtgacctcaggcaaatgactttataggca

SEQ ID NO: 212035 - DNA, 135 bp, Artificial Sequence
  derived and/or modified sequence
atgggcatgtaccctccactgctattaaaaatctatttgtctcggcatatatctatcctgttctacctgaaaattctatataagagtggtatcatctggctgagttggtacagttttatccttcttgtgttatag

SEQ ID NO: 212036 - protein, 237 aa, Artificial Sequence
  derived and/or modified sequence
MGSLFPLSLLFFLAAAYPGVGSALGRRTKRAQSPKGSPLAPSGTSVPFWVRMSPEFVAVQPGKSVQLNCSNSCPQPQNSSLRTPLRQGKTLRGPGWVSYQLLDVRAWSSLAHCLVTCAGKTRWATSRITAYKPPHSVILEPPVLKGRKYTLRCHVTQVFPVGYLVVTLRHGSRVIYSESLERFTGLDLANVTLTYEFAAGPRDFWQPVICHARLNLDGLVVRNSSAPITLMLGEAPL

SEQ ID NO: 212037 - DNA, 714 bp, Artificial Sequence
  derived and/or modified sequence
atgggatcactttttccgctgagtctgctctttttcctggcagctgcgtacccaggtgtgggctccgcgttggggagacgaacaaagcgggcccaaagtccaaagggctcccccctggccccttcagggacatccgttccattttgggtgcggatgagcccagaattcgttgccgtccagccaggtaagagcgtacagttaaactgcagcaattcttgtccacaaccacagaatagctcactgagaaccccgctgcgtcaggggaagaccctccgaggccctggatgggtgagttaccagttactagacgttagagcctggtcaagcttggcccactgcctggtgacctgcgctgggaagactagatgggctacctctcgaatcacagcttacaaaccaccgcattctgtgattctcgaacctccagtacttaaagggagaaaatacacactcaggtgccatgttacacaggtgttcccagtgggttacctcgtggtaacccttcgtcacgggtctcgcgtgatttacagcgaaagtttggaacggttcactggcctcgacttagcaaatgtaacgctgacctacgaatttgccgctggaccgagggatttctggcagcctgtcatatgccatgcaagactgaacctggacgggctagtcgtgaggaattcatccgctcctatcacactcatgcttggcgaagcccctctgtag

SEQ ID NO: 212038 - DNA, 714 bp, Artificial Sequence
  derived and/or modified sequence
atgggcagcctcttccccctgagcctgctcttcttcctggccgccgcctacccaggagtgggcagcgccctgggccgccgcaccaagagggcccagagccccaagggcagccccctggcccccagcggcacctctgtgcccttctgggtgaggatgagccctgagtttgtggccgtgcagcccgggaagtctgtgcagctgaactgcagcaacagctgcccccagccccagaacagcagcctgcggacccccctgcggcagggcaagaccctgcggggccctggctgggtgtcctaccagctgctggatgtgcgggcctggagcagcctggcccactgcctggtgacctgtgccggcaagacccgctgggccaccagccgcatcacagcctacaagccaccccacagcgtcatcctggagccccctgtgctgaagggcaggaagtacaccctgcgctgccacgtgacccaggtgtttcctgtgggctacctggtggtgaccctgcggcacggcagcagggtcatctacagcgagagcctggagcgcttcaccggcctggacctggccaacgtgaccctgacctatgaatttgctgctggcccccgggacttctggcagcctgtgatctgccacgcccggctgaacctggatggcctggtggtgaggaacagcagcgcccccatcaccctgatgctgggggaggcccccctgtag

SEQ ID NO: 212039 - DNA, 714 bp, Artificial Sequence
  derived and/or modified sequence
atgggcagcctgttccccctgagcctgctgttcttcctggccgccgcgtatcctggtgtaggctcagctctcggccgtcggactaaaagggcacaatcaccaaagggatccccacttgccccctcaggaacatccgtgcccttctgggttaggatgtcacctgaattcgttgccgtacagcccgggaaatccgttcagctcaactgcagcaactcctgcccccagccccaaaattcgtcactgagaacccctctgaggcagggaaagactctgagaggcccaggatgggtctcataccagcttttagacgtgcgcgcttggtcctccctagcccattgtctggtcacctgcgcggggaagacaaggtgggccacaagccgtattacagcttataaacccccccactcggtgatcttggaacccccagtactgaaaggacgaaaatacacccttcgatgccacgttactcaggttttcccggtgggctatctggttgtcacactacggcatgggtccagagtcatttatagcgaatcccttgagagatttaccgggcttgatctggccaacgtgaccctgacttatgagtttgcagcaggaccgcgcgacttctggcagcctgtgatttgccatgctcggcttaatttggacggattggtggtcagaaacagttcagcgcctatcacactgatgttaggggaggctcccttatag

SEQ ID NO: 212040 - DNA, 714 bp, Artificial Sequence
  derived and/or modified sequence
atggggtcactcttccctttaagcctgctgttttttctggctgccgcatatcccggagtgggaagtgctttaggcaggcggacaaagcgagcccagtcacccaagggttcaccgttggctccgtcaggtacaagtgtcccattctgggttagaatgtcgcctgagttcgttgctgtgcagccaggcaaaagcgtccagctgaactgttcgaattcttgccctcagccacagaatagctctttgcgaaccccccttagacaagggaagacgctaagaggccctgggtgggtatcctatcagctgttggacgtgagagcctggagtagcctcgctcactgtctcgtgacatgtgcgggtaaaacccgatgggcgaccagcagaatcacggcctacaagccccctcacagcgtgatcttggaaccccctgttcttaagggacgcaagtataccctgaggtgccacgtgacccaagtgttccccgtcggatatctcgtggtgaccttgcgacatggatctagagtcatttactctgaaagcctggaaagattcaccgggctggatctggcaaatgtgacacttacgtatgaatttgcggcagggccacgggacttctggcagcccgttatttgtcacgccagactgaatcttgatgggctggtcgtaagaaatagctccgcccctattactctcatgctcggagaggcccctctctag

SEQ ID NO: 212041 - DNA, 714 bp, Artificial Sequence
  derived and/or modified sequence
atgggcagcctgttccccctgagcctgctgttcttcctggccgccgcctaccccggcgtgggcagcgccctgggcagaagaaccaagagagcccagagccccaagggcagccccctggcccccagcggcaccagcgtgcccttctgggtgagaatgagccccgagttcgtggccgtgcagcccggcaagagcgtgcagctgaactgcagcaacagctgcccccagccccagaacagcagcctgagaacccccctgagacagggcaagaccctgagaggccccggctgggtgagctaccagctgctggacgtgagagcctggagcagcctggcccactgcctggtgacctgcgccggcaagaccagatgggccaccagcagaatcaccgcctacaagcccccccacagcgtgatcctggagccccccgtgctgaagggcagaaagtacaccctgagatgccacgtgacccaggtgttccccgtgggctacctggtggtgaccctgagacacggcagcagagtgatctacagcgagagcctggagagattcaccggcctggacctggccaacgtgaccctgacctacgagttcgccgccggccccagagacttctggcagcccgtgatctgccacgccagactgaacctggacggcctggtggtgagaaacagcagcgcccccatcaccctgatgctgggcgaggcccccctgtag

SEQ ID NO: 212042 - protein, 555 aa, Artificial Sequence
  derived and/or modified sequence
MEKARPLWANSLQFVFACISYAVGLGNVWRFPYLCQMYGGGSFLVPYIIMLIVEGMPLLYLELAVGQRMRQGSIGAWRTISPYLSGVGVASVVVSFFLSMYYNVINAWAFWYLFHSFQDPLPWSVCPLNGNHTGYDEECEKASSTQYFWYRKTLNISPSLQENGGVQWEPALCLLLAWLVVYLCILRGTESTGKIEQLANPKAWINAATQIFFSLGLGFGSLIAFASYNEPSNNCQKHAIIVSLINSFTSIFASIVTFSIYGFKATFNYENCLKKVSLLLTNTFDLEDGFLTASNLEQVKGYLASAYPSKYSEMFPQIKNCSLESELDTAVQGTGLAFIVYTEAIKNMEVSQLWSVLYFFMLLMLGIGSMLGNTAAILTPLTDSKIISSHLPKEAISGLVCLVNCAIGMVFTMEAGNYWFDIFNDYAATLSLLLIVLVETIAVCYVYGLRRFESDLKAMTGRAVSWYWKVMWAGVSPLLIVSLFVFYLSDYILTGTLKYQAWDASQGQLVTKDYPAYALAVIGLLVASSTMCIPLAALGTFVQRRLKRGDADPVA

SEQ ID NO: 212043 - DNA, 1668 bp, Artificial Sequence
  derived and/or modified sequence
atggagaaggccagacccctgtgggccaacagcctgcagttcgtgttcgcctgcatcagctacgccgtgggcctgggcaacgtgtggagattcccctacctgtgccagatgtacggcggcggcagcttcctggtgccctacatcatcatgctgatcgtggagggcatgcccctgctgtacctggagctggccgtgggccagagaatgagacagggcagcatcggcgcctggagaaccatcagcccctacctgagcggcgtgggcgtggccagcgtggtggtgagcttcttcctgagcatgtactacaacgtgatcaacgcctgggccttctggtacctgttccacagcttccaggaccccctgccctggagcgtgtgccccctgaacggcaaccacaccggctacgacgaggagtgcgagaaggccagcagcacccagtacttctggtacagaaagaccctgaacatcagccccagcctgcaggagaacggcggcgtgcagtgggagcccgccctgtgcctgctgctggcctggctggtggtgtacctgtgcatcctgagaggcaccgagagcaccggcaagatcgagcagctggccaaccccaaggcctggatcaacgccgccacccagatcttcttcagcctgggcctgggcttcggcagcctgatcgccttcgccagctacaacgagcccagcaacaactgccagaagcacgccatcatcgtgagcctgatcaacagcttcaccagcatcttcgccagcatcgtgaccttcagcatctacggcttcaaggccaccttcaactacgagaactgcctgaagaaggtgagcctgctgctgaccaacaccttcgacctggaggacggcttcctgaccgccagcaacctggagcaggtgaagggctacctggccagcgcctaccccagcaagtacagcgagatgttcccccagatcaagaactgcagcctggagagcgagctggacaccgccgtgcagggcaccggcctggccttcatcgtgtacaccgaggccatcaagaacatggaggtgagccagctgtggagcgtgctgtacttcttcatgctgctgatgctgggcatcggcagcatgctgggcaacaccgccgccatcctgacccccctgaccgacagcaagatcatcagcagccacctgcccaaggaggccatcagcggcctggtgtgcctggtgaactgcgccatcggcatggtgttcaccatggaggccggcaactactggttcgacatcttcaacgactacgccgccaccctgagcctgctgctgatcgtgctggtggagaccatcgccgtgtgctacgtgtacggcctgagaagattcgagagcgacctgaaggccatgaccggcagagccgtgagctggtactggaaggtgatgtgggccggcgtgagccccctgctgatcgtgagcctgttcgtgttctacctgagcgactacatcctgaccggcaccctgaagtaccaggcctgggacgccagccagggccagctggtgaccaaggactaccccgcctacgccctggccgtgatcggcctgctggtggccagcagcaccatgtgcatccccctggccgccctgggcaccttcgtgcagagaagactgaagagaggcgacgccgaccccgtggcctag

SEQ ID NO: 212044 - DNA, 1668 bp, Artificial Sequence
  derived and/or modified sequence
atggagaaagctagacccctgtgggctaatagcctccagttcgttttcgcctgcatctcctatgccgttggcctggggaatgtgtggcggttcccctatctttgccagatgtacggcgggggcagcttcctcgtcccctatattatcatgctaatcgtcgaggggatgccgctgctgtacctggagttggcagtcggccagcggatgcgccagggctctattggagcctggagaaccatctcgccatacctttctggcgtcggtgtggcctcagtggtggtctcttttttcctctccatgtactacaatgtcatcaatgcatgggccttttggtatctgttccattccttccaggatcccctgccctggagcgtgtgtcccctgaacggcaatcacactgggtacgacgaagaatgtgaaaaagcttcctccacccagtacttttggtatcggaaaactctcaatatctccccctctcttcaagagaatggcggggttcagtgggagcctgcgctgtgtctcctgctggcctggctagttgtatatctctgtattctccgaggcactgaatccacaggcaagatcgaacagctggccaacccaaaggcatggattaatgccgccactcaaatctttttctcgctgggtctgggatttggctccctcattgctttcgcgagttacaacgagcctagcaataactgccaaaaacacgccatcatcgtgagcctcataaattcctttacatcaatttttgcttccatcgtgacattttcaatttacgggtttaaagcgacattcaattatgagaattgcctcaaaaaagtaagcctgctactgaccaatactttcgatctggaggatggctttctgacagcttccaacctagagcaagttaagggctacctggcctccgcctatccaagcaaatacagcgagatgtttcctcagataaagaattgttccctggaatcagagctggataccgcggttcaaggtacaggtctggcctttattgtttacactgaggccatcaagaatatggaggtctctcagttgtggtctgtgctctatttctttatgcttcttatgctgggcataggaagtatgttgggcaatactgcagctattctcacaccgctcactgactccaaaatcattagtagtcacctccctaaagaagcgatcagtgggctagtatgcctggttaattgcgctattggcatggtttttaccatggaggccggaaattattggttcgatattttcaacgattacgcggctactctctccctcctcctcatagtgttggtggaaaccatcgctgtctgttacgtgtatgggttgagacggttcgaatccgacctcaaggccatgactggaagggctgttagctggtactggaaagttatgtgggccggagtttcgcctctgttgattgtctctctgtttgtgttttacctgtccgactacattctgacaggcactctcaagtaccaagcctgggatgccagtcaaggccagttagtcactaaggactatcccgcctatgctctggctgtgattggcttgctggtggccagcagtaccatgtgtattcccctggccgcccttgggacctttgtccaaagacggctcaagaggggagacgcagatcctgttgcttag

SEQ ID NO: 212045 - DNA, 1668 bp, Artificial Sequence
  derived and/or modified sequence
atggagaaggcccggcccctgtgggccaacagcctgcagtttgtgtttgcctgcatctcctatgctgtgggcctgggcaatgtgtggaggttcccctacctgtgccagatgtatggaggcggcagcttcctggtgccctacatcatcatgctgattgtggagggcatgcccctgctgtacctggagctggccgtgggccagaggatgaggcagggcagcatcggggcctggaggaccatcagcccctacctgtctggagtgggcgtggcctctgtggtggtgtccttcttcctgtccatgtactacaacgtcatcaatgcctgggccttctggtacctgttccacagcttccaggaccccctgccctggagcgtgtgccccctgaatggaaaccacacaggctatgatgaggagtgtgagaaggccagcagcacccagtacttctggtacaggaagaccctgaacatcagccccagcctgcaggagaatggaggagtgcagtgggagcccgccctgtgcctgctgctggcctggctggtggtgtacctgtgcatcctgcggggcacagagagcacaggcaagattgagcagctggccaaccccaaggcctggatcaatgctgccacccagatcttcttcagcctgggcctgggcttcggcagcctgattgcctttgccagctacaatgagcccagcaacaactgccagaagcacgccatcatcgtgtccctcatcaacagcttcaccagcatctttgccagcatcgtgaccttcagcatctacggcttcaaggccaccttcaactatgagaactgcctgaagaaggtgtccctgctgctgaccaacacctttgacctggaggatggcttcctgacagccagcaacctggagcaggtgaagggctacctggccagcgcctaccccagcaagtacagcgagatgttcccccagatcaagaactgcagcctggagagcgagctggacacagctgtgcagggcaccggcctggccttcatcgtgtacacagaggccatcaagaacatggaggtgtcccagctgtggagcgtgctgtacttcttcatgctgctgatgctgggcatcggctccatgctgggcaacacagctgccatcctgacccccctgacagacagcaagatcatcagcagccacctgcccaaggaggccatcagcggcctggtgtgcctggtgaactgtgccatcggcatggtgttcaccatggaggccggcaactactggtttgacatcttcaatgactatgctgccaccctgagcctgctgctgattgtgctggtggagaccatcgctgtgtgctacgtgtatggcctgcggagatttgaaagtgacctgaaggccatgacaggccgggctgtgtcctggtactggaaggtgatgtgggccggcgtgagccccctgctgattgtgtccctgtttgtgttctacctgagtgactacatcctgaccggcaccctgaagtaccaggcctgggatgccagccagggccagctggtgaccaaggactacccagcctatgccctggccgtcatcggcctgctggtggccagcagcaccatgtgcatccccctggccgccctgggcacctttgtgcagaggcggctgaagagaggagatgctgaccctgtggcctag
